United States Patent Application Publication US 2006/0107345 A1 - sequence listing, part 9

SEQ ID NO: 35042 - DNA, 1678 bp, Zea mays subsp. mays
  misc_feature (1201)..(1201): n is a, c, g, or t
atctcgcaagcagcagcagagcagaaactgagggaagcgagggacggcgatggcgggtgcggaggggagagggccgagacggagccgcgtggcgttcgtgctggtggacgggatcggggacgtgagcgttccgtcgctgggcgggcgcacgccgctggacgcggcgtgcgcgccgcggctggacgcggtggcggcggccggggtgaccgggctcatggaccccgtggagccggggcttgcatgcggcagcgacacggcgcacctatccctcctcgggtacgacccacgggagtactaccgcggccgcggcgcgttcgaatccatgggtgccgggctcgccatggcgcctggcgacatcgccttcaagtcgaacttcgctacactggatgagaacactggagttatcatcagcaggagggcagatcggcactttgaagaggaaggccctatactctgtgctgcgttggatgggatgaaacttcggtcgtttcctgagtatgaagtcagagtaagatatgctaccgagcatagatgtggtgtggttgtcaaaggaccaaagctgagtgggaacatttctggaactgatcccttgaaggacaaccgcttgcatctgaaggctgaaccgttggatggctcagaagaagctaaaaacactgcagctgtggtcaatgagctttctatggagattacgcgcatactggtttctcaccccatcaacgcaaagcgtgcagctgaggggaagaacatcgcaaatgttgtgttgctgcgaggttgtggtattcggattgaggtgcctgcctttgaaaccaaacatggacttgcaccttgcatggttgctcctaccaagatcatagctggcctgggactgtcactggggattgatatccttgaagcacctggagcaactggagattatcgtactctcttaacttctaaagctaaagccatagccaaggcactctctgcccctatggatacaccacctcgtgtttttgtgcctggagaggatggatacaaggctggaaaagaaaatggatatgactttgggttcctgcacataaaggccattgatgatgctggtcatgacaaggctgtcaagttgaaagtacggggtctagaagctgttgatcgagctattggtcagcttgcgaggcttctttgggaagctgaaaaggccggacactatcagtactttctttgngtcactggagaccattctactcctgttgaatatggtgatcatagcttcgaacccgtcccgtttgcaatatgcagactgagagattatgcaggagccattggggaggataatattatgaatacacagctcgacgattttcccctcccttcggtaaaatccggagaagatttgctcgacagtatagaatcactggagcacaagcctggtcaacttaaagctttcagtggcgacagtgtgtgtgagttcaacgagatcgccgctgcgaggggctgccttggacgattcccaggaagcgagatgatgggcatcattaagaagtttatcaaggccaagaatgattaatgctggttgaaatgctaacctttagcgtaatatattggccataaggtttattatcaatgtaataaactaataatgacagaatggagcaatatggaagaaccgtcttgattggagatgaataagagataccttggc

SEQ ID NO: 35043 - protein, 497 aa, Zea mays subsp. mays
  misc_feature (384)..(384): Xaa can be any naturally occurring amino acid
MAGAEGRGPRRSRVAFVLVDGIGDVSVPSLGGRTPLDAACAPRLDAVAAAGVTGLMDPVEPGLACGSDTAHLSLLGYDPREYYRGRGAFESMGAGLAMAPGDIAFKSNFATLDENTGVIISRRADRHFEEEGPILCAALDGMKLRSFPEYEVRVRYATEHRCGVVVKGPKLSGNISGTDPLKDNRLHLKAEPLDGSEEAKNTAAVVNELSMEITRILVSHPINAKRAAEGKNIANVVLLRGCGIRIEVPAFETKHGLAPCMVAPTKIIAGLGLSLGIDILEAPGATGDYRTLLTSKAKAIAKALSAPMDTPPRVFVPGEDGYKAGKENGYDFGFLHIKAIDDAGHDKAVKLKVRGLEAVDRAIGQLARLLWEAEKAGHYQYFLXVTGDHSTPVEYGDHSFEPVPFAICRLRDYAGAIGEDNIMNTQLDDFPLPSVKSGEDLLDSIESLEHKPGQLKAFSGDSVCEFNEIAAARGCLGRFPGSEMMGIIKKFIKAKND

SEQ ID NO: 35044 - protein, 442 aa, Zea mays subsp. mays
  misc_feature (329)..(329): Xaa can be any naturally occurring amino acid
MDPVEPGLACGSDTAHLSLLGYDPREYYRGRGAFESMGAGLAMAPGDIAFKSNFATLDENTGVIISRRADRHFEEEGPILCAALDGMKLRSFPEYEVRVRYATEHRCGVVVKGPKLSGNISGTDPLKDNRLHLKAEPLDGSEEAKNTAAVVNELSMEITRILVSHPINAKRAAEGKNIANVVLLRGCGIRIEVPAFETKHGLAPCMVAPTKIIAGLGLSLGIDILEAPGATGDYRTLLTSKAKAIAKALSAPMDTPPRVFVPGEDGYKAGKENGYDFGFLHIKAIDDAGHDKAVKLKVRGLEAVDRAIGQLARLLWEAEKAGHYQYFLXVTGDHSTPVEYGDHSFEPVPFAICRLRDYAGAIGEDNIMNTQLDDFPLPSVKSGEDLLDSIESLEHKPGQLKAFSGDSVCEFNEIAAARGCLGRFPGSEMMGIIKKFIKAKND

SEQ ID NO: 35045 - protein, 406 aa, Zea mays subsp. mays
  misc_feature (293)..(293): Xaa can be any naturally occurring amino acid
MGAGLAMAPGDIAFKSNFATLDENTGVIISRRADRHFEEEGPILCAALDGMKLRSFPEYEVRVRYATEHRCGVVVKGPKLSGNISGTDPLKDNRLHLKAEPLDGSEEAKNTAAVVNELSMEITRILVSHPINAKRAAEGKNIANVVLLRGCGIRIEVPAFETKHGLAPCMVAPTKIIAGLGLSLGIDILEAPGATGDYRTLLTSKAKAIAKALSAPMDTPPRVFVPGEDGYKAGKENGYDFGFLHIKAIDDAGHDKAVKLKVRGLEAVDRAIGQLARLLWEAEKAGHYQYFLXVTGDHSTPVEYGDHSFEPVPFAICRLRDYAGAIGEDNIMNTQLDDFPLPSVKSGEDLLDSIESLEHKPGQLKAFSGDSVCEFNEIAAARGCLGRFPGSEMMGIIKKFIKAKND

SEQ ID NO: 35046 - DNA, 1837 bp, Zea mays subsp. mays
atcaccatcttcaagcatatcccatcaatatccagagagtttgagagagcgagcattgcgagagcaccatccgacatggaccgcttcatcacccagaccgaggggaggagggaccgcaagcatatcccatctgtatctagagagtttgcgggagcgagcgctgcgagagcatcgcctggcatggaacgctccatcgccaagtctgaggtgaggtgggaccgctttgtcgagactggtaaggggcgatggtgcaggatccactgaccacggagactgggggcaagatggagcacgacctgctcatgtacagcccgcgcagcgccgcgagggccaccgcaaccggcatccccatcggcgaccaaggtgtggccgtgctacggggggcccctcatcgttggcgctggaccagcagggctagcatgcgcggcgatgctcaccatgggattggtgccctacgtgatcctggaacgtgacatgtgcatcgcatcaacgtggcaccgccgcacgtacgataggctgtgtttgcacctacccaagcgctactgccagctgccgctcatgcccttcccgcatagctaccccacatacccggttaggcagcagtttctggcctacctcgatgagtacaagcgaaagcacggcatccgccccttcttcaacatggaggttgtcagcgccgagtacgacggtgagtattggtgcgtgcgcaccaaggataccagcgacaatgttggagggtctatgctttcctcttgcactatggagtaccgctccaaatggctaattgtggccactggtgaaaacgctgagccggtggtacctgagattaagggcatgcgaagcttcaagggtgaagtctttcactcaagcgactatcgcaacggcgaggaatttcaaggcaaaaatgtgctcgtcattggttgtggcaactctggcatggaggtgtcgctggatcttgccaactacaatgtgcatacctctatggttgtgcgtgattcgggacacgtccttccaagagagatactgggaatctctacatttacattgtccttgtggcttcagacattttttaatattaaagtagtggatcaaatccttcttgtactagcctggttcattctaggtgacaccaggcgtatcggtattcctcgacctaatttaggtccaatggaactaaaacaattgtctggtaagacaccggtacttgacgttggcacgattgcaaagatcaaatccggagacataaaagtgtttccgggaattaaaagttttcaagaggatggtgtagagtttattgatggtagaatcgaatcattcgatgttgttatttttgcaactggttataaaagtaatgttccatattggttgaaggaaaatgaatttttttcacggaaagatggatttccatgtagaccaaatgagtggaaaggaaagaatggtctatatgctgctggattctcgagacgtggtctacttggtgtttctatggatgcaactaaaattgcaaatgatattatacaatcttataataacataatatttcacccgatggacatccaacgatcacaagacgattagaggccagcttaacaagacaagagttttctagacggaatcagtagtcgcactcgtgcgtctcgttggtggagtgatacatgccgttgaaatttggtccattggatagggtggagagctgttgactttttctttaaaaaaaattccagtctctcatatgaaaatttgtttttgcttgtgatgtgatacatgccattgaaatttggcccattggatatggtggagagttgttgactttttctttaaaaaattccagtctccc

SEQ ID NO: 35047 - protein, 382 aa, Zea mays subsp. mays
MLTMGLVPYVILERDMCIASTWHRRTYDRLCLHLPKRYCQLPLMPFPHSYPTYPVRQQFLAYLDEYKRKHGIRPFFNMEVVSAEYDGEYWCVRTKDTSDNVGGSMLSSCTMEYRSKWLIVATGENAEPVVPEIKGMRSFKGEVFHSSDYRNGEEFQGKNVLVIGCGNSGMEVSLDLANYNVHTSMVVRDSGHVLPREILGISTFTLSLWLQTFFNIKVVDQILLVLAWFILGDTRRIGIPRPNLGPMELKQLSGKTPVLDVGTIAKIKSGDIKVFPGIKSFQEDGVEFIDGRIESFDVVIFATGYKSNVPYWLKENEFFSRKDGFPCRPNEWKGKNGLYAAGFSRRGLLGVSMDATKIANDIIQSYNNIIFHPMDIQRSQDD

SEQ ID NO: 35048 - protein, 379 aa, Zea mays subsp. mays
MGLVPYVILERDMCIASTWHRRTYDRLCLHLPKRYCQLPLMPFPHSYPTYPVRQQFLAYLDEYKRKHGIRPFFNMEVVSAEYDGEYWCVRTKDTSDNVGGSMLSSCTMEYRSKWLIVATGENAEPVVPEIKGMRSFKGEVFHSSDYRNGEEFQGKNVLVIGCGNSGMEVSLDLANYNVHTSMVVRDSGHVLPREILGISTFTLSLWLQTFFNIKVVDQILLVLAWFILGDTRRIGIPRPNLGPMELKQLSGKTPVLDVGTIAKIKSGDIKVFPGIKSFQEDGVEFIDGRIESFDVVIFATGYKSNVPYWLKENEFFSRKDGFPCRPNEWKGKNGLYAAGFSRRGLLGVSMDATKIANDIIQSYNNIIFHPMDIQRSQDD

SEQ ID NO: 35049 - protein, 367 aa, Zea mays subsp. mays
MCIASTWHRRTYDRLCLHLPKRYCQLPLMPFPHSYPTYPVRQQFLAYLDEYKRKHGIRPFFNMEVVSAEYDGEYWCVRTKDTSDNVGGSMLSSCTMEYRSKWLIVATGENAEPVVPEIKGMRSFKGEVFHSSDYRNGEEFQGKNVLVIGCGNSGMEVSLDLANYNVHTSMVVRDSGHVLPREILGISTFTLSLWLQTFFNIKVVDQILLVLAWFILGDTRRIGIPRPNLGPMELKQLSGKTPVLDVGTIAKIKSGDIKVFPGIKSFQEDGVEFIDGRIESFDVVIFATGYKSNVPYWLKENEFFSRKDGFPCRPNEWKGKNGLYAAGFSRRGLLGVSMDATKIANDIIQSYNNIIFHPMDIQRSQDD

SEQ ID NO: 35050 - DNA, 1190 bp, Zea mays subsp. mays
aatccgttcccccggttctcattcccaccccgcctcctattctcctcgctcgcgctgacgggctcccacacgcaccccccctctgtgccgccacaccaaaaccgcactccaccgccacagtccccgcctccgcgtcgctgtcgtccgtcatcggtgccgtcgcttccccagcacggtacccctagcgccagcgcacgctataaggcaccgcggtctagccatggcgcccgcaccggcatcgctctccgcgcccaacgccctctccctgcccgcgcctgctagagtcacctccgggaggtggaacaggagcctgtctgtctccgccgctgcgcggtccgtgtcccgggtggtgtctgtcgcgtccgcggcagcggtcacggcgcagaggaggctggtcgccgcggcagcggccacggagatggcgcccgcggcgagcggggaggatgggagcaagcccttcgtggaggagatgcgggcggtcgcgatgaagctgcacaccaaggaccaggcccgcgagggggagaaggagcctcaggcgccccccgtcgccaagtgggagccctccgtcgagggctacctccgattcctcgtcgacagcaagctcgtcttccagacgctcgaggccatcgtcgagcgctccgccgtcccttggtatgcagagttccggaacactgggctggagagatcagaggcactcaaaaaggatctggaatggttcaagcaacagggccacacaattccagaaccatcgccccctggcaccacatacgcttctctattggaagaactgtctgagaaggacccccaggcatttatctgccatttctataacgtctactttgctcatactgctggaggccgaatgattggcaaaaaggtttctgagaagattctggacaagaaagagctggagttctacaagtgggagggcaatctctcccagctgctgcagaacgtccgcaacaagcttaaccaagtcgcttcaagctggtctcgggaggagaaggatcactgcctgcaggagacggagaagtcgttcgcctactcaggaggcctcctccgccacatattcacctgatttaacactgttggccgatccagtttcaaacgctgtacatacataacctttgactgttaaaactttattactggtgagggggatctccctcccccagatacgttttacctgc

SEQ ID NO: 35051 - protein, 285 aa, Zea mays subsp. mays
MAPAPASLSAPNALSLPAPARVTSGRWNRSLSVSAAARSVSRVVSVASAAAVTAQRRLVAAAAATEMAPAASGEDGSKPFVEEMRAVAMKLHTKDQAREGEKEPQAPPVAKWEPSVEGYLRFLVDSKLVFQTLEAIVERSAVPWYAEFRNTGLERSEALKKDLEWFKQQGHTIPEPSPPGTTYASLLEELSEKDPQAFICHFYNVYFAHTAGGRMIGKKVSEKILDKKELEFYKWEGNLSQLLQNVRNKLNQVASSWSREEKDHCLQETEKSFAYSGGLLRHIFT

SEQ ID NO: 35052 - protein, 219 aa, Zea mays subsp. mays
MAPAASGEDGSKPFVEEMRAVAMKLHTKDQAREGEKEPQAPPVAKWEPSVEGYLRFLVDSKLVFQTLEAIVERSAVPWYAEFRNTGLERSEALKKDLEWFKQQGHTIPEPSPPGTTYASLLEELSEKDPQAFICHFYNVYFAHTAGGRMIGKKVSEKILDKKELEFYKWEGNLSQLLQNVRNKLNQVASSWSREEKDHCLQETEKSFAYSGGLLRHIFT

SEQ ID NO: 35053 - protein, 202 aa, Zea mays subsp. mays
MRAVAMKLHTKDQAREGEKEPQAPPVAKWEPSVEGYLRFLVDSKLVFQTLEAIVERSAVPWYAEFRNTGLERSEALKKDLEWFKQQGHTIPEPSPPGTTYASLLEELSEKDPQAFICHFYNVYFAHTAGGRMIGKKVSEKILDKKELEFYKWEGNLSQLLQNVRNKLNQVASSWSREEKDHCLQETEKSFAYSGGLLRHIFT

SEQ ID NO: 35054 - DNA, 1305 bp, Zea mays subsp. mays
aaaaaaccgccccctcccttcctcttctcctagctctcttgcctgcgcaccactcgagtcgagactcgagaggcacctgatctttccttcccgtcttcctcccacacgtccccatcaccattgctgcgacgagagtgagcgggagagggtaggtggcgaggcggcggagatggggcgggggccggtgcagctgcgccggatcgagaacaagatcaaccgccaggtgaccttctccaagcgccggaacgggctgctgaagaaggcccacgagatctccgtgctctgcgacgcagaggtcgcgctcatcgtcttctccactaaggggaagctctacgagtactctagccattccagcatggaaggcattcttgagcgttaccagcgttactcatttgaagaaagggcagtacttaacccaagtattgaagaccaggcaaattggggagatgaatatgtccggttaaaatccaaacttgatgcacttcagaagagtcaaaggcagctgttaggagaacaattgagttcactgaccataaaagaactccagcaactggagcaacaactggacagttctttgaagcatattaggtcaagaaagaatcagctcatgttcgattcaatttccgcgcttcagaaaaaggagaaagcacttacagatcaaaacggtgtcctgcaaaagttcatggaggcagagaaggagaaaaacaaggctttgatgaacgcgcagctccgggagcagcaaaatggagcatcaacaagctccccatcactttcaccaccaatagttccagattccatgccaactctaaatatagggccatgtcaacatagaggggcagcagaatctgagtctgaaccgtctcctgctcctgcacaagcaaacaggggcaacctgccaccatggatgctccgcactgtcaagtaacaggtgaggtcttcccagtgtagttttgcagctgatctcgacagcaacacacctgtcaccgaaatgcttcggtgaccctagatatcaaccgatgcacgatccatctcgatcctgtgatcgaataccggcgtaggtactaccaataaagtcaggccccgtcaaatgctttacatggtgattgaagtctggagcttctcagcaccaccatatattgtgttcagttcctgtgtttattgccatagctaccctttttttctctgatctacgagctagacgtagctttgtgcttggagattccactactatgtttcctctgtcctgtgtatgctttaacggagatgcacgttgtacccgtggtaatatatataaatttgcgttgt

SEQ ID NO: 35055 - protein, 307 aa, Zea mays subsp. mays
KNRPLPSSSPSSLACAPLESRLERHLIFPSRLPPTRPHHHCCDESERERVGGEAAEMGRGPVQLRRIENKINRQVTFSKRRNGLLKKAHEISVLCDAEVALIVFSTKGKLYEYSSHSSMEGILERYQRYSFEERAVLNPSIEDQANWGDEYVRLKSKLDALQKSQRQLLGEQLSSLTIKELQQLEQQLDSSLKHIRSRKNQLMFDSISALQKKEKALTDQNGVLQKFMEAEKEKNKALMNAQLREQQNGASTSSPSLSPPIVPDSMPTLNIGPCQHRGAAESESEPSPAPAQANRGNLPPWMLRTVK

SEQ ID NO: 35056 - protein, 251 aa, Zea mays subsp. mays
MGRGPVQLRRIENKINRQVTFSKRRNGLLKKAHEISVLCDAEVALIVFSTKGKLYEYSSHSSMEGILERYQRYSFEERAVLNPSIEDQANWGDEYVRLKSKLDALQKSQRQLLGEQLSSLTIKELQQLEQQLDSSLKHIRSRKNQLMFDSISALQKKEKALTDQNGVLQKFMEAEKEKNKALMNAQLREQQNGASTSSPSLSPPIVPDSMPTLNIGPCQHRGAAESESEPSPAPAQANRGNLPPWMLRTVK

SEQ ID NO: 35057 - protein, 189 aa, Zea mays subsp. mays
MEGILERYQRYSFEERAVLNPSIEDQANWGDEYVRLKSKLDALQKSQRQLLGEQLSSLTIKELQQLEQQLDSSLKHIRSRKNQLMFDSISALQKKEKALTDQNGVLQKFMEAEKEKNKALMNAQLREQQNGASTSSPSLSPPIVPDSMPTLNIGPCQHRGAAESESEPSPAPAQANRGNLPPWMLRTVK

SEQ ID NO: 35058 - DNA, 1150 bp, Zea mays subsp. mays
agactagagccgcccgcccgcccgcccgcccgtgtgccgtttaccggagcacaacacaacgcggccccctcacggcgtggagtggattgggccgacgccgatcgagagcagaggagaggagcgcggtcggatagggtttgtctgggtgaggttttgagcgagagcgcagggcgagggaaggaggaggaggaggactggctcctggaggaggaggccggccggggcttggatggtcgcggagcgctcccgtaggtggtgtccatgggaaggtcgttcagggactcgctcaaggtgctcgaggccgacatccagcacgccaactccattgcttctgaatttaggagggaatatgatggcgcctcccttcagatgaggatggcatattgccctgctgcccactttttcctttttcttgtgcagtggacagactgcaaccttgctggtgcacttgggctgttgaggattctaatttataaggtttacgctgatgggacaaccaccatgtgtactcatgaaagaaaagcaagcattagggaattttatgctgtcatatttccctccttgatgcaattacatgaaagaatcaatgaagtggaggatagaaaacagaaagcaatatgtctagagaggtacagaagacgagatgaggatccgaaaactgtggtatcagagattgatgataatatagaggaggaatgtggcatatgcatggaaataaatgtcaaagttgttcttccaacctgtagccacgctatgtgcattaaatgctatcgtgaatggaggtcaaggtcccagtcctgtccgttctgccgcgacagcctcaagagggtaaactctgctgacctgtggatatacacggacagcaaggacatcgtggatatggcggacagtccgaagagagaacctgaggcgactcttcatgtacatagacaagctgcccaccgtcatcccagaatctgtatttgacgtctacgactcccatgtaaagtgacgcagttgagcacgtctgccagttgttttatgtatttgctacgtctactggtgctgattcctgggcctctggtgctgttgtgccttttttttaaagagtttcgaagcaactgggagccgaggaggctaatatacactgaatgtacgtagaacttgttcc

SEQ ID NO: 35059 - protein, 234 aa, Zea mays subsp. mays
MGRSFRDSLKVLEADIQHANSIASEFRREYDGASLQMRMAYCPAAHFFLFLVQWTDCNLAGALGLLRILIYKVYADGTTTMCTHERKASIREFYAVIFPSLMQLHERINEVEDRKQKAICLERYRRRDEDPKTVVSEIDDNIEEECGICMEINVKVVLPTCSHAMCIKCYREWRSRSQSCPFCRDSLKRVNSADLWIYTDSKDIVDMADSPKREPEATLHVHRQAAHRHPRICI

SEQ ID NO: 35060 - protein, 198 aa, Zea mays subsp. mays
MRMAYCPAAHFFLFLVQWTDCNLAGALGLLRILIYKVYADGTTTMCTHERKASIREFYAVIFPSLMQLHERINEVEDRKQKAICLERYRRRDEDPKTVVSEIDDNIEEECGICMEINVKVVLPTCSHAMCIKCYREWRSRSQSCPFCRDSLKRVNSADLWIYTDSKDIVDMADSPKREPEATLHVHRQAAHRHPRICI

SEQ ID NO: 35061 - protein, 196 aa, Zea mays subsp. mays
MAYCPAAHFFLFLVQWTDCNLAGALGLLRILIYKVYADGTTTMCTHERKASIREFYAVIFPSLMQLHERINEVEDRKQKAICLERYRRRDEDPKTVVSEIDDNIEEECGICMEINVKVVLPTCSHAMCIKCYREWRSRSQSCPFCRDSLKRVNSADLWIYTDSKDIVDMADSPKREPEATLHVHRQAAHRHPRICI

SEQ ID NO: 35062 - DNA, 1507 bp, Zea mays subsp. mays
atcactccacagagagagagagagagagagaacccccctcgtttggtcgccggcacacaagacggtagtaggcggccatcgatcggcggacgacggacggaactcagctaagcaatctcgccccgtcttctccggcggcgacacacacgcgccccttctacgtcgagaaatcagttccccatcctccatcatccattccgattctccatctatcgctggtgcggcaggatcgcagtagctagcacgcgtccgtcgtctcgggtccgtccggcggcgcaatggccgcctgtgccggcgtaggacctgttgtggggatggtggtgttccagattatctttgcatttgtcaatatcttctataagctagctgtgtcggacggcatggatctgagggtactcatcgcctaccgctaccttttcggatcagccttcctcggcccgctcgcctacttcgtcgagaggaaaaaccgaacgaaactgacatggagggtggtgttcttgtctttcgcgtgtggcctctcagggggcacgatggcgcagaacctgtacatcgccggcatgaagttcacctcggccactttcgcctccgcgacaaccaacctcctcccggcgtgtaccttcgtcatcgccctcgtcttccgctacgagaagttcgccatccgcagcctgtccagccaggccaaggtcgccgggaccctgctgggcgtcggcggggccatgctgctcaccttctacaagggcgtcgacatcacgccctggcacagcaacctgaacctcgtcgccacgctcacccagcaccaccaccacaccaccaccaccaccaccaactacgccatggggtcgctgctctgcgtctgcagctgcttcttctacgcgctttggatcgtcgtgcaggccaagctgagcaacgagtacccgttccactactccagcaccgctctcatgtgcatcatgaccacgctgcagtcctccatcttcgcgctctgcttcgacagggacgcctcgcaatggcgactcaagttcgacatcaggctgctctcctgcgcctactcgggcatctttgcgtcgggcgtcgcgctggtgataatggcgtggtgcgtgcagcagcgcgggccactgttcgtctccgtgtttagcccgctgatgctgctcattgtggccgtgctgagctcgctgctgctgggtgagaagctgcacctcggcacggcattgggcgcggtgctcatcgtcatgggactctacgccgtgctctggggcaagggacgcgaggcagcggctgaggcggccagggtcagcgtcaacgaccaccccaccaccagcaacagcaacagcagcgaggaggacgacgacaagaagcggcacgttagcgtcccaatgcctcccgcaccaaactccgtctgatgttaagctacaaacggggccggggttggggcgaaaataaatacggagtactagctagtatatataattatatatacgactatggtgatacttccattcccatgccc

SEQ ID NO: 35063 - protein, 373 aa, Zea mays subsp. mays
MAACAGVGPVVGMVVFQIIFAFVNIFYKLAVSDGMDLRVLIAYRYLFGSAFLGPLAYFVERKNRTKLTWRVVFLSFACGLSGGTMAQNLYIAGMKFTSATFASATTNLLPACTFVIALVFRYEKFAIRSLSSQAKVAGTLLGVGGAMLLTFYKGVDITPWHSNLNLVATLTQHHHHTTTTTTNYAMGSLLCVCSCFFYALWIVVQAKLSNEYPFHYSSTALMCIMTTLQSSIFALCFDRDASQWRLKFDIRLLSCAYSGIFASGVALVIMAWCVQQRGPLFVSVFSPLMLLIVAVLSSLLLGEKLHLGTALGAVLIVMGLYAVLWGKGREAAAEAARVSVNDHPTTSNSNSSEEDDDKKRHVSVPMPPAPNSV

SEQ ID NO: 35064 - protein, 361 aa, Zea mays subsp. mays
MVVFQIIFAFVNIFYKLAVSDGMDLRVLIAYRYLFGSAFLGPLAYFVERKNRTKLTWRVVFLSFACGLSGGTMAQNLYIAGMKFTSATFASATTNLLPACTFVIALVFRYEKFAIRSLSSQAKVAGTLLGVGGAMLLTFYKGVDITPWHSNLNLVATLTQHHHHTTTTTTNYAMGSLLCVCSCFFYALWIVVQAKLSNEYPFHYSSTALMCIMTTLQSSIFALCFDRDASQWRLKFDIRLLSCAYSGIFASGVALVIMAWCVQQRGPLFVSVFSPLMLLIVAVLSSLLLGEKLHLGTALGAVLIVMGLYAVLWGKGREAAAEAARVSVNDHPTTSNSNSSEEDDDKKRHVSVPMPPAPNSV

SEQ ID NO: 35065 - protein, 339 aa, Zea mays subsp. mays
MDLRVLIAYRYLFGSAFLGPLAYFVERKNRTKLTWRVVFLSFACGLSGGTMAQNLYIAGMKFTSATFASATTNLLPACTFVIALVFRYEKFAIRSLSSQAKVAGTLLGVGGAMLLTFYKGVDITPWHSNLNLVATLTQHHHHTTTTTTNYAMGSLLCVCSCFFYALWIVVQAKLSNEYPFHYSSTALMCIMTTLQSSIFALCFDRDASQWRLKFDIRLLSCAYSGIFASGVALVIMAWCVQQRGPLFVSVFSPLMLLIVAVLSSLLLGEKLHLGTALGAVLIVMGLYAVLWGKGREAAAEAARVSVNDHPTTSNSNSSEEDDDKKRHVSVPMPPAPNSV

SEQ ID NO: 35066 - DNA, 1218 bp, Zea mays subsp. mays
gttcttttctttggcgtgaaaacctcgaccgatctgtccgatctctctcccgagtccactgcaagccttttcgccttttcctccgccttctcgcgatggcgccgccgcgccgcgctctactcgtcctcgccgctctcctcctctccctctcccttggggccgcctccttccattccgacgagctcctcctcaacgatgacgaagagttcgaggacgtcgtcgcccgcccctccgccccctccccgccggcggccccggtggtctcctcctcccgccgcagatcagcggacgcgccgttgcctggggcaggcgaatccaacgcagtgcagttcacgctcgagcacgaccttggcgacggcaagggcttcgccccagccggaaccttctcggcccgcctcaagaccttcgcccacggcacgcagaccctcactaaacttcgctttacaaggaatgattttactgaggatgataaagcggcgttcaaaaaagtgcttcaggaagatggcttttatacaattaggctgccatctaatgtgttggacactacaaagaaacatcatgttgtttcttcaatcaaagctagatgcattccacgtgacagtttggatgaacacattgttatccacatggatggtgtaaatattttggcagtcaattatggctctgttgatggatgccaataccctaggcctatgaaattgccatcaaaatggacattcagctcttacactatcctaaagactgctgaacaggcaccaagaaccccatcatttgcagatcagttaatagaagctgacaatggtcttggcgaagtaatgaaaccacctgagaaatctttctgggctaaatattggatgtacatcattccgcttggtcttattgtcatgaatgctgttacggcagctgccaacataccagaggaagctgcagggcagggccaacctggagcacaacgggcacctgctgctgttgctgggaggaggagatgatggctgccttccataccgtagttaactatcttcacattgttttctgtttttttggtattgtatcaatcttaccttgactgcatcatctatggtactgcgtgatgatgccatcttttgcttgtgttgaaacacgcagcctatccaagacaatgtggttcctatacatctgtagccaattttggccactagcatgccattggacacttgaaactttacttgaagcctgtgc

SEQ ID NO: 35067 - protein, 328 aa, Zea mays subsp. mays
SFLWRENLDRSVRSLSRVHCKPFRLFLRLLAMAPPRRALLVLAALLLSLSLGAASFHSDELLLNDDEEFEDVVARPSAPSPPAAPVVSSSRRRSADAPLPGAGESNAVQFTLEHDLGDGKGFAPAGTFSARLKTFAHGTQTLTKLRFTRNDFTEDDKAAFKKVLQEDGFYTIRLPSNVLDTTKKHHVVSSIKARCIPRDSLDEHIVIHMDGVNILAVNYGSVDGCQYPRPMKLPSKWTFSSYTILKTAEQAPRTPSFADQLIEADNGLGEVMKPPEKSFWAKYWMYIIPLGLIVMNAVTAAANIPEEAAGQGQPGAQRAPAAVAGRRR

SEQ ID NO: 35068 - protein, 297 aa, Zea mays subsp. mays
MAPPRRALLVLAALLLSLSLGAASFHSDELLLNDDEEFEDVVARPSAPSPPAAPVVSSSRRRSADAPLPGAGESNAVQFTLEHDLGDGKGFAPAGTFSARLKTFAHGTQTLTKLRFTRNDFTEDDKAAFKKVLQEDGFYTIRLPSNVLDTTKKHHVVSSIKARCIPRDSLDEHIVIHMDGVNILAVNYGSVDGCQYPRPMKLPSKWTFSSYTILKTAEQAPRTPSFADQLIEADNGLGEVMKPPEKSFWAKYWMYIIPLGLIVMNAVTAAANIPEEAAGQGQPGAQRAPAAVAGRRR

SEQ ID NO: 35069 - protein, 212 aa, Zea mays subsp. mays
VLFFGVKTSTDLSDLSPESTASLFAFSSAFSRWRRRAALYSSSPLSSSPSPLGPPPSIPTSSSSTMTKSSRTSSPAPPPPPRRRPRWSPPPAADQRTRRCLGQANPTQCSSRSSTTLATARASPQPEPSRPASRPSPTARRPSLNFALQGMILLRMIKRRSKKCFRKMAFIQLGCHLMCWTLQRNIMLFLQSKLDAFHVTVWMNTLLSTWMV

SEQ ID NO: 35070 - DNA, 816 bp, Zea mays subsp. mays
taatcgaaaaatcgaaaacccaccgcacccctgtccactgttggcttggtgacttcctccgctcggctcccctccgctcccgaacggtcgatctttgcatggcagcagcagctggctccaaggggcgggcgatcgctgaaagcttcgtcagccgcgtcctcgccggcaaggccgcctcgccgaggagggccgtgcacgcctcggcgtacgacaagaacctggaggaccaggtgcgcccggcgttcgtgccggacgatgtgatcggcagcgccgggagccccgacaagtactggagcccccaccccaagaccggcgtgttcggcccggcggcggtggaccccaagctggccgctggtggcgcgccggacgccggcgcggatgctgcaggaggcacggtgctggaccagaaggtgtggttccgcccgctcgaggacgtcgagaagccgccccccgccgcgtgagccgcgcggcgctgctaggccagcccacactgctgctcgctcataaaaagggcggcgggagagcctggcagtggcaggcactctgctcgtgctcggcggggctgggctccctgcttatatcactacaatattatactactagtagtggtgcttgatagcagtgtgtggctgtgctaataccagtataatactggttctactataatacagtcgtatcaggcatggcgtgcatcaggactggttgtgatagtagcaacgtgatgctcgtgcctgtaataagaacaagcaggcgatgtgtgcctgtgatgtaccggtgtcttcagtgttataagtacttgggtcaaatggtttctgc

SEQ ID NO: 35071 - protein, 152 aa, Zea mays subsp. mays
IEKSKTHRTPVHCWLGDFLRSAPLRSRTVDLCMAAAAGSKGRAIAESFVSRVLAGKAASPRRAVHASAYDKNLEDQVRPAFVPDDVIGSAGSPDKYWSPHPKTGVFGPAAVDPKLAAGGAPDAGADAAGGTVLDQKVWFRPLEDVEKPPPAA

SEQ ID NO: 35072 - protein, 120 aa, Zea mays subsp. mays
MAAAAGSKGRAIAESFVSRVLAGKAASPRRAVHASAYDKNLEDQVRPAFVPDDVIGSAGSPDKYWSPHPKTGVFGPAAVDPKLAAGGAPDAGADAAGGTVLDQKVWFRPLEDVEKPPPAA

SEQ ID NO: 35073 - DNA, 1596 bp, Zea mays subsp. mays
aatttttcgcgaagtttgtgttgtgattgcgccgttacgttacgtgaagaagacggatcttctacaagctgacggaagggcggatcgtgaaattgcgagttgcgacgccgtcattacaaatacgttatctgttcatccgtcaagccgtcagatctcccggcctgaggattcgattattctttcgctctcgcccaagtcatcgtctggtcgtcgcccgcagaggcgcagacgcccaaaaccggaaggggcgccatggccgcgtcggatctggagagcaaggccaaggaggccttcgtcgacgacgacttcgagctggccaccgagctctacagccaggccatcgacgccgggcccgccaccgccgacctctatgccgaccgcgcccaggcgcacatcaagctcggcaactacactgaggctgtggcggatgctaacaaagcaattgagcttgatcctatgatgcataaagcttactaccggaaaggtgctgcatgcattaagcttgaagaataccaaactgcaaaggctgctcttgagttgggttcttcttatgcatcaggcgattcaaggtttgctcgtctattgaaggaatgtgatgagcgcatcgctgaggaatctagccaggcaccagtaaagaatgttgaggctactgtggctgctactattgaggacaaggaggatttcacaaatatggagaatacaccaccagtgatagaacccccaagcaaaccaaaatacaggcatgactactacaacagtgccacagaagtggtactgacaatatttgctaacggtgttcctgctgatagtgtagtcattgattttggtgaacagatgttgagtgtatccattgaagttcctggtgaagaaccataccattttcagccccgtctgttttctaagattatccctgagaaatgcaaatatcaagtcttatccaccaaggtcgaaatacgccttgcaaaagctgagcaggtgacatggacaaccctggattatagtggaagaccaaagactgttccccagaagataagcacgccagctgaaacagccccaagaccttcatacccatcttcaaaggcgaaaaaagactgggataaactggaagctgaagtcaaaaaggaggagaaggaagaaaaacttgatggtgatgctgcattgaacaaattcttccgtgacatctacaaggatgctgatgaagatatgcggagggccatgatgaagtcattcgtggaatcaaatggcactgttctctcaaccaattggaaagatgttggagcaaagaaggtagaagggagcccccctgatggtatggagctcaagaagtgggaatactaaagtttggactgcccatcttttgtaaatccaggtcttggaaactatgacctaattccgtccacccatagtgccatgagcttgcttggttaagtctctgcttttgtaagctttctgtatgacagtctagcgtgtgtctgagtgctacttgccgtagcttttgatggacataggtatgctattatgtggtatcgaccgggaaccatctgtggtatcaaagacagcaaactataatgtatggaatgcctattctttttggcc

SEQ ID NO: 35074 - protein, 361 aa, Zea mays subsp. mays
MAASDLESKAKEAFVDDDFELATELYSQAIDAGPATADLYADRAQAHIKLGNYTEAVADANKAIELDPMMHKAYYRKGAACIKLEEYQTAKAALELGSSYASGDSRFARLLKECDERIAEESSQAPVKNVEATVAATIEDKEDFTNMENTPPVIEPPSKPKYRHDYYNSATEVVLTIFANGVPADSVVIDFGEQMLSVSIEVPGEEPYHFQPRLFSKIIPEKCKYQVLSTKVEIRLAKAEQVTWTTLDYSGRPKTVPQKISTPAETAPRPSYPSSKAKKDWDKLEAEVKKEEKEEKLDGDAALNKFFRDIYKDADEDMRRAMMKSFVESNGTVLSTNWKDVGAKKVEGSPPDGMELKKWEY

SEQ ID NO: 35075 - protein, 293 aa, Zea mays subsp. mays
MMHKAYYRKGAACIKLEEYQTAKAALELGSSYASGDSRFARLLKECDERIAEESSQAPVKNVEATVAATIEDKEDFTNMENTPPVIEPPSKPKYRHDYYNSATEVVLTIFANGVPADSVVIDFGEQMLSVSIEVPGEEPYHFQPRLFSKIIPEKCKYQVLSTKVEIRLAKAEQVTWTTLDYSGRPKTVPQKISTPAETAPRPSYPSSKAKKDWDKLEAEVKKEEKEEKLDGDAALNKFFRDIYKDADEDMRRAMMKSFVESNGTVLSTNWKDVGAKKVEGSPPDGMELKKWEY

SEQ ID NO: 35076 - protein, 292 aa, Zea mays subsp. mays
MHKAYYRKGAACIKLEEYQTAKAALELGSSYASGDSRFARLLKECDERIAEESSQAPVKNVEATVAATIEDKEDFTNMENTPPVIEPPSKPKYRHDYYNSATEVVLTIFANGVPADSVVIDFGEQMLSVSIEVPGEEPYHFQPRLFSKIIPEKCKYQVLSTKVEIRLAKAEQVTWTTLDYSGRPKTVPQKISTPAETAPRPSYPSSKAKKDWDKLEAEVKKEEKEEKLDGDAALNKFFRDIYKDADEDMRRAMMKSFVESNGTVLSTNWKDVGAKKVEGSPPDGMELKKWEY

SEQ ID NO: 35077 - DNA, 1677 bp, Zea mays subsp. mays
aacaacgcctcctccagtccttcttcgtaagccttcaaaccgacgaatttgagcaactgcacccagagcgcgatccattgccggggaagaagcaacttgttgcgagcctcctctatggcgagctccgaccatggttccaccaccgcccccaaggacgtgccgggcagctacggcctgccgctggtgggcgccgtgcgcgaccgcctcgacttctactacttccaggggcaggacaagtacttcgagtcccgcgtggagcgctacggctccaccgtggtgcgcatgaacgtgccgccgggccccttcatggcgcgcgacccgcgggtggtggcggtcctggacgccaagagcttccccgtgctcttcgacatggacaaggtggagaagaaggacctgttcacgggcacctacatgccgtccacctccctcaccggcggctaccgcgtctgctcgtacctggacccctccgagcccacccacaccaaggtgaagcagctgctcttctccctcctgctctcccgcaaggacgacgtgatccccaccttccgctccaacttctcctcgctcctcgccaccgtggaggcggagctggccaagggcggcaaggccgagttcaacaagctcaacgacgtcacctccttcgacttcatcggcgaggcctacttcggcgtgcgcccctcggcgaccgagctcggcaagggcgggccgagcaaggcggccaagtggctcatctggcagctccacccgctggtcacgctcggcctccccatggtcctggaggagccgctgctccacacgttccacctcccgcctttcctcgtcaagggcgactacagggcgctgtacaagtacttctccacggtggcgaagcaggcgctggacaccgccgagggcctgggcctgtcgcgcgaggaggcctgccacaacctcctcttcgccaccaccttcaacagctacggcggcctcaaggtgctgttcccgggcctgctggccaacgtggccagcggcggcgagaagctccacgagcggctggtggccgagatccgcggcgccgtggccgacgccggcggcaaggtcaccctcgcggcggtggagaggatggagctggccaagtcggtggtgtgggagtcgctgcgcctggacccgcccgtcaagttccagtacgggcacgccaagaaggacctgctggtggagagccacgacgcggtgttccaggtgaggaagggcgagatgctgttcggctaccagccgtgcgccaccaaggacccccgcgtgttcggcgacaccgcccggggacttcgtgcccgaccgcttcctcggcgaggagggcagcaagctgctgcagtacgtgtactggtccaacggccgtgagaccgagaaccccagcgtcgacaacaagcagtgccccgggaagaacttcgtggtgctggtcggcaggctcctcctcgtcgagctcttcctccgctacgacacattcaccgccgaggtcggcaaggagctgctcggcaccagcgtcatcttcaccggtgtcacgaaagctacctccggtccgggcagcgagtaaaccgccccggccggcgcgcgtcgttggatatatgatgagtggacgtgacagagtgtcccattatttcttaatttcgtcattttcctccttccttctaataagacttctctctc

SEQ ID NO: 35078 - protein, 558 aa, Zea mays subsp. mays
QRLLQSFFVSLQTDEFEQLHPERDPLPGKKQLVASLLYGELRPWFHHRPQGRAGQLRPAAGGRRARPPRLLLLPGAGQVLRVPRGALRLHRGAHERAAGPLHGARPAGGGGPGRQELPRALRHGQGGEEGPVHGHLHAVHLPHRRLPRLLVPGPLRAHPHQGEAAALLPPALPQGRRDPHLPLQLLLAPRHRGGGAGQGRQGRVQQAQRRHLLRLHRRGLLRRAPLGDRARQGRAEQGGQVAHLAAPPAGHARPPHGPGGAAAPHVPPPAFPRQGRLQGAVQVLLHGGEAGAGHRRGPGPVARGGLPQPPLRHHLQQLRRPQGAVPGPAGQRGQRRREAPRAAGGRDPRRRGRRRRQGHPRGGGEDGAGQVGGVGVAAPGPARQVPVRARQEGPAGGEPRRGVPGEEGRDAVRLPAVRHQGPPRVRRHRPGTSCPTASSARRAASCCSTCTGPTAVRPRTPASTTSSAPGRTSWCWSAGSSSSSSSSATTHSPPRSARSCSAPASSSPVSRKLPPVRAASKPPRPARVVGYMMSGRDRVSHYFLISSFSSFLLIRLLS

SEQ ID NO: 35079 - protein, 418 aa, Zea mays subsp. mays
MASSDHGSTTAPKDVPGSYGLPLVGAVRDRLDFYYFQGQDKYFESRVERYGSTVVRMNVPPGPFMARDPRVVAVLDAKSFPVLFDMDKVEKKDLFTGTYMPSTSLTGGYRVCSYLDPSEPTHTKVKQLLFSLLLSRKDDVIPTFRSNFSSLLATVEAELAKGGKAEFNKLNDVTSFDFIGEAYFGVRPSATELGKGGPSKAAKWLIWQLHPLVTLGLPMVLEEPLLHTFHLPPFLVKGDYRALYKYFSTVAKQALDTAEGLGLSREEACHNLLFATTFNSYGGLKVLFPGLLANVASGGEKLHERLVAEIRGAVADAGGKVTLAAVERMELAKSVVWESLRLDPPVKFQYGHAKKDLLVESHDAVFQVRKGEMLFGYQPCATKDPRVFGDTARGLRARPLPRRGGQQAAAVRVLVQRP

SEQ ID NO: 35080 - protein, 362 aa, Zea mays subsp. mays
MNVPPGPFMARDPRVVAVLDAKSFPVLFDMDKVEKKDLFTGTYMPSTSLTGGYRVCSYLDPSEPTHTKVKQLLFSLLLSRKDDVIPTFRSNFSSLLATVEAELAKGGKAEFNKLNDVTSFDFIGEAYFGVRPSATELGKGGPSKAAKWLIWQLHPLVTLGLPMVLEEPLLHTFHLPPFLVKGDYRALYKYFSTVAKQALDTAEGLGLSREEACHNLLFATTFNSYGGLKVLFPGLLANVASGGEKLHERLVAEIRGAVADAGGKVTLAAVERMELAKSVVWESLRLDPPVKFQYGHAKKDLLVESHDAVFQVRKGEMLFGYQPCATKDPRVFGDTARGLRARPLPRRGGQQAAAVRVLVQRP

SEQ ID NO: 35081 - DNA, 2096 bp, Zea mays subsp. mays
aaaaaaacgaaaaagcgcagagagaacgcagaatggaatcgtcgctcttatcatactccatgactccatcactagactagagagagaaacccttgtaccctttgttctgtttatcccccatttctccgagtcacccacccatcgccgaacttcgagtccaaggaagcggagccaccggagaaggggatatttgcctttcccgtcgggggtctagggagcaggagagatgcagcggcggcgggggcacacgtgggcgggggtggggaagacggcccaggcggcgtcggcgcacgccgcgctcttctgcttcactctcctcctcgcgctcagggtcgacggacgacaccacatactcctggtggataatattcattccactatggctctttcatggtattgttgcgcgtggaaggttttcaatgcctgccccttcattacctcatggccgtcattgggcaccatgtcattcgattgttgcagcgcctttactaattgcgttcgagctgcttctctgcatatatcttgaaagcataagagttagaaatcatccatcttttgatctgaagattgtgttccttcctctgttggcctttgaagcaattatccttattgacaattttagaatgtgtagagctttaatgcctggagatgaagaaagcatgagtgatgaagctatttgggagacgcttcctcatttttgggttgcaatttcaatggtgtttcttatagctgctacaacattcacccttctcaagctgtctggtgatgttggtgctttgggctggtgggatttgtttataaattatgggattgcggaatgctttgcatttcttgtctgtacaagatggtttaatcccatgattcataagtcccccactcatggggaggctagctcatcatcagcggcaattaggtaccgtgattgggaaagtggtcttgtcctcccatcactagaagatcacgaacaagagaagctttgtggtctacctgacattgggggccatgtaatgaaaatacctcttgtggctttccaagtattgctttgtatgcggttggagggcacaccaccaagcgctcgctacatcccaatatttgctcttttctcgccactatttattctgcaaggtgctggtgttcttttctctctagcaagattagtggagaaggttgttctgctattgcgtaatggaccagttagtcctaattaccttacagcctcatcaaaagttcgcgattgctttgcttttcttcatcatggttcaaggcttcttggttggtggtctattgatgaagggagcaaggaagaacaagcccggttattttatactgaatctactgggtacaataccttttgtggctatccgccagaggtggttaggaaaatgcctaaaaaggaccttgcagaagaggtttggaggctacaggcagctttgggagaacaatctgaaatcaccaagtgtaccaaacaggaatatgaaaggcttcaaaatgagaaggttctttgtaggatttgttatgagggggagatatgcatggtgctacttccctgccggcacagaactttatgcaaatcttgtgctgagaaatgcaagaagtgtccaatctgccgtgtgccaattgaagagcgcatgcctgtatatgatgtttaaacctcactaactcagcttaacaatacaaatttgtgcatgtgggttctgtcatgctgtgcatttagtctcgatcacaactttaagctgattgaggtttgcacttcagaaagggtctgcaatatatgggggaaatacaagtatatcatgtctaaccaaaagcatggatatgtggttgatgagcattgtcgttttggaccagttatctactgtaagtatgtggtcagtgtatttcccttccctcttgtgattggtagatgagtcagatagtcttgttcgcgtagcagcattttctcagggatatgcagttgttgagaagaaagtgaaacaaaaacagactgtaaataaaaacactgccttgtttgaatctagtccttgtttgagaagaaagtggaacaaaaaaaatgtaaacatctctgttgtattattttgtagtagaaaaatgtctgc

SEQ ID NO: 35082 - protein, 409 aa, Zea mays subsp. mays
MPAPSLPHGRHWAPCHSIVAAPLLIAFELLLCIYLESIRVRNHPSFDLKIVFLPLLAFEAIILIDNFRMCRALMPGDEESMSDEAIWETLPHFWVAISMVFLIAATTFTLLKLSGDVGALGWWDLFINYGIAECFAFLVCTRWFNPMIHKSPTHGEASSSSAAIRYRDWESGLVLPSLEDHEQEKLCGLPDIGGHVMKIPLVAFQVLLCMRLEGTPPSARYIPIFALFSPLFILQGAGVLFSLARLVEKVVLLLRNGPVSPNYLTASSKVRDCFAFLHHGSRLLGWWSIDEGSKEEQARLFYTESTGYNTFCGYPPEVVRKMPKKDLAEEVWRLQAALGEQSEITKCTKQEYERLQNEKVLCRICYEGEICMVLLPCRHRTLCKSCAEKCKKCPICRVPIEERMPVYDV

SEQ ID NO: 35083 - protein, 341 aa, Zea mays subsp. mays
MCRALMPGDEESMSDEAIWETLPHFWVAISMVFLIAATTFTLLKLSGDVGALGWWDLFINYGIAECFAFLVCTRWFNPMIHKSPTHGEASSSSAAIRYRDWESGLVLPSLEDHEQEKLCGLPDIGGHVMKIPLVAFQVLLCMRLEGTPPSARYIPIFALFSPLFILQGAGVLFSLARLVEKVVLLLRNGPVSPNYLTASSKVRDCFAFLHHGSRLLGWWSIDEGSKEEQARLFYTESTGYNTFCGYPPEVVRKMPKKDLAEEVWRLQAALGEQSEITKCTKQEYERLQNEKVLCRICYEGEICMVLLPCRHRTLCKSCAEKCKKCPICRVPIEERMPVYDV

SEQ ID NO: 35084 - protein, 336 aa, Zea mays subsp. mays
MPGDEESMSDEAIWETLPHFWVAISMVFLIAATTFTLLKLSGDVGALGWWDLFINYGIAECFAFLVCTRWFNPMIHKSPTHGEASSSSAAIRYRDWESGLVLPSLEDHEQEKLCGLPDIGGHVMKIPLVAFQVLLCMRLEGTPPSARYIPIFALFSPLFILQGAGVLFSLARLVEKVVLLLRNGPVSPNYLTASSKVRDCFAFLHHGSRLLGWWSIDEGSKEEQARLFYTESTGYNTFCGYPPEVVRKMPKKDLAEEVWRLQAALGEQSEITKCTKQEYERLQNEKVLCRICYEGEICMVLLPCRHRTLCKSCAEKCKKCPICRVPIEERMPVYDV

SEQ ID NO: 35085 - DNA, 1100 bp, Zea mays subsp. mays
caggacacggtcgccacacgacgactcccacgcgcagccaccgcacggccgtgttgccaccaaaccgcgtggcggtgttacgctcttcgcccagatcaaaatcgaatcgatcccccaacccgatcgcctcgtcgtcaaaaaatccccattcgttccccttctcgcctccacgaaccttcacaaattgccctctcagatcttctcctaatctcactcaagccctagccaaatcccagccctagcgacaccaaccagctcgccagcgaccatggggaacccggagaagctgatgaatcagatcttcgacctcaagttcacctccaagtcgctgcagcggcaggcgcgcaagtgcgagaaggaggagaaggagcagaagctcaaggtcaagaaggcgatcgagaagggcaacatggacggcgcccgcatctacgccgagaacgccatccgcaagcgcaccgagcacatgaactacctccgcctcgcctctcgcctcgacgccgtcgtggcccgcctcgacacgcaggccaagatgcaggtcatcggcaagtccatgcagtccatcgtcaagtcgctcgactccgcgctcgccaccgggaacctccagaagatgtccgagaccatggacaatttcgagcgccagttcgtcaacatggaggtccaggccgagttcatggagggcgccatggccggctccacctccctctccacgcccgagaccgaggtcaacagcctcatgcagcaggtcgcggacgactacgggctcgaggtctccgtcggtctgccgcaggcagccgcccacgccatccctgccgccaaggataaggagaaagtcgacgaggatgacctttctcgccgcctcgccgagcttaaggcccgcggctgagagggtgtttcaggctttatcagatgcgattcatgcttatgctgttgagccgcaatgacccattgtgctgtggactgctactcatgtttggtagattcgtaaatactactgttatatgcttgaagccgtgttggcattgccatgtgggtctgtgtgactcgatggaaactttgctgtcttattgtactatcaaatccaataatttgcgcgattgagg

SEQ ID NO: 35086 - protein, 204 aa, Zea mays subsp. mays
MGNPEKLMNQIFDLKFTSKSLQRQARKCEKEEKEQKLKVKKAIEKGNMDGARIYAENAIRKRTEHMNYLRLASRLDAVVARLDTQAKMQVIGKSMQSIVKSLDSALATGNLQKMSETMDNFERQFVNMEVQAEFMEGAMAGSTSLSTPETEVNSLMQQVADDYGLEVSVGLPQAAAHAIPAAKDKEKVDEDDLSRRLAELKARG

SEQ ID NO: 35087 - protein, 197 aa, Zea mays subsp. mays
MNQIFDLKFTSKSLQRQARKCEKEEKEQKLKVKKAIEKGNMDGARIYAENAIRKRTEHMNYLRLASRLDAVVARLDTQAKMQVIGKSMQSIVKSLDSALATGNLQKMSETMDNFERQFVNMEVQAEFMEGAMAGSTSLSTPETEVNSLMQQVADDYGLEVSVGLPQAAAHAIPAAKDKEKVDEDDLSRRLAELKARG

SEQ ID NO: 35088 - protein, 157 aa, Zea mays subsp. mays
MDGARIYAENAIRKRTEHMNYLRLASRLDAVVARLDTQAKMQVIGKSMQSIVKSLDSALATGNLQKMSETMDNFERQFVNMEVQAEFMEGAMAGSTSLSTPETEVNSLMQQVADDYGLEVSVGLPQAAAHAIPAAKDKEKVDEDDLSRRLAELKARG

SEQ ID NO: 35089 - DNA, 1344 bp, Zea mays subsp. mays
  misc_feature (213)..(214): n is a, c, g, or t
  misc_feature (217)..(218): n is a, c, g, or t
  misc_feature (236)..(237): n is a, c, g, or t
  misc_feature (239)..(240): n is a, c, g, or t
  misc_feature (242)..(243): n is a, c, g, or t
  misc_feature (252)..(253): n is a, c, g, or t
  misc_feature (281)..(282): n is a, c, g, or t
  misc_feature (353)..(353): n is a, c, g, or t
  misc_feature (369)..(369): n is a, c, g, or t
  misc_feature (462)..(462): n is a, c, g, or t
  misc_feature (781)..(782): n is a, c, g, or t
  misc_feature (870)..(870): n is a, c, g, or t
  misc_feature (874)..(874): n is a, c, g, or t
agaactagcagttgttccccttttccctccccacgccgaacgcacccgatcgcaaacaaagcgagcagcagaaacatgcgagacatgccggttgtccgccgccaggaacccaccgtcgtcaggacggaggacgacgtggtttccggcggtgaggactcggacggcgagttcgagttcccctccgtgagccgggagtccgcggcgggcgttggnnggnnccgcgtctagccgacganntnntnngcgggcggnnacgcccgggcgttctacccggtgtttgnncgagtgctggacgaggccgcagcgccggcaccgagggcgccactagggcggctgttccagctggagcaggngcggacctcgtccgtngcgtccacgtcctcctcctcctcatcatcatcggcgtcgacggcggcgggcacgggcgcggacctcgacggcgtcggcgcgtcgccggacagntactgcgtctggacgcccgggtcgtcgccggcgtcctcgccctcgcggccgccgcggaagagcgggtccacgggctccatcgcgcggtggcgccgcatcggtgagctcgtcgtcggccgcagccgcagcgacggcaaggacaagttcctcttcctctcggcgccgccgtccccggccagggacagggagcacgcccccgcctccaaggccaaggccaagctgccgcccaaaggaagcaaagccgccgcaaccgagctagacacggtctccgcgggccgccggttgtcatatggcggcggcggcgccaaggcctccaccnncggccggcgcacgttcctgccgtaccggcaggacctcgtggggctgttcgccagcgtgcacgggctcagcaggagcccacacccgttntganccggtgagccacgaccacgacgcgccgtggaggacccgttccaaacagtgagacttcaggtttgaaatcgggatttgaaatttcagacatttgacttggagatctcctgcgagccgagtcaaaaagacaaggtgtgaagtcagagaaagcaggggaaatgtgagccttctttcaggattcggctcggaatcgtgctctgcagtcggtggctaaccacctgccatgcgatttgtgtaggcgggtacacatatactacgacaaattggacaagaagtttacatgtgattgttcgtatatgttggtatatatgtagctgtgtacatactgtacattgtatagtattgcaatttaggtatacaggagtaggtgtttgcgaggaattcagaattcctcgtttgcattctacagtttcgtttatctgcgtgttgtcgcatctctaatgtctaatctaactaattgcttttctgcct

SEQ ID NO: 35090 - protein, 75 aa, Zea mays subsp. mays
  misc_feature (71)..(73): Xaa can be any naturally occurring amino acid
RTSSCSPFPSPRRTHPIANKASSRNMRDMPVVRRQEPTVVRTEDDVVSGGEDSDGEFEFPSVSRESAAGVXXXRV

SEQ ID NO: 35091 - protein, 61 aa, Zea mays subsp. mays
ELAVVPLFPPHAERTRSQTKRAAETCETCRLSAARNPPSSGRRTTWFPAVRTRTASSSSPP

SEQ ID NO: 35092 - protein, 57 aa, Zea mays subsp. mays
  misc_feature (10)..(11): Xaa can be any naturally occurring amino acid
  misc_feature (40)..(41): Xaa can be any naturally occurring amino acid
MAAAAPRPPXXAGARSCRTGRTSWGCSPACTGSAGAHTRXXPVSHDHDAPWRTRSKQ

SEQ ID NO: 35093 - protein, 50 aa, Zea mays subsp. mays
  misc_feature (46)..(48): Xaa can be any naturally occurring amino acid
MRDMPVVRRQEPTVVRTEDDVVSGGEDSDGEFEFPSVSRESAAGVXXXRV

SEQ ID NO: 35094 - DNA, 1642 bp, Zea mays subsp. mays
agacaccagacgcagtcggctgccgcagggctggtagtagccggcgcgccgtcaccgtatcctcagatcagcggcgagcagaaaccacaccactctactgacgcccgacgagccatgggtaaggagaagactcacatcaacattgtggtcattggccatgtcgactctggcaagtcgaccaccactggccacctgatctacaagcttggaggtattgacaagcgagtgattgagaggttcgagaaagaggctgccgagatgaacaagcggtcattcaagtatgcgtgggtgcttgacaagctcaaggctgagcgtgagagaggtattacaattgatattgccctgtggaagttcgagaccaccaagtactactgcactgttattgatgccccgggacaccgtgacttcatcaagaatatgatcactggcacttcccaagctgactgtgctgttcttatcattgactcaaccactggtggttttgaggctggtatctccaaggatggccagacccgtgagcatgctctccttgctttcacacttggtgtgaagcagatgatttgctgctgcaacaagatggatgctactacacccaagtattcaaaggcccgttatgatgagattgtgaaggaagtctcttcctacctgaagaaggttggatacaaccctgataagatccacttcgttccaatctctggttttgaaggtgacaacatgattgagaggtccaccaaccttgactggtacaagggcccaaccctacttgaggctctggacttgatcaatgagccaaagaggccttcagacaagcccctgcgtctcccccttcaggatgtgtacaagattggtggtattggaactgtccctgttggacgtgttgagactggtgtcattaagcctggtatggttgttacttttgggcctactggtcttactactgaggttaagtccgttgagatgcaccatgaggctctccaggaggcccttcccggtgacaatgttggcttcaacgtgaagaatgttgctgtgaaggatctgaagcgtgggtatgtggcctccaactccaaggatgaccctgccaaggaggctgctagcttcacctcccaggtcatcatcatgaaccaccctggccagattggcaatggctatgccccagttctggactgccacacctcacacattgctgtcaagtttgctgagctcgttaccaagattgataggcgatccggcaaggagctggagaaggagcccaaatttctcaagaacggtgatgctggtatggtgaagatggttcccactaagcccatggtggtggagaccttttctcagtatcctcctcttggtcgatttgctgtccgtgacatgaggcaaacggtggctgtcggagtcatcaagagtgtggagaagaaggacccaactggagccaaggtgacgaaggctgctgccaagaagaaatgatctatctggctggtgctgtgcttgcttgttggttacctcgtggaagcttaaaatatctcgtcttgttgacatccttgcagttgtcgcgtgaacaagtaatctatgatggcaatgtttgcctggtcatgaagtattattactttcgttgaaaccgtgatgctattaagacttaatttttttatgg

SEQ ID NO: 35095 - protein, 485 aa, Zea mays subsp. mays
RHQTQSAAAGLVVAGAPSPYPQISGEQKPHHSTDARRAMGKEKTHINIVVIGHVDSGKSTTTGHLIYKLGGIDKRVIERFEKEAAEMNKRSFKYAWVLDKLKAERERGITIDIALWKFETTKYYCTVIDAPGHRDFIKNMITGTSQADCAVLIIDSTTGGFEAGISKDGQTREHALLAFTLGVKQMICCCNKMDATTPKYSKARYDEIVKEVSSYLKKVGYNPDKIHFVPISGFEGDNMIERSTNLDWYKGPTLLEALDLINEPKRPSDKPLRLPLQDVYKIGGIGTVPVGRVETGVIKPGMVVTFGPTGLTTEVKSVEMHHEALQEALPGDNVGFNVKNVAVKDLKRGYVASNSKDDPAKEAASFTSQVIIMNHPGQIGNGYAPVLDCHTSHIAVKFAELVTKIDRRSGKELEKEPKFLKNGDAGMVKMVPTKPMVVETFSQYPPLGRFAVRDMRQTVAVGVIKSVEKKDPTGAKVTKAAAKKK

SEQ ID NO: 35096 - protein, 447 aa, Zea mays subsp. mays
MGKEKTHINIVVIGHVDSGKSTTTGHLIYKLGGIDKRVIERFEKEAAEMNKRSFKYAWVLDKLKAERERGITIDIALWKFETTKYYCTVIDAPGHRDFIKNMITGTSQADCAVLIIDSTTGGFEAGISKDGQTREHALLAFTLGVKQMICCCNKMDATTPKYSKARYDEIVKEVSSYLKKVGYNPDKIHFVPISGFEGDNMIERSTNLDWYKGPTLLEALDLINEPKRPSDKPLRLPLQDVYKIGGIGTVPVGRVETGVIKPGMVVTFGPTGLTTEVKSVEMHHEALQEALPGDNVGFNVKNVAVKDLKRGYVASNSKDDPAKEAASFTSQVIIMNHPGQIGNGYAPVLDCHTSHIAVKFAELVTKIDRRSGKELEKEPKFLKNGDAGMVKMVPTKPMVVETFSQYPPLGRFAVRDMRQTVAVGVIKSVEKKDPTGAKVTKAAAKKK

SEQ ID NO: 35097 - protein, 399 aa, Zea mays subsp. mays
MNKRSFKYAWVLDKLKAERERGITIDIALWKFETTKYYCTVIDAPGHRDFIKNMITGTSQADCAVLIIDSTTGGFEAGISKDGQTREHALLAFTLGVKQMICCCNKMDATTPKYSKARYDEIVKEVSSYLKKVGYNPDKIHFVPISGFEGDNMIERSTNLDWYKGPTLLEALDLINEPKRPSDKPLRLPLQDVYKIGGIGTVPVGRVETGVIKPGMVVTFGPTGLTTEVKSVEMHHEALQEALPGDNVGFNVKNVAVKDLKRGYVASNSKDDPAKEAASFTSQVIIMNHPGQIGNGYAPVLDCHTSHIAVKFAELVTKIDRRSGKELEKEPKFLKNGDAGMVKMVPTKPMVVETFSQYPPLGRFAVRDMRQTVAVGVIKSVEKKDPTGAKVTKAAAKKK

SEQ ID NO: 35098 - DNA, 1151 bp, Zea mays subsp. mays
aatttcaaacttctcgactcgcccctccccgtccggccgtcccacccacgcttcctccccctccgcgccgctcctacaggctctaaccatggcggtcgccaccgagtcgcgcggcagcgaggacagggcttcagcccatgcgaaccaggagaagcggtgggtgctgtctgatttcgaggttgggaaacctcttgggaggggcaagtttggccatgtttatcttgccagagaaaaaaggagtagtgagattgtggctttgaaagttcttttcaagagccagctcaagcaatcacaggttgagcatcagctgcgacgcgaagtggagattcagagtcatcttcgccatcctaatattcttcgcctgtatgggtacttctatgatcagaccagggtttacctaatcctggaatacgctgccaagggtgaactgtataaggaactgacaaggtgtaaacatttttcagagcgacgcacagcgacttatgtcgcatcgttggctagagctttgatctaccttcatggcaagcatgttatccatcgggacattaaaccagagaatcttttagttggagttcagggcgagatcaaaattgccgactttggctggtccgtgcacaccttcaacagaagacggactatgtgcggaactctggattacctgccacctgaaatggtggagaaggcagaacatgattaccatgttgatatatggagccttggtgttctgtgctatgagttcctttacggggtcccacctttcgaagctaaggagcactcagaaacctacagaaggatagtgaaagtcgacttgaagttcccactgaaaccattcgtttcacctgccgcaaaggacttgatttctcagatgctggtcaagagctcggcgcagcggctgcctctccacaaggttcttgagcacccgtggatcgtccagaacgccgacccttccggcgtgtacagagaaggtagatccgtctaagcttctgttgcagtgtcgcccgccccaccccaaactgtatggattagcgaccctgttgaacaatcttcttacctgtctctctctatatatgaatatgaatgtacatgttctaagcctctctggctctctgaagatttttgtaatattcaatatgacagcccatatgagcctc

SEQ ID NO: 35099 - protein, 325 aa, Zea mays subsp. mays
ISNFSTRPSPSGRPTHASSPSAPLLQALTMAVATESRGSEDRASAHANQEKRWVLSDFEVGKPLGRGKFGHVYLAREKRSSEIVALKVLFKSQLKQSQVEHQLRREVEIQSHLRHPNILRLYGYFYDQTRVYLILEYAAKGELYKELTRCKHFSERRTATYVASLARALIYLHGKHVIHRDIKPENLLVGVQGEIKIADFGWSVHTFNRRRTMCGTLDYLPPEMVEKAEHDYHVDIWSLGVLCYEFLYGVPPFEAKEHSETYRRIVKVDLKFPLKPFVSPAAKDLISQMLVKSSAQRLPLHKVLEHPWIVQNADPSGVYREGRSV

SEQ ID NO: 35100 - protein, 296 aa, Zea mays subsp. mays
MAVATESRGSEDRASAHANQEKRWVLSDFEVGKPLGRGKFGHVYLAREKRSSEIVALKVLFKSQLKQSQVEHQLRREVEIQSHLRHPNILRLYGYFYDQTRVYLILEYAAKGELYKELTRCKHFSERRTATYVASLARALIYLHGKHVIHRDIKPENLLVGVQGEIKIADFGWSVHTFNRRRTMCGTLDYLPPEMVEKAEHDYHVDIWSLGVLCYEFLYGVPPFEAKEHSETYRRIVKVDLKFPLKPFVSPAAKDLISQMLVKSSAQRLPLHKVLEHPWIVQNADPSGVYREGRSV

SEQ ID NO: 35101 - DNA, 1351 bp, Zea mays subsp. mays
attcgaaaaagcaaaaatgatatgcacgtcacaatagttgttccccagatttgttttgtcacgcgccccgcccgacgcccgccacggcgccaccatgtcgcaggctacggaggtcgtcggaaacccgtacgccgccgagctcgctgcagccaagaaggccgtcgccctagcggcccgcctctgccagagagtgcagcggagcattttgcactctgacattcaatcgaaggcagacaagactcctgttacagttgcggattatggatcacaggtactggtatgtctggtcctgaagaaggaattgccttctcactctttctcaatcatagctgaagaggattcaaaagacttgagagaagatggtgcccaagaaattatagaacacattaccaccctcattaatgaaaccatcgtaaatgatggttcatacaacatgtcgttatctaaggaagatgtgctttctgcaattgatggtggtaaatctgagggaggtccatctgggcgacattggatattagacccaatagatggcactaaaggtttcataaggggagatcagtatgcagttgcacttggactacttgatgagggcaaagttgttctgggtgtgttgggatgtccaaatcttccattaaaatcaacaaacaagaacaatagcagctcttttggggatcgaataggttccctcttttttgctacaattggttgtggagcgcaagttgaggccttagaaggatctgagccacaaaagattagtgtttgctccaccaataatccagttgacgcctcattctttgaatcctttgaagcatcacactccaagcgtgatttaactagctccattgcagagaaacttggtgtccgagctcctcctgttagaatggatagccaagcaaaatatggtgccctagcacgtggtgatggtgccatttttctgcgcatcccgcacaaaagttacatagaaacagtttgggatcatgcagctggatcaattattgtcacagaagctggtggcatggtaaaagatgccgcaggaaacgatttggatttttgcaaaggtagatatcttgatcgtgacagaggaattattgcaacaaacaagcatttaatgccactagttctaaaggcggttcaagaggctatgaaggaggaacagtaggctgctgtgttcatggagcagttgcaatatttgttatgacatttcctgtttgaatcttaatattagttttgcacaatctcgatgtgcggaaaagttgttgtacttgtaccatatgctagtgtatcgtgtgagtcatatgccactcacatactcacatttccttatctcaacaaatggatatgaatttacctg

SEQ ID NO: 35102 - protein, 354 aa, Zea mays subsp. mays
MSQATEVVGNPYAAELAAAKKAVALAARLCQRVQRSILHSDIQSKADKTPVTVADYGSQVLVCLVLKKELPSHSFSIIAEEDSKDLREDGAQEIIEHITTLINETIVNDGSYNMSLSKEDVLSAIDGGKSEGGPSGRHWILDPIDGTKGFIRGDQYAVALGLLDEGKVVLGVLGCPNLPLKSTNKNNSSSFGDRIGSLFFATIGCGAQVEALEGSEPQKISVCSTNNPVDASFFESFEASHSKRDLTSSIAEKLGVRAPPVRMDSQAKYGALARGDGAIFLRIPHKSYIETVWDHAAGSIIVTEAGGMVKDAAGNDLDFCKGRYLDRDRGIIATNKHLMPLVLKAVQEAMKEEQ

SEQ ID NO: 35103 - protein, 241 aa, Zea mays subsp. mays
MSLSKEDVLSAIDGGKSEGGPSGRHWILDPIDGTKGFIRGDQYAVALGLLDEGKVVLGVLGCPNLPLKSTNKNNSSSFGDRIGSLFFATIGCGAQVEALEGSEPQKISVCSTNNPVDASFFESFEASHSKRDLTSSIAEKLGVRAPPVRMDSQAKYGALARGDGAIFLRIPHKSYIETVWDHAAGSIIVTEAGGMVKDAAGNDLDFCKGRYLDRDRGIIATNKHLMPLVLKAVQEAMKEEQ

SEQ ID NO: 35104 - DNA, 1429 bp, Zea mays subsp. mays
actgaaggtccagtgtgtgtgcgctggtggcgttcggcgccgtatctcgttcgtgtcttccaactttgtgttcttagcgttcttcagagtgtgagagcacttgagagttccaacaattagtaccagagccagttaatgcctaagatcttgcgctactacctcgagtccgagtccatggcgatggttctgcacggcgctggggggagttcggtctccatgtcatacccgatgctgtcaccggcgagctacacggcatgggcgatcaaggtggagtcgatcctcgacgcgcaaggtctctgggaggccgtgtctccaccagatgatggcgaggtgaacgcggtgaagaacaagacggcgcgggcacagcttctccaagctctacccgatgacatcttgatgcaggtctccaccaagaaaacggcagcggaggtgtgggcgagcctcaagactcgcttcgtcggggcggatcgggtcaagacggcacgcctcgccacgctcaaaggggagttcgacaagctgtacatggaggacggggaggcattggacgactacgtcggcaaaatcagcggtatggcggcgcgttacgccgggctttgcgcgacgctcgacgacgctgccatggtgaaaaagctcctcgacaccgtcccaaatcagctcttccccgccatcgcgggcatcgagtagttctgtgacgttgagacgatggtgttcgaggaggcgctcggcagactgaaggcgttcgacgagcgttcccggcggcgcactcgtgctggcgccgaacggcgcgacgaccagctccttctcacggaggccgagttgaaggctcgacaaaagaaaaagtcgtcgatcgggaagtgtttcaactgtggcaaccgtggccacttcacacgggactgccccaagacgaagaaggaggaggcactattcgccaacgccacgaggaggcgacgctgttgtgagcagcggcgccgggtttaaggggagattgttagaaataaacccgtcgcttacatggtcacgttcgtgcgtgatcgtgccatgagttgagtccggtcgctgtatgtgtgtgcatgcgttgtggttgatcaagtcttgcttggcgtgtgcgtcacgttgagttagttagtagggagtggttatccgttagcaagtgactggttggacgtggtcgcgtacgggcacgagctgcacgcatggccgagtcatgcggatcatggcgagatgggtgggatggagttcgtggctccatgtgtccggcctataaactctgatcaaatacacgacaaggaacagaaggtccagtgtgtgtgcgctggtggcgtttggcgccgtatctcgttcgtgtcttccaactttgtgttcttagcattcttcagagtgtgagagcacttgagagttccaatagagaacgtacgggggcagagcgagc

SEQ ID NO: 35105 - protein, 182 aa, Zea mays subsp. mays
MPKILRYYLESESMAMVLHGAGGSSVSMSYPMLSPASYTAWAIKVESILDAQGLWEAVSPPDDGEVNAVKNKTARAQLLQALPDDILMQVSTKKTAAEVWASLKTRFVGADRVKTARLATLKGEFDKLYMEDGEALDDYVGKISGMAARYAGLCATLDDAAMVKKLLDTVPNQLFPAIAGIE

SEQ ID NO: 35106 - protein, 169 aa, Zea mays subsp. mays
MAMVLHGAGGSSVSMSYPMLSPASYTAWAIKVESILDAQGLWEAVSPPDDGEVNAVKNKTARAQLLQALPDDILMQVSTKKTAAEVWASLKTRFVGADRVKTARLATLKGEFDKLYMEDGEALDDYVGKISGMAARYAGLCATLDDAAMVKKLLDTVPNQLFPAIAGIE

SEQ ID NO: 35107 - protein, 167 aa, Zea mays subsp. mays
MVLHGAGGSSVSMSYPMLSPASYTAWAIKVESILDAQGLWEAVSPPDDGEVNAVKNKTARAQLLQALPDDILMQVSTKKTAAEVWASLKTRFVGADRVKTARLATLKGEFDKLYMEDGEALDDYVGKISGMAARYAGLCATLDDAAMVKKLLDTVPNQLFPAIAGIE

SEQ ID NO: 35108 - DNA, 1504 bp, Zea mays subsp. mays
  misc_feature (70)..(70): n is a, c, g, or t
atccgcctctggtttttcagagcagcagtccaggcgcggaattgaattccggtaggatttgagagcggancggagcggagaggagaggagaagaaggcggtaggcggggaagatggagatgccggcagggagcggggccccagcgctggcgcggcagggctcggtctactcgctcacgttcgacgagttccagaccacgctcggcggcgccagcaaggacttcggctccatgaacatggacgagctgctgcgcaacatctggacagccgaggagtctaacgccatggctgcggccgccccggccacggccacggccacggcggccgcatccgtggacgcgcacgcgcagcagcagcagcagcagcagcacggggcgcccatccagcgccagggctccttcacgctgccccgcacactcagccagaagacggtcgacgaggtctggcgcgagatcgtgagcctcaccagcggcgaggacgcgcagcaggttgcggctcccgctcccgctcccgcgcccgagcccgagcccgcgcccgcgcccgcgccgctgccggcgcaggcgcaggcgcagcagacgctggggtccatgactctggaggagttcctggtacgcgccggcgtggttcgtgaggacatgggggggcaccagaccctcctgctgcagccgcacgcgcaggggcttttctcccaggggaatgcggtcgcgccgcagaccctgcagctgggaaacgggatggtggccggggtcgtcgggcagggcctcggaggaggggtgacggtggcggctccgacgacgccggtcgtgttcaacgggttgggaaaggtggaggcgggtgatctgtcgtcgctgtcgccggtgccgtatccgttcgacactgcgctgaggatgcggaagggacccaccgtcgagaaggtggtggagaggaggcagcgccgcatgatcaagaacagggagtcggccgccaggtcgcgtgcgaggaagcaggcgtacataatggagctggaagctgaggtggcaaaactcaaggaccagaatgaggagttgcagaaaaagcaggttgaaatgctaaagaagcaaaaggatgaggtcctggagcgaatcaacagccaacatggaccaaaggcaaagaagctttgcctgcgccgcaccctgactggcccatggtagcctgctgaagcttgcacaaaattgaccgaagtcaagatcgtcgggccagatgtgcccgtgtgtatatatcagatgaagtcaagagtactgagtaccccgttacccctgtagaccgccgctacttcagagctgccgttcttgttctgtgacgtgggtagtctgcgcctgacagttcgctgtttaggttcggttgcgcgatcctcacatgaacaatgaggcgtgccatctaatttgtttattaactcactcctatctatggtgagattaatgcaagtaacctggagtatgtttggttgaaaaaaaaaaaaaaaaaaaaaaaaaaaaaaaaaataaaaa

SEQ ID NO: 35109 - protein, 351 aa, Zea mays subsp. mays
MEMPAGSGAPALARQGSVYSLTFDEFQTTLGGASKDFGSMNMDELLRNIWTAEESNAMAAAAPATATATAAASVDAHAQQQQQQQHGAPIQRQGSFTLPRTLSQKTVDEVWREIVSLTSGEDAQQVAAPAPAPAPEPEPAPAPAPLPAQAQAQQTLGSMTLEEFLVRAGVVREDMGGHQTLLLQPHAQGLFSQGNAVAPQTLQLGNGMVAGVVGQGLGGGVTVAAPTTPVVFNGLGKVEAGDLSSLSPVPYPFDTALRMRKGPTVEKVVERRQRRMIKNRESAARSRARKQAYIMELEAEVAKLKDQNEELQKKQVEMLKKQKDEVLERINSQHGPKAKKLCLRRTLTGPW

SEQ ID NO: 35110 - protein, 349 aa, Zea mays subsp. mays
MPAGSGAPALARQGSVYSLTFDEFQTTLGGASKDFGSMNMDELLRNIWTAEESNAMAAAAPATATATAAASVDAHAQQQQQQQHGAPIQRQGSFTLPRTLSQKTVDEVWREIVSLTSGEDAQQVAAPAPAPAPEPEPAPAPAPLPAQAQAQQTLGSMTLEEFLVRAGVVREDMGGHQTLLLQPHAQGLFSQGNAVAPQTLQLGNGMVAGVVGQGLGGGVTVAAPTTPVVFNGLGKVEAGDLSSLSPVPYPFDTALRMRKGPTVEKVVERRQRRMIKNRESAARSRARKQAYIMELEAEVAKLKDQNEELQKKQVEMLKKQKDEVLERINSQHGPKAKKLCLRRTLTGPW

SEQ ID NO: 35111 - protein, 312 aa, Zea mays subsp. mays
MNMDELLRNIWTAEESNAMAAAAPATATATAAASVDAHAQQQQQQQHGAPIQRQGSFTLPRTLSQKTVDEVWREIVSLTSGEDAQQVAAPAPAPAPEPEPAPAPAPLPAQAQAQQTLGSMTLEEFLVRAGVVREDMGGHQTLLLQPHAQGLFSQGNAVAPQTLQLGNGMVAGVVGQGLGGGVTVAAPTTPVVFNGLGKVEAGDLSSLSPVPYPFDTALRMRKGPTVEKVVERRQRRMIKNRESAARSRARKQAYIMELEAEVAKLKDQNEELQKKQVEMLKKQKDEVLERINSQHGPKAKKLCLRRTLTGPW

SEQ ID NO: 35112 - DNA, 1522 bp, Zea mays subsp. mays
acataggtgccggactcgtcccagcgaagaaccggacgagcgagcaagaggcctcctcctcaagcttcgaatcctccccttccgcgctttccctccccctcctcctcctcccctttccagtccccaccccagcgaagcttccaaagccgccccaaccccaacggccgcccggcctgatcgagcatacagctgccgcggccctccccgccccgcacgcgacctcggagccatggagaagtacgagctgctgaaggacatcggcgccggcaacttcggcgtggcgcggctcatgcggaacaaggagaccaaggaggctggtcgccatgaagtacatcccccggggccaaaagatcgacgagaatgtggcgagggagatcatcaaccaccgctcgctgcgccaccccaacatcatccggttcaaggaggtggtgctgacgccgacgcacctggcgatcgtgatggagtacgccgccggcggcgagctgttcgaccggatctgcaacgccgggaggttcagcgaggacgaggcgaggtacttcttccagcagctgatttgtggcgtcagctactgccactccatgcaaatctgccaccgagacttgaagctggagaacacgctgctggacggcagcccggcgcctcgcctcaagatctgcgacttcggttactccaagtcgtcgctgctgcactcgaagcccaagtcgacggtcggcacgccggcgtacatcgcccccgaggtgctctcccgccgggaatacgacggcaagacagccgatgtgtggtcctgtggagtcactctttatgtgatgctggtcggtggttacccttttgaggacccagacgacccaaagaatttcagaaagacgatcgggaggatcatgtcaatccaatacaaaataccagagtatgtgcacgtgtcgcaagactgcaaggagctgctttcaaggatctttgttgcaaactctgcaaagagaataacgatcagggagatcaggaaccacccctggttcctgaagaacctgcccagagagctcacggaggctgcgcaggccatgtactacaagaaagacaacagcgccccgacctactccgtccagtccgtggaggagatcatgaagatcgtggagaaggcgcggacgccgcctccttcctccacccctgtggctggcttcggttgggcggaggaggacgagcaggaggacagcaaggaaccagacgaggaacacgaggacggcgaggacgagtacgagaagcaggtgaagcaagtccacgccagcggggagtttcatctcagctgctgatggttttcgccggcctgctagtctgtggtaccagccgatgatggacctgctagtctgtggtcttgtttccaagttttctttcattttttctttcttttgctgtggtgccgcaagactgcaacagttgtaaattattgaagggggttccagcgttgcccttgtattgactgattcaaactagcatggggaacatgattatggaataaaacaggtcgttgagc

SEQ ID NO: 35113 - protein, 325 aa, Zea mays subsp. mays
MKYIPRGQKIDENVAREIINHRSLRHPNIIRFKEVVLTPTHLAIVMEYAAGGELFDRICNAGRFSEDEARYFFQQLICGVSYCHSMQICHRDLKLENTLLDGSPAPRLKICDFGYSKSSLLHSKPKSTVGTPAYIAPEVLSRREYDGKTADVWSCGVTLYVMLVGGYPFEDPDDPKNFRKTIGRIMSIQYKIPEYVHVSQDCKELLSRIFVANSAKRITIREIRNHPWFLKNLPRELTEAAQAMYYKKDNSAPTYSVQSVEEIMKIVEKARTPPPSSTPVAGFGWAEEDEQEDSKEPDEEHEDGEDEYEKQVKQVHASGEFHLSC

SEQ ID NO: 35114 - protein, 280 aa, Zea mays subsp. mays
MEYAAGGELFDRICNAGRFSEDEARYFFQQLICGVSYCHSMQICHRDLKLENTLLDGSPAPRLKICDFGYSKSSLLHSKPKSTVGTPAYIAPEVLSRREYDGKTADVWSCGVTLYVMLVGGYPFEDPDDPKNFRKTIGRIMSIQYKIPEYVHVSQDCKELLSRIFVANSAKRITIREIRNHPWFLKNLPRELTEAAQAMYYKKDNSAPTYSVQSVEEIMKIVEKARTPPPSSTPVAGFGWAEEDEQEDSKEPDEEHEDGEDEYEKQVKQVHASGEFHLSC

SEQ ID NO: 35115 - protein, 276 aa, Zea mays subsp. mays
HRCRTRPSEEPDERARGLLLKLRILPFRAFPPPPPPPLSSPHPSEASKAAPTPTAARPDRAYSCRGPPRPARDLGAMEKYELLKDIGAGNFGVARLMRNKETKEAGRHEVHPPGPKDRRECGEGDHQPPLAAPPQHHPVQGGGADADAPGDRDGVRRRRRAVRPDLQRREVQRGRGEVLLPAADLWRQLLPLHANLPPRLEAGEHAAGRQPGASPQDLRLRLLQVVAAALEAQVDGRHAGVHRPRGALPPGIRRQDSRCVVLWSHSLCDAGRWLPF

SEQ ID NO: 35116 - DNA, 1603 bp, Zea mays subsp. mays
acaggtcgcaacaaccccaacgagcaaaccccccatttgccaccaaccccgacgaccggcgatgaccggcacggtgtctaagctggcggcgccccgtccggcggcaccgccgctccggccggcgtccctccgcaccgccgccctcgccttcgccccctccgcgcgccgggtccgcgtctccgtcgccgggcgagccaggagccccatcattgcgatggcttcggccaaggaaggaaatggtgcaccgaccaagaggactgcgcttcatgatctctacgagctccagggcctgtccccgtggtacgacaacctatgccgccctgtcacagacttgctgcccattatcgccagcggcgtccgtggagtcaccagcaacccaacgattttccaaaaggccatttcatcgtccagcgcatatgatgatcagttcaagcagctcatttcggctggaaaggacgcggagagcgcttactgggaactcgttataaaggatatccaagatgcgtgcaaactttttgagcccatctacgatgagactgatggggctgatgggtatgtctccgtagaggtgtctcctaggttggcaaatgacactcaaggaactgttgaagcggcaaagtggttacacaaagtggtcaaccgccccaatgtctacataaagatcccagctactgcagaatgtgttccttccatccaggaagttatcgctaatggcattagcgtcaacgtcacgcttattttctcaattgcaagatatgaggctgtgattgatgcttacctcgatgggctagaggcttctggcttgagtgacttatcccgagttactagcgttgcatccttctttgtcagccgagtggacacccttattgacaaaatgcttgacaagattggaacacctgaggcccttgccttgagaggaaaggctgcagtagcacaggccaaactagcaaatcggctctaccagaagaaattctctggcccaaggtgggaggcgttggccaagaaaggtgccaagaaacaaaggttgttgtgggcatccaccggtgtcaagaacccagcttatcctgacactctttatgtggacagtctcatcggacctgacacggtcaacacgatgcccgaccaagctttgcaagcattcatagaccacggcaccgtttcaaggacagttgatgcgaacgtgtctgaggcggaaggtgtatacagtgccttggagaagcttggcatcgactgggaagaggttggaaagcagcttgagctggaaggcgtggactccttcaagaagagctttgacagcctactcgtgagcctgcaggagaagggcaacagcctcaagatggcgagtgtgtaaagctgagaagattgggtacctgcgagtgaacgattttactaaataaaatgctagcttgctggctctcctcttagtttttacgctgtacctttgctctcaattttctgagtcggctttgtatcccaggcttgccagaacgtcattgtgtagccactgttcatggcttgtaattgctacggggtatccgataacgtcattgtggatgaggcctgtttgccctgactcttgaactcaatgtcgccatggtttgct

SEQ ID NO: 35117 - protein, 449 aa, Zea mays subsp. mays
QVATTPTSKPPICHQPRRPAMTGTVSKLAAPRPAAPPLRPASLRTAALAFAPSARRVRVSVAGRARSPIIAMASAKEGNGAPTKRTALHDLYELQGLSPWYDNLCRPVTDLLPIIASGVRGVTSNPTIFQKAISSSSAYDDQFKQLISAGKDAESAYWELVIKDIQDACKLFEPIYDETDGADGYVSVEVSPRLANDTQGTVEAAKWLHKVVNRPNVYIKIPATAECVPSIQEVIANGISVNVTLIFSIARYEAVIDAYLDGLEASGLSDLSRVTSVASFFVSRVDTLIDKMLDKIGTPEALALRGKAAVAQAKLANRLYQKKFSGPRWEALAKKGAKKQRLLWASTGVKNPAYPDTLYVDSLIGPDTVNTMPDQALQAFIDHGTVSRTVDANVSEAEGVYSALEKLGIDWEEVGKQLELEGVDSFKKSFDSLLVSLQEKGNSLKMASV

SEQ ID NO: 35118 - protein, 429 aa, Zea mays subsp. mays
MTGTVSKLAAPRPAAPPLRPASLRTAALAFAPSARRVRVSVAGRARSPIIAMASAKEGNGAPTKRTALHDLYELQGLSPWYDNLCRPVTDLLPIIASGVRGVTSNPTIFQKAISSSSAYDDQFKQLISAGKDAESAYWELVIKDIQDACKLFEPIYDETDGADGYVSVEVSPRLANDTQGTVEAAKWLHKVVNRPNVYIKIPATAECVPSIQEVIANGISVNVTLIFSIARYEAVIDAYLDGLEASGLSDLSRVTSVASFFVSRVDTLIDKMLDKIGTPEALALRGKAAVAQAKLANRLYQKKFSGPRWEALAKKGAKKQRLLWASTGVKNPAYPDTLYVDSLIGPDTVNTMPDQALQAFIDHGTVSRTVDANVSEAEGVYSALEKLGIDWEEVGKQLELEGVDSFKKSFDSLLVSLQEKGNSLKMASV

SEQ ID NO: 35119 - protein, 378 aa, Zea mays subsp. mays
MASAKEGNGAPTKRTALHDLYELQGLSPWYDNLCRPVTDLLPIIASGVRGVTSNPTIFQKAISSSSAYDDQFKQLISAGKDAESAYWELVIKDIQDACKLFEPIYDETDGADGYVSVEVSPRLANDTQGTVEAAKWLHKVVNRPNVYIKIPATAECVPSIQEVIANGISVNVTLIFSIARYEAVIDAYLDGLEASGLSDLSRVTSVASFFVSRVDTLIDKMLDKIGTPEALALRGKAAVAQAKLANRLYQKKFSGPRWEALAKKGAKKQRLLWASTGVKNPAYPDTLYVDSLIGPDTVNTMPDQALQAFIDHGTVSRTVDANVSEAEGVYSALEKLGIDWEEVGKQLELEGVDSFKKSFDSLLVSLQEKGNSLKMASV

SEQ ID NO: 35120 - DNA, 1777 bp, Zea mays subsp. mays
aaccagcaattcccatatcgcccctccaccaaaacgggagctcagcggcggcggccgcaacccctcccctgaaccctacccccttctacccggccaccaccccacaacatggccctctcccgccgcctcctcccgctcttcctccgccgcggcgcccccatccccgcccgcgctctctccacggctgtcgcacctgcggcggtggcctcggaggaggacgaggcggccgtcaccgtcaagggcgtgcgcatctcgggccgcccgctctacatggacatgcaggcgacgacccccgtcgacccgcgtgtcctcgacgccatgcttcccttctacctctctcgctacgggaaccctcactcccgtacccacctctacggctgggagtccgacgccgccgtagaggacgctcgcgcccgcgtcgcctccctcgtcggcgccgacccgcgcgagatcttcttcacctcgggcgccaccgagtgcaacaacatcgccgtcaagggcgtcatgcgcttctaccgcgagcgccgccgccacgtcatcacgacgcagaccgagcacaagtgcgtgctggactcctgcaggtatctgcaacaggagggattcgagatcacctatctcccagtgcgcaaggacgggctcgtcgacctcgcgcagctcgaggacgccatccgcccggacaccgggctggtgtctatcatggccgtcaacaacgagatcggcgtcgtccagccgctcgaggagattgggcgcatctgcaaggagaaaggcgtgccgttccacactgatgctgcacaggcgctggggaagatcccgattgatgtgaaccggatggggattgggctcatgtccctgtcaggccacaagatttatggccccaagggcgtgggggccctataccttcgtcgccgccctcgcatcagggtggaaccacagatgaatggtggtgggcaggagcgtggcatccgcagtggaactgttcctacacctcttgttgttggatttggggctgcctgtgagattgccgctcaagagatggattatgaccacaggcgtgtcagtgctctgcagcagaggctgcttgatggcatacgtgcgcaggttgatgatgttgtcatcaatggaagtatggagcaccgttacccaggcaatctaaatttgtcatttgcttatgtggaaggggagagcttactgatgggtctgaaggaggtggctgtgtcaagtggtagtgcctgcactagtgccagcttggagccctcatatgtgctgcgggcacttggggtggaggaggatatggcacacacttctattcgtttcggcatgggtcgctttaccactgacgaagaggtggacagagcaattgagcttactgtgcatcaggtgaagaagctccgtgacatgagcccactctatgagatggccaaggctggcattgacctcaagagcatcgagtggtcacaacattgaggcagttttcatgacaaacggtcactcgaaagcgtacacggattgcatacatagggttatggtgctgctggtgagtacgttcatgtggtgctcctacctctgataggattatcacacttttttagctctcacatggggcccgagtgtattcacgagtgctttctaagttgaatatcttgacctcaaaataaggatacttcaaatacttggtaatgtatcgtctgaaatacagtttgaagtagtattgaagcggtgacaatgatgataacctattttagtgctgacaaaaatgttgttataatctccggttgtt

SEQ ID NO: 35121 - protein, 451 aa, Zea mays subsp. mays
MALSRRLLPLFLRRGAPIPARALSTAVAPAAVASEEDEAAVTVKGVRISGRPLYMDMQATTPVDPRVLDAMLPFYLSRYGNPHSRTHLYGWESDAAVEDARARVASLVGADPREIFFTSGATECNNIAVKGVMRFYRERRRHVITTQTEHKCVLDSCRYLQQEGFEITYLPVRKDGLVDLAQLEDAIRPDTGLVSIMAVNNEIGVVQPLEEIGRICKEKGVPFHTDAAQALGKIPIDVNRMGIGLMSLSGHKIYGPKGVGALYLRRRPRIRVEPQMNGGGQERGIRSGTVPTPLVVGFGAACEIAAQEMDYDHRRVSALQQRLLDGIRAQVDDVVINGSMEHRYPGNLNLSFAYVEGESLLMGLKEVAVSSGSACTSASLEPSYVLRALGVEEDMAHTSIRFGMGRFTTDEEVDRAIELTVHQVKKLRDMSPLYEMAKAGIDLKSIEWSQH

SEQ ID NO: 35122 - protein, 397 aa, Zea mays subsp. mays
MDMQATTPVDPRVLDAMLPFYLSRYGNPHSRTHLYGWESDAAVEDARARVASLVGADPREIFFTSGATECNNIAVKGVMRFYRERRRHVITTQTEHKCVLDSCRYLQQEGFEITYLPVRKDGLVDLAQLEDAIRPDTGLVSIMAVNNEIGVVQPLEEIGRICKEKGVPFHTDAAQALGKIPIDVNRMGIGLMSLSGHKIYGPKGVGALYLRRRPRIRVEPQMNGGGQERGIRSGTVPTPLVVGFGAACEIAAQEMDYDHRRVSALQQRLLDGIRAQVDDVVINGSMEHRYPGNLNLSFAYVEGESLLMGLKEVAVSSGSACTSASLEPSYVLRALGVEEDMAHTSIRFGMGRFTTDEEVDRAIELTVHQVKKLRDMSPLYEMAKAGIDLKSIEWSQH

SEQ ID NO: 35123 - protein, 395 aa, Zea mays subsp. mays
MQATTPVDPRVLDAMLPFYLSRYGNPHSRTHLYGWESDAAVEDARARVASLVGADPREIFFTSGATECNNIAVKGVMRFYRERRRHVITTQTEHKCVLDSCRYLQQEGFEITYLPVRKDGLVDLAQLEDAIRPDTGLVSIMAVNNEIGVVQPLEEIGRICKEKGVPFHTDAAQALGKIPIDVNRMGIGLMSLSGHKIYGPKGVGALYLRRRPRIRVEPQMNGGGQERGIRSGTVPTPLVVGFGAACEIAAQEMDYDHRRVSALQQRLLDGIRAQVDDVVINGSMEHRYPGNLNLSFAYVEGESLLMGLKEVAVSSGSACTSASLEPSYVLRALGVEEDMAHTSIRFGMGRFTTDEEVDRAIELTVHQVKKLRDMSPLYEMAKAGIDLKSIEWSQH

SEQ ID NO: 35124 - DNA, 486 bp, Zea mays subsp. mays
acatttctgggttttgggtcgtctccacgggctgggtttggggtcggtcggcggcggcggcggagctaggagtggaggcctgagatatactccaagcgggagtctgggcgctctctgcggtcggagaggcgcgggtgagatctacgagggccgctgcgtcgttctcgcagggccggcggaagacatgggtttcctctcggcgaagctgctgccgtcgtgcgagagcgtgtgcgtgtgctgccccgcgctgcgcccgagctcgcgccgccccgtcaagcgctacaagaagctgctcgccgagatattccccaagacgcccgatggtgctccgaatgagaggaaaatagtgaagttgtgcgagtatgctgcgaagaacccattgcgcataccaaagattgccaagtttctagagcagaggagtcacaaggagctgcgctctgcccatgtgaacttcgtcagaatcatcactgaagcttacagcaagct

SEQ ID NO: 35125 - protein, 161 aa, Zea mays subsp. mays
HFWVLGRLHGLGLGSVGGGGGARSGGLRYTPSGSLGALCGRRGAGEIYEGRCVVLAGPAEDMGFLSAKLLPSCESVCVCCPALRPSSRRPVKRYKKLLAEIFPKTPDGAPNERKIVKLCEYAAKNPLRIPKIAKFLEQRSHKELRSAHVNFVRIITEAYSK

SEQ ID NO: 35126 - protein, 100 aa, Zea mays subsp. mays
MGFLSAKLLPSCESVCVCCPALRPSSRRPVKRYKKLLAEIFPKTPDGAPNERKIVKLCEYAAKNPLRIPKIAKFLEQRSHKELRSAHVNFVRIITEAYSK

SEQ ID NO: 35127 - DNA, 1056 bp, Zea mays subsp. mays
  misc_feature (402)..(403): n is a, c, g, or t
  misc_feature (415)..(415): n is a, c, g, or t
  misc_feature (418)..(419): n is a, c, g, or t
  misc_feature (423)..(424): n is a, c, g, or t
  misc_feature (437)..(437): n is a, c, g, or t
  misc_feature (441)..(442): n is a, c, g, or t
  misc_feature (446)..(446): n is a, c, g, or t
gcacgagaccattacctagaacatcctaatcaaaacaagaacagagcagtactgcaggagagcgagtgagctgtccaaagcgtccggccaaacccgcgtgtgtccaccactcctcctgcacaagcaccgccacaatgcggccgcacaccctggcgctgctcctgctcctgctggccacgccggcggcgacgcgtctggcatcggccgcctgcgcgggcgagaagttccccgcggggcgggcgtacgcggcgtgcgaggacctcccgaagctgggcgcgtcgctgcactggacgtacgacgcggcaaagagctccctgtccgtggcgttcgtggcggcgccggcggcggccggcgggtgggtggcgtgggggctgaacccgacgggcgagggcatggccggcnngcaggcgactgntgnngctnncggggtccgggtncggnnccgnggcgcccaccgtgcggacgtacaacatcacggggtacgtcccgctggggaacgtctcgacgccgctggacttcccggccaccgacctcgccgcggacgccgcagccgggggcaggatccgggtgtacggcacgctgcagctgcgcgaggggatgagggccgtgaaccaggtgtggcaggtcggcgcgtcatccaccgccggcgcccccgacaagcacgcgttccagccggacaacctcggcgccaagagcaagctcgtcctcgccggcaagtcccccgcggcggcgtccccgtcgcccgcccccgcgcctcatgcgtccggcggcggcgcggcgtcgtccaagtcccccaacgccgccgcggccgcggccggcgtggccgcgccggtagccctcgtgctcgcgctggtgggattcttggcgacggtatgatgacgcgtccacggtggctggatgggtgggcggtgagcaggggaggaagtattattgcactgttttctttatttttggttcgtttttcaggtttgttttaggctgtgaaataataataaaaacggttggctggctgcacttgttgttgagctgctgtttggtaggaatatacagtgattt

SEQ ID NO: 35128 - protein, 280 aa, Zea mays subsp. mays
  misc_feature (90)..(90): Xaa can be any naturally occurring amino acid
  misc_feature (94)..(95): Xaa can be any naturally occurring amino acid
  misc_feature (97)..(97): Xaa can be any naturally occurring amino acid
  misc_feature (101)..(101): Xaa can be any naturally occurring amino acid
  misc_feature (103)..(104): Xaa can be any naturally occurring amino acid
MRPHTLALLLLLLATPAATRLASAACAGEKFPAGRAYAACEDLPKLGASLHWTYDAAKSSLSVAFVAAPAAAGGWVAWGLNPTGEGMAGXQATXXAXGVRXRXXGAHRADVQHHGVRPAGERLDAAGLPGHRPRRGRRSRGQDPGVRHAAAARGDEGREPGVAGRRVIHRRRPRQARVPAGQPRRQEQARPRRQVPRGGVPVARPRASCVRRRRGVVQVPQRRRGRGRRGRAGSPRARAGGILGDGMMTRPRWLDGWAVSRGGSIIALFSLFLVRFSGLF

SEQ ID NO: 35129 - protein, 194 aa, Zea mays subsp. mays
  misc_feature (4)..(4): Xaa can be any naturally occurring amino acid
  misc_feature (8)..(9): Xaa can be any naturally occurring amino acid
  misc_feature (11)..(11): Xaa can be any naturally occurring amino acid
  misc_feature (15)..(15): Xaa can be any naturally occurring amino acid
  misc_feature (17)..(18): Xaa can be any naturally occurring amino acid
MAGXQATXXAXGVRXRXXGAHRADVQHHGVRPAGERLDAAGLPGHRPRRGRRSRGQDPGVRHAAAARGDEGREPGVAGRRVIHRRRPRQARVPAGQPRRQEQARPRRQVPRGGVPVARPRASCVRRRRGVVQVPQRRRGRGRRGRAGSPRARAGGILGDGMMTRPRWLDGWAVSRGGSIIALFSLFLVRFSGLF

SEQ ID NO: 35130 - DNA, 1431 bp, Zea mays subsp. mays
cccaaatcgacctgggctggacccagccgcgccccgtctgcctcctgcttctctctccgcttccgcttcctgcgcctccaggctccacttctccgctcggcagtctgcactggaaggacagcatgtcggcctcggcgtcgtcaccggcggcggcggcgggcgatgagaagcaggaggcggcgcccgtcaggcgctgcaagggcgtcaacgacctcgacaaggtcgttctccgcgaggtccggggcagctccgcagaggtgtacttgtatggtgggcatgtgacatcatggaaagatgagcatggagatgaattactttttgttagcaataaggctattttcaagcctccaaaagctatacgtggaggaataccaatatgctttccgcagttctccaactttgggaatctggaaccacatggatttgcaaggaataggacatggagtgttgatgatgatcctccgccatttccagtgccaacctccaatagcgcttatattgacttgatcctcaaacctactgaagatgatttgaagatctggcctcatagttttgaataccgcctgagggttgcacttagtcctggtggtgatttgatgctaacttcacgtataagaaacactaatgcagacgggaagccattctctttcacttttgcataccacacatacttcaagatttctgatatcagtgaggtgcgagtagaaggattggaaactctggattacctagacaacttacaagatagagctcgttccactgaacaaggcgatgcaattgtttttgaatccgaactggacagaatatatctgggcacaccatcgaaaattgccattattgatcatgagaagaaaagaacatttgttgtgaggaaaggaggccttcctgatgctgttgtttggaatccctgggataaaaaagcaaaggctatgtcagattttggggatgatgaatataaacgaatggtatgtgtggaggcggctgctattgaaaagactgtcactctgaagcctggtgaagagtggactggaaagttggaactttctgctgtgccatctagctattacagtggtcagctagaccctgaccgtgtgattcaggattccactgtcccggaggactccatcagctagtccttattctatttttgcaggtagagcattgtatcattatgcataagagatgctggcaacaagggctgtccacatgtttcttccattctgttcaaatcttcggtgtttttttattccgaatgcatatccgaaccaaggaatgtgaaattggtttccgctttttgaggatctatgtagcataatggataagtcggtgtttcgtaccctatttagggatgcttgaagcaagaaacatcttcatgggttgtaaaataaaagaaaaattctctttattatatttgatcaattcttttgcctc

SEQ ID NO: 35131 - protein, 376 aa, Zea mays subsp. mays
QIDLGWTQPRPVCLLLLSPLPLPAPPGSTSPLGSLHWKDSMSASASSPAAAAGDEKQEAAPVRRCKGVNDLDKVVLREVRGSSAEVYLYGGHVTSWKDEHGDELLFVSNKAIFKPPKAIRGGIPICFPQFSNFGNLEPHGFARNRTWSVDDDPPPFPVPTSNSAYIDLILKPTEDDLKIWPHSFEYRLRVALSPGGDLMLTSRIRNTNADGKPFSFTFAYHTYFKISDISEVRVEGLETLDYLDNLQDRARSTEQGDAIVFESELDRIYLGTPSKIAIIDHEKKRTFVVRKGGLPDAVVWNPWDKKAKAMSDFGDDEYKRMVCVEAAAIEKTVTLKPGEEWTGKLELSAVPSSYYSGQLDPDRVIQDSTVPEDSIS

SEQ ID NO: 35132 - protein, 336 aa, Zea mays subsp. mays
MSASASSPAAAAGDEKQEAAPVRRCKGVNDLDKVVLREVRGSSAEVYLYGGHVTSWKDEHGDELLFVSNKAIFKPPKAIRGGIPICFPQFSNFGNLEPHGFARNRTWSVDDDPPPFPVPTSNSAYIDLILKPTEDDLKIWPHSFEYRLRVALSPGGDLMLTSRIRNTNADGKPFSFTFAYHTYFKISDISEVRVEGLETLDYLDNLQDRARSTEQGDAIVFESELDRIYLGTPSKIAIIDHEKKRTFVVRKGGLPDAVVWNPWDKKAKAMSDFGDDEYKRMVCVEAAAIEKTVTLKPGEEWTGKLELSAVPSSYYSGQLDPDRVIQDSTVPEDSIS

SEQ ID NO: 35133 - DNA, 1157 bp, Zea mays subsp. mays
gcacgagaccattacctagaacatcctaatcgaaaaacccgccgcagtccacgcgcccgcaccgcaccgcgcgccgcgctcgctgccgtgcccgtgtccccttcctttcccgtttccccctccctctctctttccccacgcccgacgcccccaccactctctcgatccaaagccagatcggcacgacgagcagagggccccccggagcggcgcggagcaatggcggcgggataccgggcggaggacgactacgactacctcttcaaggtggtactgatcggcgactccggcgtcggcaagtccaatctgctctcacgcttcacgcgcaacgagttcagccttgagtccaagtccaccatcggcgtcgagttcgccacccgctctctccaggtcgacggcaaggttgtcaaggcccagatttgggacactgctgggccaggaacgatatcgtgctattactagtgcgtattatcgaggtgctgttggggcgttgcttgtatatgacgtcactcgtcactcaacctttgagaacgttgagcgttggctgaaggagttgagggaccacacagatcccaatatagttgttatgctggttggcaacaaatctgatctccgccatcttgtagcagttcaaactgatgaaggaaaagcattcgcagagagggagtcattgtatttcatggagacctctgcactcgagtcgactaacgttgaaaatgcattcgcagaggtcttaactcagatctaccgtattgtgagcaagagagcagttgaagctggcgaagatgcagcatctgggcctggcaagggcgagaagattaacataaaggatgatgtttcggcggtgaagaagggtggctgctgctctagctgacctgccctgctgtatttttttttggagctgtggtgatgtagcttatggtacggcatttccagcgaccgagaactggtagtggcattagcagcttctatgttacctagagagtttattgtcaaactgggggaaaaaaactgaaggttagatcggtgtagatctttctggtactgtattgtgtatccggcaataggcatggtattgttttttttggctgtgaatccactggtaccatgtttaaacttatgaattgttcaaaatagaaaggtgcttcatgcttgcc

SEQ ID NO: 35134 - protein, 153 aa, Zea mays subsp. mays
ARDHYLEHPNRKTRRSPRARTAPRAALAAVPVSPSFPVSPSLSLSPRPTPPPLSRSKARSARRAEGPPERRGAMAAGYRAEDDYDYLFKVVLIGDSGVGKSNLLSRFTRNEFSLESKSTIGVEFATRSLQVDGKVVKAQIWDTAGPGTISCYY

SEQ ID NO: 35135 - protein, 95 aa, Zea mays subsp. mays
MLVGNKSDLRHLVAVQTDEGKAFAERESLYFMETSALESTNVENAFAEVLTQIYRIVSKRAVEAGEDAASGPGKGEKINIKDDVSAVKKGGCCSS

SEQ ID NO: 35136 - protein, 80 aa, Zea mays subsp. mays
MAAGYRAEDDYDYLFKVVLIGDSGVGKSNLLSRFTRNEFSLESKSTIGVEFATRSLQVDGKVVKAQIWDTAGPGTISCYY

SEQ ID NO: 35137 - DNA, 1201 bp, Zea mays subsp. mays
aaatcaacccaacacggcgtccccgtcccgagtcaccaccgacccaagcaaaaccgcacgcaccctgccagcggccccccaactcccaacccaacccctactccggctagctcgcggcggcggcccagcggccatggccttccggctgagcaacaacctgatcggggtcctaaacttcgtcaccttcctgctctccgtcccgatcctgggcgcgggcatctggctgggccaccgcgccgacggcaccgagtgcgagcgctacctctcggcgcccgtcatcgcgctgggggccttcctcctcgccgtctccctggcgggcctcgtcggcgcctgctgccgcgtcacctggctgctctgggcctacctcctcgccatgttcgtcctcatcctcgtcctcttctgcttcaccgtcttcgccttcgtcgtcaccaacaggggcgccggcgaggccgtctccggccgcggatacaaggagtaccgcctcggggactactccaactggctgcagaagcgcgtcgagaacaccaggaactgggaccggatcaggagctgcctccaggactccaaggtctgcaagagcctgcaggacaagaacgagaccgtcgcccagttcatgagttccagcctctcccccatcgagtctggctgctgcaagccccccaccagctgcggctacacctacgtcggcggcacggactggacgccggtgaccaccaactcgacggacccggactgcaagacctggagcaacgacgcctcggcgctctgctacaactgccagtcgtgcaaggccggcgtggtggccacgttccagcggaactggaagcgcgtcgccgtcgtctgcatcgtcttcctcgtcttcatcatcatcgtctactccgtcggctgctgcgccttcaggaacaaccgcagagacaacgcctaccgcggcgggtggaagggcgggtacgcttgatccaccatcgcgtcgtttaggagcggagccatgcacgcgcgctcggtgctctgctctgctccctgcccgccgctgtcgtcgtacgtacatgtttagtaggctcgttgtagctctgtacaggtgatggagatcgttgttgcggattcttatcgtcttcctggttacatacttacattattgttatgatctgatcagcggtaggttttgtatacgctgctcattgattcgtctgcctgctattttcgt

SEQ ID NO: 35138 - protein, 324 aa, Zea mays subsp. mays
KSTQHGVPVPSHHRPKQNRTHPASGPPTPNPTPTPASSRRRPSGHGLPAEQQPDRGPKLRHLPALRPDPGRGHLAGPPRRRHRVRALPLGARHRAGGLPPRRLPGGPRRRLLPRHLAALGLPPRHVRPHPRPLLLHRLRLRRHQQGRRRGRLRPRIQGVPPRGLLQLAAEARREHQELGPDQELPPGLQGLQEPAGQERDRRPVHEFQPLPHRVWLLQAPHQLRLHLRRRHGLDAGDHQLDGPGLQDLEQRRLGALLQLPVVQGRRGGHVPAELEARRRRLHRLPRLHHHRLLRRLLRLQEQPQRQRLPRRVEGRVRLIHHRVV

SEQ ID NO: 35139 - protein, 317 aa, Zea mays subsp. mays
NQPNTASPSRVTTDPSKTARTLPAAPQLPTQPLLRLARGGGPAAMAFRLSNNLIGVLNFVTFLLSVPILGAGIWLGHRADGTECERYLSAPVIALGAFLLAVSLAGLVGACCRVTWLLWAYLLAMFVLILVLFCFTVFAFVVTNRGAGEAVSGRGYKEYRLGDYSNWLQKRVENTRNWDRIRSCLQDSKVCKSLQDKNETVAQFMSSSLSPIESGCCKPPTSCGYTYVGGTDWTPVTTNSTDPDCKTWSNDASALCYNCQSCKAGVVATFQRNWKRVAVVCIVFLVFIIIVYSVGCCAFRNNRRDNAYRGGWKGGYA

SEQ ID NO: 35140 - protein, 273 aa, Zea mays subsp. mays
MAFRLSNNLIGVLNFVTFLLSVPILGAGIWLGHRADGTECERYLSAPVIALGAFLLAVSLAGLVGACCRVTWLLWAYLLAMFVLILVLFCFTVFAFVVTNRGAGEAVSGRGYKEYRLGDYSNWLQKRVENTRNWDRIRSCLQDSKVCKSLQDKNETVAQFMSSSLSPIESGCCKPPTSCGYTYVGGTDWTPVTTNSTDPDCKTWSNDASALCYNCQSCKAGVVATFQRNWKRVAVVCIVFLVFIIIVYSVGCCAFRNNRRDNAYRGGWKGGYA

SEQ ID NO: 35141 - DNA, 755 bp, Zea mays subsp. mays
gcctagtcaacagtctatcgtagtcaacaacaatcgtgcacaggctagacctacaccgctgaaagctggcaagagcatcatcggggcaaagaaggcaaggacatccgtggccttccctttcgagctcatcaagccgagcagcatccgcggcgacgtcaccctgagcgacataaacgagaagctccacgcgcccccgccgtacaagatccggcacaagagcgacgaggagcccagctcgctccaggcctcggccatctcggggaagcctgtggtccacaagacgaagatccacaccgaggggggcaaggggagcatcacgatcaccagaaccagaggctaagctgaccatttgcggttgtgacgcctgcgctgcacagtggcggctaatagttcgactggcctttttgcgtttctggtgcctctgggctcgtcttcgtccccagttggttttgtggcccaagaggtgcatggccttattagtggagtctagagtgcttatactaggcagcatttaccggcttgggtgggtgggcatctctgcctgtgcttgctgtttgtgggagacataatattaggcgcgtagttgggttgggtgttggctcacgcttgtagtaggggtgtcgcagctgtgctttggttggtttgtgttgttgggaaggcgaagtagtagttggtttagcttgattaattaatatggacatattgatttggtgaggctatataaatccacgggatggaggcttgacggttttttt

SEQ ID NO: 35142 - protein, 112 aa, Zea mays subsp. mays
PSQQSIVVNNNRAQARPTPLKAGKSIIGAKKARTSVAFPFELIKPSSIRGDVTLSDINEKLHAPPPYKIRHKSDEEPSSLQASAISGKPVVHKTKIHTEGGKGSITITRTRG

SEQ ID NO: 35143 - DNA, 966 bp, Zea mays subsp. mays
aaaaaatcaaaaatagaaaaagtctcttgcccccgcggccgtgccgagccggcatcccctcccccagcaacgatcgcgacgacccaaaccggcaagggtgagcagcggctggccgccgccgcggcagacgagtcccatgggagacaacaagtctccgctgagcctgagcccgatgggcgggcgcgaccgggaccgggacctcctcatcccggtctccggcggcggctcggcgcccggcgtcgatgacgaggacgccgacagggcctcctccgcctccgcggcgctctcctcctccggccgcgaggctttccataaggtcgtccgcagttgggcttcaaagaagttcatgactggatgtgtaattctcttccccatagcaataacgttctacatcacctggtggttcattcattttgttgatggattcttctctccaatatatgcacaactaggaatcaacatatttggtcttggcttcatcacatctgttactttcatatttttgatcggagtctttatgtcatcttgggttggggcatctgtccttagccttggcgagtggattattaagcgcatgccccttgttcgtcatatctacaacgcatcgaagcaaattagtgctgcaatatcaccagatcagaacaaacaggcattcaaggaagcggtcatcataaggcatcctcgtgttggagaatatgcgtttggtttcatcacatcgtcagtatctctccagagttattccggtcaagaagatctttactgtgtctatgtcccaacgaaccatctttacattggcgatatcttcatggtgaattcaaaggatgtcataaggccaaacctttccgtgcgtgaaggcatcgaaatcgttgtgtctggtggtatgtcaatgccccagattctgtcaaccctcgacccggatgagaaaataaaatatgaatccatgacaaggggatgtgggtttagttc

SEQ ID NO: 35144 - protein, 276 aa, Zea mays subsp. mays
MGDNKSPLSLSPMGGRDRDRDLLIPVSGGGSAPGVDDEDADRASSASAALSSSGREAFHKVVRSWASKKFMTGCVILFPIAITFYITWWFIHFVDGFFSPIYAQLGINIFGLGFITSVTFIFLIGVFMSSWVGASVLSLGEWIIKRMPLVRHIYNASKQISAAISPDQNKQAFKEAVIIRHPRVGEYAFGFITSSVSLQSYSGQEDLYCVYVPTNHLYIGDIFMVNSKDVIRPNLSVREGIEIVVSGGMSMPQILSTLDPDEKIKYESMTRGCGFS

SEQ ID NO: 35145 - protein, 264 aa, Zea mays subsp. mays
MGGRDRDRDLLIPVSGGGSAPGVDDEDADRASSASAALSSSGREAFHKVVRSWASKKFMTGCVILFPIAITFYITWWFIHFVDGFFSPIYAQLGINIFGLGFITSVTFIFLIGVFMSSWVGASVLSLGEWIIKRMPLVRHIYNASKQISAAISPDQNKQAFKEAVIIRHPRVGEYAFGFITSSVSLQSYSGQEDLYCVYVPTNHLYIGDIFMVNSKDVIRPNLSVREGIEIVVSGGMSMPQILSTLDPDEKIKYESMTRGCGFS

SEQ ID NO: 35146 - protein, 206 aa, Zea mays subsp. mays
MTGCVILFPIAITFYITWWFIHFVDGFFSPIYAQLGINIFGLGFITSVTFIFLIGVFMSSWVGASVLSLGEWIIKRMPLVRHIYNASKQISAAISPDQNKQAFKEAVIIRHPRVGEYAFGFITSSVSLQSYSGQEDLYCVYVPTNHLYIGDIFMVNSKDVIRPNLSVREGIEIVVSGGMSMPQILSTLDPDEKIKYESMTRGCGFS

SEQ ID NO: 35147 - DNA, 833 bp, Zea mays subsp. mays
tcatcacaactcaagcacctatagtagtacctcacaatgacaggaaaaaagctaataccgttggggctcattatcctcatgagcacaggatcagccaatgctgttagggtggtcagatactctagtgccgatggtactggcacaggacagggagaaggtggtggaaatgtgaatggcggaggatcaggatctgggtctggcaccggatcaggtgatagtggtccttatggtacacatgcaagcgctagtgggggtggtggagggggtggaactagccagtacggtgggtctggatatggttctgggtcggggtcagggtcaggatctagtacatatagtcaaggagggtattctggttatggagaatcttctagtgctggtggtaccggtgggggtggaggtggaggacaagctggaggcgcatggaattccaatgctcaaggatccggcagtggaactggttctggctctagctatgctaacaggtattggtacggatcaagtgaagcaggtgcaagtgctaatggcaatggtggtggcacaggaaatagtcaaaacggtggaggtggtggtggctcaggtgctggatctgggtatggcaatgcctacccctaatttctatatctaagtaacctatagttggagcccaacagtctttctcgtttcaagttgtgaaattagttagtttgtcgtacctttattacacttttgctagaactaaataaataaagggcccaactattccagtaatggcagcagttaagtgtgaggttcaacttgtaagaatttgttgtaaacatgtgagtctatgaatgaaataataacttcccttt

SEQ ID NO: 35148 - protein, 192 aa, Zea mays subsp. mays
MTGKKLIPLGLIILMSTGSANAVRVVRYSSADGTGTGQGEGGGNVNGGGSGSGSGTGSGDSGPYGTHASASGGGGGGGTSQYGGSGYGSGSGSGSGSSTYSQGGYSGYGESSSAGGTGGGGGGGQAGGAWNSNAQGSGSGTGSGSSYANRYWYGSSEAGASANGNGGGTGNSQNGGGGGGSGAGSGYGNAYP

SEQ ID NO: 35149 - protein, 178 aa, Zea mays subsp. mays
MSTGSANAVRVVRYSSADGTGTGQGEGGGNVNGGGSGSGSGTGSGDSGPYGTHASASGGGGGGGTSQYGGSGYGSGSGSGSGSSTYSQGGYSGYGESSSAGGTGGGGGGGQAGGAWNSNAQGSGSGTGSGSSYANRYWYGSSEAGASANGNGGGTGNSQNGGGGGGSGAGSGYGNAYP

SEQ ID NO: 35150 - protein, 151 aa, Zea mays subsp. mays
MAEDQDLGLAPDQVIVVLMVHMQALVGVVEGVELASTVGLDMVLGRGQGQDLVHIVKEGILVMENLLVLVVPVGVEVEDKLEAHGIPMLKDPAVELVLALAMLTGIGTDQVKQVQVLMAMVVAQEIVKTVEVVVAQVLDLGMAMPTPNFYI

SEQ ID NO: 35151 - DNA, 1878 bp, Zea mays subsp. mays
  misc_feature (514)..(514): n is a, c, g, or t
  misc_feature (517)..(517): n is a, c, g, or t
gcacgagaccattacctagaacatcctaatcgaaaacttctctgccttcgtgaaccaccgcgcgagagagagtcgagatccgtcgctgccgtgcggcttgagagagaagcaccgtgccgggcgaacctccaccgttgggctcaatcgattgggtcagtggggttcggcaacgctcgagagaacgggcgaagtggtgatcggagcaagtggcgatttcatgccggagtcggagctccgccgcggattccgctgcgccccgcgggcagactacttcgcagctgtcgctggccgcgaccacgtcgtcatcttccctttcatggcgaagggccacatgctcccgctgctccacttcgccacggcactctcgtgcgcaacacgggaggctccgcgtgaccctgggtcaccaccccgggcaacgtggccttcgcccggagccgtctgcccgcgtcggtgggcctcgtcgcgctcccgttcccgtcgttcccgccgctgccggagggcgtcgagtccaccnacnccctcccgtgcccatcgctgcacctgacgttcatgcaggcgacggggctcctgcgcgggccgttcgccgagttcctggcgtcgctcccgtccccgccgctcgcgctcgtctccgacttcttcctcgggttcacgcgccgcgtggcggccgacgccggcgtccgccgcatcgtgttcaatggcatgtcctgcttcgcctcggcgatctgcaaggcgctcgctgcgagcccgccgaccagcttcgagcccgggaccatgatccaggtgcccggcatgccggagcacgtggcggtcagggcggaggaggttcccgatggggtcaccaagagggccgaccccgacaacccgttcacgcgcttcttcatggacgagatcggtgattcggacgtgcgcagctggggagtcctcagcaacagcctcgacgcgctcgacgcggcctacgtgtcggccttggagtcattctacgagacgggcgcccgtgcctggctcgtgggcccgctgttcatggccgccggcgacatgccggatggcgagaagaaggagcaagaccccgagggctgtctctcgtggctcgacgagagggcggcgcatctggggtcggtggtgtacatctcgttcgggacgcaggcccacatcacggacgcgcagctggacgagctggtgcacgggctggtgcagtccggccatcccttcctctgggccgtccgatctgacacgtggtcgccgccgttggacgtggggcccaacaaccggatcgtccgtggttgggttccgcagagaagtattctggcccacaaggcagttggtgggttcgtgagccattgcgggtggaactctgtgatggagagcctcgccgccgggaagcccatgctggcgtggccgatgatcgcggagcagcacctgaacgcaaggcacgtggccaacatcttaggcgccggcgtcaggatagccctgaaggttggcgctgacgtcgtcgggagcacggaggtggaggagaaggttcgggagctgatggacgctgaaagcaaggcggcgaagcggatgcgggagagggctgcgtgggcgcagcaagcagccaagtcagcggtgagccacggtggaacctgccatggctttgctcaagcttgtggaagagctacaggagacctatgatgatggggtcgtaggcaaatgtgcgaatagtgtttagaatgatctttccagtaattctgttaagctggtgtttagaatgatcttgctagtacttctattaggcttagctacgtatgtgtcattagcgtctatggtgtcttctcaaaacacaaatcaatcgactcttagcaggtgttttgataattgatcataaataaaaatcaacgacat

SEQ ID NO: 35152 - protein, 372 aa, Zea mays subsp. mays
MQATGLLRGPFAEFLASLPSPPLALVSDFFLGFTRRVAADAGVRRIVFNGMSCFASAICKALAASPPTSFEPGTMIQVPGMPEHVAVRAEEVPDGVTKRADPDNPFTRFFMDEIGDSDVRSWGVLSNSLDALDAAYVSALESFYETGARAWLVGPLFMAAGDMPDGEKKEQDPEGCLSWLDERAAHLGSVVYISFGTQAHITDAQLDELVHGLVQSGHPFLWAVRSDTWSPPLDVGPNNRIVRGWVPQRSILAHKAVGGFVSHCGWNSVMESLAAGKPMLAWPMIAEQHLNARHVANILGAGVRIALKVGADVVGSTEVEEKVRELMDAESKAAKRMRERAAWAQQAAKSAVSHGGTCHGFAQACGRATGDL

SEQ ID NO: 35153 - protein, 322 aa, Zea mays subsp. mays
MSCFASAICKALAASPPTSFEPGTMIQVPGMPEHVAVRAEEVPDGVTKRADPDNPFTRFFMDEIGDSDVRSWGVLSNSLDALDAAYVSALESFYETGARAWLVGPLFMAAGDMPDGEKKEQDPEGCLSWLDERAAHLGSVVYISFGTQAHITDAQLDELVHGLVQSGHPFLWAVRSDTWSPPLDVGPNNRIVRGWVPQRSILAHKAVGGFVSHCGWNSVMESLAAGKPMLAWPMIAEQHLNARHVANILGAGVRIALKVGADVVGSTEVEEKVRELMDAESKAAKRMRERAAWAQQAAKSAVSHGGTCHGFAQACGRATGDL

SEQ ID NO: 35154 - protein, 298 aa, Zea mays subsp. mays
MIQVPGMPEHVAVRAEEVPDGVTKRADPDNPFTRFFMDEIGDSDVRSWGVLSNSLDALDAAYVSALESFYETGARAWLVGPLFMAAGDMPDGEKKEQDPEGCLSWLDERAAHLGSVVYISFGTQAHITDAQLDELVHGLVQSGHPFLWAVRSDTWSPPLDVGPNNRIVRGWVPQRSILAHKAVGGFVSHCGWNSVMESLAAGKPMLAWPMIAEQHLNARHVANILGAGVRIALKVGADVVGSTEVEEKVRELMDAESKAAKRMRERAAWAQQAAKSAVSHGGTCHGFAQACGRATGDL

SEQ ID NO: 35155 - DNA, 2118 bp, Zea mays subsp. mays
ggctcgctcgccttcctcctccccactccactccattccaacgcaacgcctcgccccgctttataggccgccgcccgcgccacatcgccaccgtctcgcaccgtcgcggccacccattctctctcgtccatcgcatcgctccggctcccagcgcaatcgatccatccgtccctaggtgtgcttcagctatgcagttcagcagcgtgcttcccctagagggaaaagcgtgtatgagcccagtgaggagaggcagtggaggttatgggagtgagaggatgaggatcaactgctgcagcatcaggcgcaacaaggcactgaggaggatgtgtttcagtgcaaggggtgctgtgagcagcacgcagtgtgtgctcacatcagatgctggcccagacactcttgtacgtccgaaccatccttttcggaggaattatgctgatcctaatgaagtcgctgccgtcattttgggtggtggtaccgggactcagcttttccctctcacaagcacaagggccacccctgctgttcctattggaggatgttacaggcttattgatatccccatgagcaactgtttcaacagtggcataaacaagatatttgttatgactcagttcaactcagcttctcttaaccgtcacattcatcgtacctatcttggtggggggatcaacttcactgatggatctgttgaggtgctggctgcaacacaaatgcctggggaggctgctggttggttccagggcacagcagacgccgttagaaaatttatctgggtacttgaggattattacaagcataaagctatagaacacattttgattttgtcaggagatcaactctatcgtatggattacatggagcttgtgcagaaacatgtcgatgacaatgcagacataactttatcatgcgctcctgttggagagagtcgagcatctgactatggattagttaagttcgatagttcaggccgtgtaattcagttctctgagaaaccaaagggtgctgccttggaagaaatgaaagtggataccagcttcctcaatttcgccacttgcactctcccagctgaatatccctatatcgcttcaatgggagtttacgtttttaagagagatgttttgttagaccttctaaagtcacggtatgctgaactgcatgactttggttctgaaattctgcccaaggctttgcatgagcacaatgtacaggcatatgttttcactgactactgggaggacattggaacaatcagatctttctttgatgcaaacatggccctctgcgagcagcctccaaagttcgagttttacgatccgaaaacaccattcttcacttcccctcggtacttgccaccaacgaagtcggataagtgcaggattaaagacgcgatcatttcacacggctgcttcttgcgtgagtgtgccatcgagcactctattgttggtgttccgtcacgcctaaactctggatgcgagctcaagaataccatgatgatgggtgcggatttgtatgagaccgaagacgagatctcaaggctactggcagagggcaaggtgccaattggcgtaggggagaacacgaagataagcaactgcatcatcgacatgaattgccagggttggaaggaacgtctccataacaaacaaagagggcgttccaagagtcccgaccggcctggacgaaggatactaatccggtctgggatcgtggtagtcctgaagaacgcaaccatcaaggacggcaccgtcatatagagactaactttggccttacgcatggcctgcaaggttacaggttagtcatcgtcttgagagttgagacttagtttgaggcgcgcccgaccttgacttgagccgtcggagggacaagaacatgaggaagaagggctggtggtgccggatgttgccatggacgacgagaaatggtttggctggtcgcatcggtccagtagctagctcttccgatgttattaatatatgtatctagtggagtagtgcgaacagtgcaataagctgggcgagcaaagccgcggcaactcttggcttggggattggttggtgcatcttgtaaataataaactcggacgcagcaaatgaaacatgcccctcatcttcttcc

SEQ ID NO: 35156 - protein, 583 aa, Zea mays subsp. mays
LARLPPPHSTPFQRNASPRFIGRRPRHIATVSHRRGHPFSLVHRIAPAPSAIDPSVPRCASAMQFSSVLPLEGKACMSPVRRGSGGYGSERMRINCCSIRRNKALRRMCFSARGAVSSTQCVLTSDAGPDTLVRPNHPFRRNYADPNEVAAVILGGGTGTQLFPLTSTRATPAVPIGGCYRLIDIPMSNCFNSGINKIFVMTQFNSASLNRHIHRTYLGGGINFTDGSVEVLAATQMPGEAAGWFQGTADAVRKFIWVLEDYYKHKAIEHILILSGDQLYRMDYMELVQKHVDDNADITLSCAPVGESRASDYGLVKFDSSGRVIQFSEKPKGAALEEMKVDTSFLNFATCTLPAEYPYIASMGVYVFKRDVLLDLLKSRYAELHDFGSEILPKALHEHNVQAYVFTDYWEDIGTIRSFFDANMALCEQPPKFEFYDPKTPFFTSPRYLPPTKSDKCRIKDAIISHGCFLRECAIEHSIVGVPSRLNSGCELKNTMMMGADLYETEDEISRLLAEGKVPIGVGENTKISNCIIDMNCQGWKERLHNKQRGRSKSPDRPGRRILIRSGIVVVLKNATIKDGTVI

SEQ ID NO: 35157 - protein, 521 aa, Zea mays subsp. mays
MQFSSVLPLEGKACMSPVRRGSGGYGSERMRINCCSIRRNKALRRMCFSARGAVSSTQCVLTSDAGPDTLVRPNHPFRRNYADPNEVAAVILGGGTGTQLFPLTSTRATPAVPIGGCYRLIDIPMSNCFNSGINKIFVMTQFNSASLNRHIHRTYLGGGINFTDGSVEVLAATQMPGEAAGWFQGTADAVRKFIWVLEDYYKHKAIEHILILSGDQLYRMDYMELVQKHVDDNADITLSCAPVGESRASDYGLVKFDSSGRVIQFSEKPKGAALEEMKVDTSFLNFATCTLPAEYPYIASMGVYVFKRDVLLDLLKSRYAELHDFGSEILPKALHEHNVQAYVFTDYWEDIGTIRSFFDANMALCEQPPKFEFYDPKTPFFTSPRYLPPTKSDKCRIKDAIISHGCFLRECAIEHSIVGVPSRLNSGCELKNTMMMGADLYETEDEISRLLAEGKVPIGVGENTKISNCIIDMNCQGWKERLHNKQRGRSKSPDRPGRRILIRSGIVVVLKNATIKDGTVI

SEQ ID NO: 35158 - protein, 507 aa, Zea mays subsp. mays
MSPVRRGSGGYGSERMRINCCSIRRNKALRRMCFSARGAVSSTQCVLTSDAGPDTLVRPNHPFRRNYADPNEVAAVILGGGTGTQLFPLTSTRATPAVPIGGCYRLIDIPMSNCFNSGINKIFVMTQFNSASLNRHIHRTYLGGGINFTDGSVEVLAATQMPGEAAGWFQGTADAVRKFIWVLEDYYKHKAIEHILILSGDQLYRMDYMELVQKHVDDNADITLSCAPVGESRASDYGLVKFDSSGRVIQFSEKPKGAALEEMKVDTSFLNFATCTLPAEYPYIASMGVYVFKRDVLLDLLKSRYAELHDFGSEILPKALHEHNVQAYVFTDYWEDIGTIRSFFDANMALCEQPPKFEFYDPKTPFFTSPRYLPPTKSDKCRIKDAIISHGCFLRECAIEHSIVGVPSRLNSGCELKNTMMMGADLYETEDEISRLLAEGKVPIGVGENTKISNCIIDMNCQGWKERLHNKQRGRSKSPDRPGRRILIRSGIVVVLKNATIKDGTVI

SEQ ID NO: 35159 - DNA, 838 bp, Zea mays subsp. mays
gcaacaacaactttgcgtcttcccgaatcggggcctccaccatctccaactgcaaccccaccccataccgccgccgcctccgctagggttttggagtgaggatcgccgatgtcgacggctcccaggcgccccttccgaggccgcggcgccccgccccctggcaccggctacgtccgccgcggccccgcccctgccccaggccccgccgacggcgccaagaccctgcgcaagcccgtcttcaccaccgtcgaccagctgcgcccccagacgcacggccacaccctcaccgcccgcgtcatctccgcccgcaccgtcctcgacaagccctccacgcacatcggccgcacccgcgtcgcagagtgcctcgtcggagacagcaccggcaccgtcctcgtcaccgcccgcaacgaacaggttgaccttctgaagccagatacaacagtgatcttccgcaacgctaagattgacatgttcaagggtaccatgaggctggtggtggacaagtgggggcggattgaggtgactcagcctgctgatttcaaggtgaaccaagacaacaacatgtcgctggtggagtacgagctggtggatgtggacgaagaggagtgaccagaaacgaagtcgggctgtggacatatattttggttatggaggcggtagcgttaggctcctatctagctatttttatcctggaccgctggcgattgggactttgttttaagtttatcttgaagaagcatgtcgaattatgtacagcagcagcaggtctctgtctgactgatgctttacgtttccgtgacgctttgactcttaatgctagtactacctttttttttct

SEQ ID NO: 35160 - protein, 166 aa, Zea mays subsp. mays
MSTAPRRPFRGRGAPPPGTGYVRRGPAPAPGPADGAKTLRKPVFTTVDQLRPQTHGHTLTARVISARTVLDKPSTHIGRTRVAECLVGDSTGTVLVTARNEQVDLLKPDTTVIFRNAKIDMFKGTMRLVVDKWGRIEVTQPADFKVNQDNNMSLVEYELVDVDEEE

SEQ ID NO: 35161 - protein, 141 aa, Zea mays subsp. mays
QQQLCVFPNRGLHHLQLQPHPIPPPPPLGFWSEDRRCRRLPGAPSEAAAPRPLAPATSAAAPPLPQAPPTAPRPCASPSSPPSTSCAPRRTATPSPPASSPPAPSSTSPPRTSAAPASQSASSETAPAPSSSPPATNRLTF

SEQ ID NO: 35162 - DNA, 1098 bp, Zea mays subsp. mays
aagcaagtaagcaacccaaaccctccctcccctcccattcgattcttgcctcccacgccgccgccggatcccgcgatggccgaccctcggctgtaccccacggagtccgggtccgacgaccggcgcgatgccgcctatcccggctccgagcgccgcctctacaacccgtaccaggacctcaacctcccctatcggcagctctacgaccttcccacctccccggagttcctcttccaggaggaggccgtcgcgcagcgccggtcctggggcgagaacctcacctactacaccggcgtgggatacctcggcggcgccggggccggggccgcgctggggctccgcgacgccgcccgaggcgccgagcctggggagcccgccaagatccgggccaaccgcgtcctcaactcctgcggcagctccggacgccgcgtcggtaacacgctcggggtcatcggcctcatgtacgccgggatcgagagcgccatggtcgccgcccgcgaccgcgacgactggatcaacagcgtcgtggccgggctaggcaccggcgcgctcttccgcgccgctaacgggccgcgctcggcggtcgtcgccggggcccgttggtggggttcttgctggcgcctccgccgctgccaagcaggttgggaagagatacctccccgccctctaaatctgattgcggtacttgtctctgccctgccatgccgtgatcaagggaaatcatttcgtcgcgtggatgttatttcttcgttctcgttaattatttgggaagagtcatgttcttctcgacattcctatatattgttgacatccatatgctggtactatatatgtcaaagaacgatctgatctcaccagatcacgaaatttttggtccacattgcaatgtaacattagacgctagctggtatcgacacaataatactgctttttccattatgctggagaacccatgacattgtgaaatgtaatgctgagtgtagtgtagttttgctagattgtcgctgttttcctatatctctttaaagacgaaattcttcgcctgcccgatgtatgtaaaaaaagacatgccttgatctcagtgagatgttttatacg

SEQ ID NO: 35163 - protein, 282 aa, Zea mays subsp. mays
KQVSNPNPPSPPIRFLPPTPPPDPAMADPRLYPTESGSDDRRDAAYPGSERRLYNPYQDLNLPYRQLYDLPTSPEFLFQEEAVAQRRSWGENLTYYTGVGYLGGAGAGAALGLRDAARGAEPGEPAKIRANRVLNSCGSSGRRVGNTLGVIGLMYAGIESAMVAARDRDDWINSVVAGLGTGALFRAANGPRSAVVAGARWWGSCWRLRRCQAGWEEIPPRPLNLIAVLVSALPCRDQGKSFRRVDVISSFSLIIWEESCSSRHSYILLTSICWYYICQRTI

SEQ ID NO: 35164 - protein, 257 aa, Zea mays subsp. mays
MADPRLYPTESGSDDRRDAAYPGSERRLYNPYQDLNLPYRQLYDLPTSPEFLFQEEAVAQRRSWGENLTYYTGVGYLGGAGAGAALGLRDAARGAEPGEPAKIRANRVLNSCGSSGRRVGNTLGVIGLMYAGIESAMVAARDRDDWINSVVAGLGTGALFRAANGPRSAVVAGARWWGSCWRLRRCQAGWEEIPPRPLNLIAVLVSALPCRDQGKSFRRVDVISSFSLIIWEESCSSRHSYILLTSICWYYICQRTI

SEQ ID NO: 35165 - protein, 144 aa, Zea mays subsp. mays
ASKQPKPSLPSHSILASHAAAGSRDGRPSAVPHGVRVRRPARCRLSRLRAPPLQPVPGPQPPLSAALRPSHLPGVPLPGGGRRAAPVLGREPHLLHRRGIPRRRRGRGRAGAPRRRPRRRAWGARQDPGQPRPQLLRQLRTPRR

SEQ ID NO: 35166 - DNA, 1138 bp, Zea mays subsp. mays
  misc_feature (72)..(72): n is a, c, g, or t
ccaggcagccattgccaaccacccactggccaacttcccatgagccctacccctgcatcatcaccgcggcanccggtgccggcgcccgcgctggcgtggcacggcatgccgcgttcaaggtccacagggactcccacagtatacacaaggccacctcggccgctctcctactccttgtcctcgatcaactcgtccatgtcgtcttcgtccaacgccgtaatccccagcagcggccaccaccggccggccccggcactgcagccgccagcgcggaggcagatgcagcagccaccgcagcagcagaagcaccaaccggtaatcatctacacgcactcgcctaaggtgatccgcaccaacccgcgcgacttcatgtccatcgtgcagaagctgaccggcctcgacggccccggtcaccacgcccgtggtgctgctggtgctgcgcctgcgcccccggcgggtcgcatcaactcggggtcggtcgtcgtcccctccccgcaggacgagtcgtcttcgtcttcgtcctcgtccgagagctgcgccaacacccacgccgcagggccgcctccctacgcggacacgcggttgatgccgccggccccgccggccccttcgctggatgcgcacttcatggcgcccgacatcccgctgctgtttgcacccgacgccgcagcatcagacccgcagcacctctgcgcgccaaggggtctctacggccagttcccgcaggtggacgccgcggcgatcggtccagtgatgtcgacgaacatgaacagcgctgccaccaacggtggtgccgtgttctccccgtcgatggtggagaccgtaagaatgtttccgggctataattaggcaggatttttttttctttaaaaaatctactccgtgcatgaatcaggcctcaggcgatgatgcagcgatgcaggagccgttgttatgcgatgcgtgtgcaataaccggaggttcatttttgcttgatcttttttttcttgttatggttgataccgtgaatgtgtagcagtagagaaatcaaagagaggaagatgatagatgagtcatgctgctccttgcgacatctcaatacatgttgcgatggaagtgaacctctagccgagttatatacatgtcctactactagttc

SEQ ID NO: 35167 - protein, 282 aa, Zea mays subsp. mays
  misc_feature (24)..(24): Xaa can be any naturally occurring amino acid
PGSHCQPPTGQLPMSPTPASSPRXPVPAPALAWHGMPRSRSTGTPTVYTRPPRPLSYSLSSINSSMSSSSNAVIPSSGHHRPAPALQPPARRQMQQPPQQQKHQPVIIYTHSPKVIRTNPRDFMSIVQKLTGLDGPGHHARGAAGAAPAPPAGRINSGSVVVPSPQDESSSSSSSSESCANTHAAGPPPYADTRLMPPAPPAPSLDAHFMAPDIPLLFAPDAAASDPQHLCAPRGLYGQFPQVDAAAIGPVMSTNMNSAATNGGAVFSPSMVETVRMFPGYN

SEQ ID NO: 35168 - protein, 269 aa, Zea mays subsp. mays
  misc_feature (11)..(11): Xaa can be any naturally occurring amino acid
MSPTPASSPRXPVPAPALAWHGMPRSRSTGTPTVYTRPPRPLSYSLSSINSSMSSSSNAVIPSSGHHRPAPALQPPARRQMQQPPQQQKHQPVIIYTHSPKVIRTNPRDFMSIVQKLTGLDGPGHHARGAAGAAPAPPAGRINSGSVVVPSPQDESSSSSSSSESCANTHAAGPPPYADTRLMPPAPPAPSLDAHFMAPDIPLLFAPDAAASDPQHLCAPRGLYGQFPQVDAAAIGPVMSTNMNSAATNGGAVFSPSMVETVRMFPGYN

SEQ ID NO: 35169 - protein, 247 aa, Zea mays subsp. mays
MPRSRSTGTPTVYTRPPRPLSYSLSSINSSMSSSSNAVIPSSGHHRPAPALQPPARRQMQQPPQQQKHQPVIIYTHSPKVIRTNPRDFMSIVQKLTGLDGPGHHARGAAGAAPAPPAGRINSGSVVVPSPQDESSSSSSSSESCANTHAAGPPPYADTRLMPPAPPAPSLDAHFMAPDIPLLFAPDAAASDPQHLCAPRGLYGQFPQVDAAAIGPVMSTNMNSAATNGGAVFSPSMVETVRMFPGYN

SEQ ID NO: 35170 - DNA, 1589 bp, Zea mays subsp. mays
cactttagggcacctccctcacccgaagagctgatgctgccagctccaccgctcgccgccgccgcccgccgcgccgccacagctgccgcatgtggcgccgcccaccggctcctccttccagtttgctttctatcctccaacccctctgccccgagcactctcgtaccgcgccgccgcttcggccacatgtcgcaggagtgcatggccccgcgcgctccccgaccgccggtcggacggaactttgcggtggctgtgggggatgggatcctgtatggagaggccccggagctggtggtggtgtcgttctaccggttcgctgatttccccgaccatgctgcattccggcggccgcttaaggagctttgcgagtagctgcgtgtttcaggtggcattatccttgcacctgagggaatcaatggtagtatatgtggaaccccagttgctgtggacaaaatcttaaactttattcaagaagacgatcgtttaaaaggattgagaatgatccagtcacctgttactccagaggatgaggccatacatcatggacataccagtcactcccctgttggtgctggggaagatgcaccattccgatgggatcatgtccgtgtcaaattgaaaaaggagatagtgacgtttggagacccaggtgttatgccaactaaaatcgttgggaaatatgttaagccaaaagactggaatgacttgataagtgatccagacactgtcgtcattgatgtgcgtaacatgtatgagatacgcataggaaagtttaagaaagctgtcgatccacgtacaaactcattcagagagtttcctacttgggttgacgatcaatttcaattggttcaatcaggcaccctagggtcagggggagatgataatggaaccggtgaaccagcagcagaccttaatgccagcaaatccaaacagctaccaagagttgctatgtactgcactggtggtatccgatgtgagaaggcatcaagctttctcctcggcaagggctttaaagaggtttatcatttggaaggcgggatattgaagtatctggaggaaatcccaaaggccgaaagtttgtgggagggtgaatgctttgtgtttgacaagcgtgtctcggtggggcatggattggcccaaggcacccacaaactttgctacggatgtaagcagccagtcagcgatgaggacatggtgtcgcctcaatgggagtacggcgtctcttgcccgcattgcttcgcaacgaaatccgaggaggagaaggaacgggctagggctcggcagcggcagttcgagacctttggagtgataggtgggcctcatatgggcaggagtccgagagggtctgccgctaacaatgcagtggagttcatacagttgcccaagtcagtgtaacttaaattgtccatctgaaacttttagattgaagtgttttgacaagtgagggaatcaaccagattggcaatgattgccatattatgatcttttcctatgcttaagtttttgtcggaaaaagtggtgtcggtaccatttgttttagattgtaacatcgctaagacgctaactaccggagatgctaaagaatttcc

SEQ ID NO: 35171 - protein, 298 aa, Zea mays subsp. mays
MIQSPVTPEDEAIHHGHTSHSPVGAGEDAPFRWDHVRVKLKKEIVTFGDPGVMPTKIVGKYVKPKDWNDLISDPDTVVIDVRNMYEIRIGKFKKAVDPRTNSFREFPTWVDDQFQLVQSGTLGSGGDDNGTGEPAADLNASKSKQLPRVAMYCTGGIRCEKASSFLLGKGFKEVYHLEGGILKYLEEIPKAESLWEGECFVFDKRVSVGHGLAQGTHKLCYGCKQPVSDEDMVSPQWEYGVSCPHCFATKSEEEKERARARQRQFETFGVIGGPHMGRSPRGSAANNAVEFIQLPKSV

SEQ ID NO: 35172 - protein, 246 aa, Zea mays subsp. mays
MPTKIVGKYVKPKDWNDLISDPDTVVIDVRNMYEIRIGKFKKAVDPRTNSFREFPTWVDDQFQLVQSGTLGSGGDDNGTGEPAADLNASKSKQLPRVAMYCTGGIRCEKASSFLLGKGFKEVYHLEGGILKYLEEIPKAESLWEGECFVFDKRVSVGHGLAQGTHKLCYGCKQPVSDEDMVSPQWEYGVSCPHCFATKSEEEKERARARQRQFETFGVIGGPHMGRSPRGSAANNAVEFIQLPKSV

SEQ ID NO: 35173 - protein, 215 aa, Zea mays subsp. mays
MYEIRIGKFKKAVDPRTNSFREFPTWVDDQFQLVQSGTLGSGGDDNGTGEPAADLNASKSKQLPRVAMYCTGGIRCEKASSFLLGKGFKEVYHLEGGILKYLEEIPKAESLWEGECFVFDKRVSVGHGLAQGTHKLCYGCKQPVSDEDMVSPQWEYGVSCPHCFATKSEEEKERARARQRQFETFGVIGGPHMGRSPRGSAANNAVEFIQLPKSV

SEQ ID NO: 35174 - DNA, 864 bp, Zea mays subsp. mays
agtggtgcccacagctaaagccttgtgcaaaattatcattaagctgtcatcaatcatcatggctgccattacggcaggtctgctggtactcctcgctgctgccgtcgccgctccggcgcacgccacggactacacggtcggcgactcgtccgggtggagcagcggcgtggactacgccacctgggcgagcggcaagaccttcgctgctggggacaacctagtgttccagtacagcgcgatgcacacggtggcggaggtgagctccgcggactacagcgcctgctcggccagcaactccatccagtcctacagcgaccagaacaccaaggtcgcgcttacggcgcccggcacgcgctacttcatctgcggcgccccgggtcactgcggcaacggcatgaagctcaccgtcacggtcgccgccgcggccgccaccaccaccccggagacgtccacgtctacgcccgccgcaacgacgacgcccaccacgaccaacgctgacacgcccaacgctgacacgcctccggagacgtccacgtctacgcccgccgcaacgacgccgcccaccacgaccaagtccacgtccacctcgagcactagcagcactggtgctgcctgcggtggggaggcccggctcggtatgggcattttggccgcggccgcgggcctcgccgggctcgccctgatgggctaggctaggcaagaggcagtgctgtttcggttttccttatgtcccctgcttttcctgttggttgcagccctgtagcccattgtgtttactgtctacgcaccctcctccattcacgtttatgctcacgatggcttgttcgaggctcctgctgaatacatgtacgatcattcttactg

SEQ ID NO: 35175 - protein, 229 aa, Zea mays subsp. mays
VVPTAKALCKIIIKLSSIIMAAITAGLLVLLAAAVAAPAHATDYTVGDSSGWSSGVDYATWASGKTFAAGDNLVFQYSAMHTVAEVSSADYSACSASNSIQSYSDQNTKVALTAPGTRYFICGAPGHCGNGMKLTVTVAAAAATTTPETSTSTPAATTTPTTTNADTPNADTPPETSTSTPAATTPPTTTKSTSTSSTSSTGAACGGEARLGMGILAAAAGLAGLALMG

SEQ ID NO: 35176 - protein, 210 aa, Zea mays subsp. mays
MAAITAGLLVLLAAAVAAPAHATDYTVGDSSGWSSGVDYATWASGKTFAAGDNLVFQYSAMHTVAEVSSADYSACSASNSIQSYSDQNTKVALTAPGTRYFICGAPGHCGNGMKLTVTVAAAAATTTPETSTSTPAATTTPTTTNADTPNADTPPETSTSTPAATTPPTTTKSTSTSSTSSTGAACGGEARLGMGILAAAAGLAGLALMG

SEQ ID NO: 35177 - protein, 150 aa, Zea mays subsp. mays
MHTVAEVSSADYSACSASNSIQSYSDQNTKVALTAPGTRYFICGAPGHCGNGMKLTVTVAAAAATTTPETSTSTPAATTTPTTTNADTPNADTPPETSTSTPAATTPPTTTKSTSTSSTSSTGAACGGEARLGMGILAAAAGLAGLALMG

SEQ ID NO: 35178 - DNA, 909 bp, Zea mays subsp. mays
atccatccaactcttcataacaggcgacctgagagcagagcagacagagagcgttctggcagccgttgcggagcttgaacctctgcaaccaccaacagctaaactaaaagcagcggcggacggcgcgcggtactggacgaccggccgacgatggctacgccggcgcagcagcagggtgaccagcaccagccgaggctgcagaaggtgatggtggctgtagacgagagcgagtgcagccggcacgcgctggagtgggcgctgcggaacctggcgcccacgctggccccaccgctactggtgctcaccgtgcagccgcacttcccgctcggatacgtctccgccgcgtccttcggcgcacccctgggcaccgtccctccggtggctccggagctcatcaggtcgatgcaggagcagcagagggagctcacgcaggagctcctcgacaaggccagggccatctgcgccgagcacggggttgctgtagaggcaattgtcgaggtcggagatgcaaaggaggtgatatgtgaagtggctgagaagaaaaatgtcgatctgctggttcttggaagccacagtcgtgggccaatacagaggttgttccttgggagcgtcagtaactactgtgtacatcattctaagtgtccagttcttgtggtgaagaaccaaggctgatgaaggattcaactcccagctgctagtcctaatcatgttcgggtatttgtcaacgtatttgtaatgtgtagtacttgctttagccaaacgcattggccaataaagtagcttgctttgcttcttggaagggccgaggctggactggaggagagttctttttctttttcttttttctggtcagtgtgcctttgctccggaatggcagagttgtaaataagaactacgaactttgtgcgc

SEQ ID NO: 35179 - protein, 173 aa, Zea mays subsp. mays
MATPAQQQGDQHQPRLQKVMVAVDESECSRHALEWALRNLAPTLAPPLLVLTVQPHFPLGYVSAASFGAPLGTVPPVAPELIRSMQEQQRELTQELLDKARAICAEHGVAVEAIVEVGDAKEVICEVAEKKNVDLLVLGSHSRGPIQRLFLGSVSNYCVHHSKCPVLVVKNQG

SEQ ID NO: 35180 - protein, 154 aa, Zea mays subsp. mays
MVAVDESECSRHALEWALRNLAPTLAPPLLVLTVQPHFPLGYVSAASFGAPLGTVPPVAPELIRSMQEQQRELTQELLDKARAICAEHGVAVEAIVEVGDAKEVICEVAEKKNVDLLVLGSHSRGPIQRLFLGSVSNYCVHHSKCPVLVVKNQG

SEQ ID NO: 35181 - protein, 89 aa, Zea mays subsp. mays
MQEQQRELTQELLDKARAICAEHGVAVEAIVEVGDAKEVICEVAEKKNVDLLVLGSHSRGPIQRLFLGSVSNYCVHHSKCPVLVVKNQG

SEQ ID NO: 35182 - DNA, 1837 bp, Zea mays subsp. mays
acagaaaaaacgcaggcgtcgaaacacattttcttgctccagagaatttaaaccgctgcgaattcaattcgaaagccccaagagagcatccatggcttccgctaccacctccatctcgtcgcaccccgccgccctccgcgacgtcaaagctgcgaggattggcgggctgaggcagcagcaggcgagcgtggccccgtcggcggcggcagcgcgtggccagcgcgctcgggcggtgcgatcgctgcgcgcggcggagcctgcgaggcagccggtggcggcttccgcggccgcggcggcgccggccgcgcccgtggccgacgaggcggcggcccttgcggccgtggactacgaggccctggcgcgtgagctggagggcgcgtcgccgctggagatcatggatcgggcgctggccatgttcggctccgaaatcgccatcgccttcagcggcgcggaggacgtggcgctgatcgagtacgccaagctgacggggcgtccgttccgggtgttcagcctggacacggggcgtctgaacccggagacgtaccagctattcgacaaggtggagaagcactacggcatccgcatcgagtacatgttcccggacgcgagcgaggtgcaggagctggtgcgcaccaagggcctcttctccttctacgaggacggccaccaggagtgctgccgggtgcgcaaggtgcggcccctgcgcagggcgctcaaggggctcagggcgtggatcaccggccagaggaaggaccagtcccccggcaccagggccagcatcccccttgtccaggttgatccttccttcgaaggcctggatggcggggctggtagcttggtcaagtggaaccccgtggccaacgtcgacggcaaggacatctggactttcctgcggaccatggacgtacctgtcaacaccctgcatgctcagggctacgtgtccatcgggtgcgagccgtgcaccaggcccgtcctgccggggcagcacgagcgtgaaggccggtggtggtgggaggacgccaaggccaaggagtgcggcctccacaagggcaacatcgacaaggacgcccaggcggcggcccccaggtccgccaacggcaacggctcggcgggcgccccggacatcttcgagagccccgccgtggtgtccctcacccgcaccgggatcgagaacctgctgcgcctggagaaccgcgccgagccgtggctcgtggtgctgtacgcgccctggtgcccgttctgccaggccatggaggcctcctacgtggagctggccgagaagctggcggggtccggggtgaaggtggccaagttccgcgcggacggcgagcagaagccgttcgcgcaggccgagctgcagctgcagagctttcccaccgtgctcctgttccccgggccgcaccgccaggcccatcaagtacccgtcggagaagagggacgtcgactcgctcctcgccttcgtcaacagcctccggtgagagacgacctccagtgagcgagaaccatcgttctctgtcagtctgtatgatcttatgttggtctttatgagtttatctaggttcgtagagaagggaggtggaggggactgggtttggtagtgacacaggaaggaacgagggttcaggggggaaaaatcaggtgtagcttttgtaactgcaaaatgattgcagcatgtatacctgaagtctgagcttctgaggccctgtgcttggtagctgagggagaggttacttgtgtgtgcttatagtcagtggcgagtgcctactataaggttcaccggtcatctaaagcactgttgtaaactgtattatttggagagtggagttttaatataggc

SEQ ID NO: 35183 - protein, 497 aa, Zea mays subsp. mays
QKKRRRRNTFSCSREFKPLRIQFESPKRASMASATTSISSHPAALRDVKAARIGGLRQQQASVAPSAAAARGQRARAVRSLRAAEPARQPVAASAAAAAPAAPVADEAAALAAVDYEALARELEGASPLEIMDRALAMFGSEIAIAFSGAEDVALIEYAKLTGRPFRVFSLDTGRLNPETYQLFDKVEKHYGIRIEYMFPDASEVQELVRTKGLFSFYEDGHQECCRVRKVRPLRRALKGLRAWITGQRKDQSPGTRASIPLVQVDPSFEGLDGGAGSLVKWNPVANVDGKDIWTFLRTMDVPVNTLHAQGYVSIGCEPCTRPVLPGQHEREGRWWWEDAKAKECGLHKGNIDKDAQAAAPRSANGNGSAGAPDIFESPAVVSLTRTGIENLLRLENRAEPWLVVLYAPWCPFCQAMEASYVELAEKLAGSGVKVAKFRADGEQKPFAQAELQLQSFPTVLLFPGPHRQAHQVPVGEEGRRLAPRLRQQPPVRDDLQ

SEQ ID NO: 35184 - protein, 467 aa, Zea mays subsp. mays
MASATTSISSHPAALRDVKAARIGGLRQQQASVAPSAAAARGQRARAVRSLRAAEPARQPVAASAAAAAPAAPVADEAAALAAVDYEALARELEGASPLEIMDRALAMFGSEIAIAFSGAEDVALIEYAKLTGRPFRVFSLDTGRLNPETYQLFDKVEKHYGIRIEYMFPDASEVQELVRTKGLFSFYEDGHQECCRVRKVRPLRRALKGLRAWITGQRKDQSPGTRASIPLVQVDPSFEGLDGGAGSLVKWNPVANVDGKDIWTFLRTMDVPVNTLHAQGYVSIGCEPCTRPVLPGQHEREGRWWWEDAKAKECGLHKGNIDKDAQAAAPRSANGNGSAGAPDIFESPAVVSLTRTGIENLLRLENRAEPWLVVLYAPWCPFCQAMEASYVELAEKLAGSGVKVAKFRADGEQKPFAQAELQLQSFPTVLLFPGPHRQAHQVPVGEEGRRLAPRLRQQPPVRDDLQ

SEQ ID NO: 35185 - protein, 366 aa, Zea mays subsp. mays
MDRALAMFGSEIAIAFSGAEDVALIEYAKLTGRPFRVFSLDTGRLNPETYQLFDKVEKHYGIRIEYMFPDASEVQELVRTKGLFSFYEDGHQECCRVRKVRPLRRALKGLRAWITGQRKDQSPGTRASIPLVQVDPSFEGLDGGAGSLVKWNPVANVDGKDIWTFLRTMDVPVNTLHAQGYVSIGCEPCTRPVLPGQHEREGRWWWEDAKAKECGLHKGNIDKDAQAAAPRSANGNGSAGAPDIFESPAVVSLTRTGIENLLRLENRAEPWLVVLYAPWCPFCQAMEASYVELAEKLAGSGVKVAKFRADGEQKPFAQAELQLQSFPTVLLFPGPHRQAHQVPVGEEGRRLAPRLRQQPPVRDDLQ

SEQ ID NO: 35186 - DNA, 956 bp, Zea mays subsp. mays
atagtactaaaatctccgcgggcaccatggagccgttctttgacgataccattgtcaacgacgacctcctgcgctgcctttctcagaggtcggggaagcgactgcagaccgagaaggtcgaggccatggcgcgcgccgcaatcgaccgctccgcgggcaccatggaggcgttctttgccgatatcttcgtcaacgacgacctcctgcgctacctttctcagagggccccctcattgaagtgcctccatctctccgcctgcaatttcaccgatcaatgttttgcggaggcgattaattgcttccctcagctggaggagctagatgttacattatgcttattgtatggcagcgcgtgtgaggctgttgggagagcctgcccacagcttaaacgcttcaggctgaatgagctctggtctatttcacgaaaggaggatattggcacagaagcattagggatcgctagcaccatgccaagactccaagaacttgagttgattggtaacaatctgacaaatgatgggctcatgtcaatccttgaccgttgccctcgcctcgaatcccttgacattcgcgagtgcttcaacatacaaatggacgatgcgcttaaactgaagtgttccaggatacgagatctaaggcttcctcatgaccccgtcttcttcgacgacaccaggtattggccttattacatcaacagtggcgtatttgactcagacattgattccgaggtcggcacatatgatgatccgctggatgatatgggtgagtcgatgtcaatcatgttcaatgatgacttttatgtctgaagcaagacaacgtgttggatgatatgtagtgttgtgggatgatggaatggttccctttttgtgtctgaggtttgggatgctacaagcactttctatatgggaggctgcttttttatgtagtagcaagcgcaagtttgtctttgctccttt

SEQ ID NO: 35187 - protein, 267 aa, Zea mays subsp. mays
STKISAGTMEPFFDDTIVNDDLLRCLSQRSGKRLQTEKVEAMARAAIDRSAGTMEAFFADIFVNDDLLRYLSQRAPSLKCLHLSACNFTDQCFAEAINCFPQLEELDVTLCLLYGSACEAVGRACPQLKRFRLNELWSISRKEDIGTEALGIASTMPRLQELELIGNNLTNDGLMSILDRCPRLESLDIRECFNIQMDDALKLKCSRIRDLRLPHDPVFFDDTRYWPYYINSGVFDSDIDSEVGTYDDPLDDMGESMSIMFNDDFYV

SEQ ID NO: 35188 - protein, 259 aa, Zea mays subsp. mays
MEPFFDDTIVNDDLLRCLSQRSGKRLQTEKVEAMARAAIDRSAGTMEAFFADIFVNDDLLRYLSQRAPSLKCLHLSACNFTDQCFAEAINCFPQLEELDVTLCLLYGSACEAVGRACPQLKRFRLNELWSISRKEDIGTEALGIASTMPRLQELELIGNNLTNDGLMSILDRCPRLESLDIRECFNIQMDDALKLKCSRIRDLRLPHDPVFFDDTRYWPYYINSGVFDSDIDSEVGTYDDPLDDMGESMSIMFNDDFYV

SEQ ID NO: 35189 - protein, 226 aa, Zea mays subsp. mays
MARAAIDRSAGTMEAFFADIFVNDDLLRYLSQRAPSLKCLHLSACNFTDQCFAEAINCFPQLEELDVTLCLLYGSACEAVGRACPQLKRFRLNELWSISRKEDIGTEALGIASTMPRLQELELIGNNLTNDGLMSILDRCPRLESLDIRECFNIQMDDALKLKCSRIRDLRLPHDPVFFDDTRYWPYYINSGVFDSDIDSEVGTYDDPLDDMGESMSIMFNDDFYV

SEQ ID NO: 35190 - DNA, 1339 bp, Zea mays subsp. mays
gtgagctgggtgtgggtggggagtttgtcagctgggtggcgcgagcgtcaggcgatggcggaggcggaggagaaggcgagggtcgtggtggttggcggcggcgtcgccggctccctcctcgccaagactatgcagagccacgccgacgtcgtcctcctcgacccgaaagactacctggagatcccctgggctgagctgcgctccatggtcgaaccgtcctttgctgagagatcgttgatctaccacaaagattacctcagcgatgcgaccatcgtgacatcttctgcggtcaatatcactgaacacgcggtccttactgctgacggccactctcttccatatgattatctcatcatagcgactggccatgctttggcttctcctgccagcagagctgagaggataaaagaattccagagagataatgggaagatagagtcgtcagaatctgtgctgataattgggggtggtccaactggtgttgaactggctggagagattgtggtagactacccggggaagagggtgacccttatccatagaggaccgcgtttactcgaattcattggagataaggcttcaaagaagtgccttgattggctgacttcaaagaaagtagacgtgctccttcagcaatcagttgagttgggctcattatcagacacagagaaggtgtacaagacatcaggcggagaaacagtaacagctgattgccactttgtatgcattggaaagccactgagttcgtcgtggctacatgataccatcctaaaggaatccttggatagcaaggggagagtaatggtggaaaaggatttaagagtgaaaggttttaataacatttttgcgattggtgacatcacagatattcctgaaatcaaacaagggtacctcgcccagaagcacgcgctgctagtggcgaagaacctgaagctactgaccaagggtctccctaacagcaaactggcgacttacagcaccggctatccgctggcgctcgtctctcttggaaggaaggaagggctggctcagtttccattgctgacgctcagcgggtgcttgccaggcatgatcaaatccggggatctattcgtcagcaagacgaggaagcagatgggcctgaatggttgactccagtccgcggaagcttgaaaaaatagctcgggtcctgggttatatacagacgatggattcctttacacagagcttgtgttttgctcgtatggccatatgtgttcgttctgtatctgtgtgatggtgtcgtcgtacgtgtggatgcttggaatggtgactagcagagtgtatgctacatacatgtatacatggacctttttggtcc

SEQ ID NO: 35191 - protein, 376 aa, Zea mays subsp. mays
VSWVWVGSLSAGWRERQAMAEAEEKARVVVVGGGVAGSLLAKTMQSHADVVLLDPKDYLEIPWAELRSMVEPSFAERSLIYHKDYLSDATIVTSSAVNITEHAVLTADGHSLPYDYLIIATGHALASPASRAERIKEFQRDNGKIESSESVLIIGGGPTGVELAGEIVVDYPGKRVTLIHRGPRLLEFIGDKASKKCLDWLTSKKVDVLLQQSVELGSLSDTEKVYKTSGGETVTADCHFVCIGKPLSSSWLHDTILKESLDSKGRVMVEKDLRVKGFNNIFAIGDITDIPEIKQGYLAQKHALLVAKNLKLLTKGLPNSKLATYSTGYPLALVSLGRKEGLAQFPLLTLSGCLPGMIKSGDLFVSKTRKQMGLNG

SEQ ID NO: 35192 - protein, 358 aa, Zea mays subsp. mays
MAEAEEKARVVVVGGGVAGSLLAKTMQSHADVVLLDPKDYLEIPWAELRSMVEPSFAERSLIYHKDYLSDATIVTSSAVNITEHAVLTADGHSLPYDYLIIATGHALASPASRAERIKEFQRDNGKIESSESVLIIGGGPTGVELAGEIVVDYPGKRVTLIHRGPRLLEFIGDKASKKCLDWLTSKKVDVLLQQSVELGSLSDTEKVYKTSGGETVTADCHFVCIGKPLSSSWLHDTILKESLDSKGRVMVEKDLRVKGFNNIFAIGDITDIPEIKQGYLAQKHALLVAKNLKLLTKGLPNSKLATYSTGYPLALVSLGRKEGLAQFPLLTLSGCLPGMIKSGDLFVSKTRKQMGLNG

SEQ ID NO: 35193 - protein, 333 aa, Zea mays subsp. mays
MQSHADVVLLDPKDYLEIPWAELRSMVEPSFAERSLIYHKDYLSDATIVTSSAVNITEHAVLTADGHSLPYDYLIIATGHALASPASRAERIKEFQRDNGKIESSESVLIIGGGPTGVELAGEIVVDYPGKRVTLIHRGPRLLEFIGDKASKKCLDWLTSKKVDVLLQQSVELGSLSDTEKVYKTSGGETVTADCHFVCIGKPLSSSWLHDTILKESLDSKGRVMVEKDLRVKGFNNIFAIGDITDIPEIKQGYLAQKHALLVAKNLKLLTKGLPNSKLATYSTGYPLALVSLGRKEGLAQFPLLTLSGCLPGMIKSGDLFVSKTRKQMGLNG

SEQ ID NO: 35194 - DNA, 688 bp, Zea mays subsp. mays
aacctcatctctcattcttcaattcgtcacttagcttcactcggcaaagaaaagaggcaacgacgatggctgctgcggcggcgatgatggtctccggaggacgggcggcgctggtggtggcgggcgtgctctgcgcggtggcggccatggcggcggcgcagcaggcgtcgaacgtgcgggcgacgtaccacctgtacaacccggcgcagaacgggtgggacctgaaccgcgtgagcgcgtactgcgccacgtgggacgccgacaagccgctgtcgtggcggcagaagcacggctggacggccttctgcgggcccgccgggcagaagggccaggccgcctgcggcaagtgcataagggtgaagaaccgtgcgacggggcgcgtccatcgtggcgaggatcgtggaccagtgcagcaacggcggcctggacctggactacgagacggtgttcaagaagatcgacaccaacggccaggtctaccagatgggccacctcaacgtcaactaccagttcgtcgcctgctgagcaggagagctcagtcagatccttcctgtgtatgtatgcatccatgcatgcaggcaggcagatgcagagaccgacgtcgttgtaaaacgcgtggccttacttgagatgaataaaacgcaacatgtagcgtcttgcaactgtcgcaagcacagctactactgct

SEQ ID NO: 35195 - protein, 208 aa, Zea mays subsp. mays
PHLSFFNSSLSFTRQRKEATTMAAAAAMMVSGGRAALVVAGVLCAVAAMAAAQQASNVRATYHLYNPAQNGWDLNRVSAYCATWDADKPLSWRQKHGWTAFCGPAGQKGQAACGKCIRVKNRATGRVHRGEDRGPVQQRRPGPGLRDGVQEDRHQRPGLPDGPPQRQLPVRRLLSRRAQSDPSCVCMHPCMQAGRCRDRRRCKTRGLT

SEQ ID NO: 35196 - protein, 187 aa, Zea mays subsp. mays
MAAAAAMMVSGGRAALVVAGVLCAVAAMAAAQQASNVRATYHLYNPAQNGWDLNRVSAYCATWDADKPLSWRQKHGWTAFCGPAGQKGQAACGKCIRVKNRATGRVHRGEDRGPVQQRRPGPGLRDGVQEDRHQRPGLPDGPPQRQLPVRRLLSRRAQSDPSCVCMHPCMQAGRCRDRRRCKTRGLT

SEQ ID NO: 35197 - protein, 181 aa, Zea mays subsp. mays
MMVSGGRAALVVAGVLCAVAAMAAAQQASNVRATYHLYNPAQNGWDLNRVSAYCATWDADKPLSWRQKHGWTAFCGPAGQKGQAACGKCIRVKNRATGRVHRGEDRGPVQQRRPGPGLRDGVQEDRHQRPGLPDGPPQRQLPVRRLLSRRAQSDPSCVCMHPCMQAGRCRDRRRCKTRGLT

SEQ ID NO: 35198 - DNA, 972 bp, Zea mays subsp. mays
tccgtcctgctccttgcgtcgcgtcggcgcgcgctgcgtgtatatatatagacccgcaaatagtcccggctcagcccaacccaacccaacgacgcagctagcgcgcatctccgatctgcactgcaccttcgtctccgaagaacgtcgatcgtactcgtacaccatgaaggcagtcgtcgcggcgacgatgcttctgctggtgctggtggccgcggcgacggtggcgagcgcagaccaccgtgatgacgacggccaccaccaccagcgccaccgcggccagagctggcaccgccacagcggcggcggccgagatggccgccggtcgacccctctggcggggctgacgcagtgcgtgacaagctgcgggtctggggtcacctcctgcatgctggactgctaccagccgctggtcgacctggaccccgtggagctgcccgtctgcctcctcaagtgcaccaacgacgccatggtctgcgccaccggctgccccgtcaccgggaacgtctagctagcttgctatagctagcccatcattatatatatatctgtagtcatcttaattattaaccccgcatttatttatttaactagccaccgaaccaatccaacgtgttactcctatataataaggatatgcatgatgactaaaggatgttgttgtaatacgtagtatgtaagtcgcgtgtccacattgctactacaccatgacaccaccatcatcataaatatactgttatttacaggccttgcctactagagcccatatgttacacacatgtttctgaatattcttacactcattgatctcactcgcacccgactgtgactctaggtaggcagctcttcagaacatcgaggtgaaacatcagtggtatgtctagtagattagccttgttctctttcggggaaaaaaaagaacagctgcatcccaattgtacaaaaaaaaatgaacacctgtgaggcttacccttt

SEQ ID NO: 35199 - protein, 168 aa, Zea mays subsp. mays
PSCSLRRVGARCVYIYRPANSPGSAQPNPTTQLARISDLHCTFVSEERRSYSYTMKAVVAATMLLLVLVAAATVASADHRDDDGHHHQRHRGQSWHRHSGGGRDGRRSTPLAGLTQCVTSCGSGVTSCMLDCYQPLVDLDPVELPVCLLKCTNDAMVCATGCPVTGNV

SEQ ID NO: 35200 - protein, 114 aa, Zea mays subsp. mays
MKAVVAATMLLLVLVAAATVASADHRDDDGHHHQRHRGQSWHRHSGGGRDGRRSTPLAGLTQCVTSCGSGVTSCMLDCYQPLVDLDPVELPVCLLKCTNDAMVCATGCPVTGNV

SEQ ID NO: 35201 - protein, 106 aa, Zea mays subsp. mays
MLLLVLVAAATVASADHRDDDGHHHQRHRGQSWHRHSGGGRDGRRSTPLAGLTQCVTSCGSGVTSCMLDCYQPLVDLDPVELPVCLLKCTNDAMVCATGCPVTGNV

SEQ ID NO: 35202 - DNA, 580 bp, Zea mays subsp. mays
gaccgagcggaccacaccaatcccacacccccacccccacccccacccaatcggaagaccgtgcggccgccggccgcgatcggagaagatggtgcgcaaggcaaaggttgagttcgatgagcagccaccggataacttcgacccgaagaacccatatgcgggacccggtggctatgctggagtaccgggaacacctggtgcgggagaagtggatccagatcgagaccgccaagatcatccgggagcgcctccgctggtgctaccgcatcgaggggatcaaccaccaccagaagtgccgccacctcgtggaccagtacctagaggctacacgcggcgtgggttggggcaaagatgcccgaccgcccgagttacacgagcccaagaagatcatcgaggcggagtagctgctgcctcggcttctcgtgctgctgttcctggattggaggggtgaggcctgaaactaagcacattctttcctttctatgtatgttgtgtggtaatcagtctgagtggtggaaaccgaaatgcattagaacaactccaatcatgagttctataattgggccttatattttgattt

SEQ ID NO: 35203 - protein, 149 aa, Zea mays subsp. mays
TERTTPIPHPHPHPHPIGRPCGRRPRSEKMVRKAKVEFDEQPPDNFDPKNPYAGPGGYAGVPGTPGAGEVDPDRDRQDHPGAPPLVLPHRGDQPPPEVPPPRGPVPRGYTRRGLGQRCPTARVTRAQEDHRGGVAAASASRAAVPGLEG

SEQ ID NO: 35204 - protein, 133 aa, Zea mays subsp. mays
PSGPHQSHTPTPTPTQSEDRAAAGRDRRRWCARQRLSSMSSHRITSTRRTHMRDPVAMLEYREHLVREKWIQIETAKIIRERLRWCYRIEGINHHQKCRHLVDQYLEATRGVGWGKDARPPELHEPKKIIEAE

SEQ ID NO: 35205 - protein, 120 aa, Zea mays subsp. mays
MVRKAKVEFDEQPPDNFDPKNPYAGPGGYAGVPGTPGAGEVDPDRDRQDHPGAPPLVLPHRGDQPPPEVPPPRGPVPRGYTRRGLGQRCPTARVTRAQEDHRGGVAAASASRAAVPGLEG

SEQ ID NO: 35206 - protein, 95 aa, Zea mays subsp. mays
MSSHRITSTRRTHMRDPVAMLEYREHLVREKWIQIETAKIIRERLRWCYRIEGINHHQKCRHLVDQYLEATRGVGWGKDARPPELHEPKKIIEAE

SEQ ID NO: 35207 - DNA, 1389 bp, Zea mays subsp. mays
atatatccacgccaaggtccggcaccttttctcctcgcgccagagccacgcacgctagtgtcagtggcacgcaggcagccgcgcgcaccgaggggagaccagagctagcggcgaggccaagggcaagggcaagggcgcggacggcaatggcgagagctggaggcggcggtccgttcttcccggtccgcggcgcggcgctggtggtcgtgctgctaggcatcgtcgcgggcgcggcgagggcgcagctgcggctgaactactacggcagctcgtgccccagcgcggagtccacggtgcgctccgtcatctcgcagcgcctccagcagagcttcgccgtggggcccggcacgctccgcctcttcttccacgactgcttcgtcaggggatgcgacgcgtcggtgatgctgatggcgccgaacggggacgacgagagccacagcggcgcggacgccacgctgtcgtccggacgccgtggacgccatcaacaaggcgaaggcggccgtggaggcgctccccgggtgcgccggcaaggtctcgtgcgcggacatcctcgccatggccgcacgtgacgtcgtctccctgctgggcgggccgagctacggcgtggagctggggcggctggacggcaagacgttcaacagggccatcgtgaagcacgtcctcccgggccccggcttcaacctggaccagctcaacgccctcttcgcgcagaacggcctcacgcagacggacatgatcgcgctctcaggcgcgcacacgatcggggtgacgcactgcgacaagttcgtgcggcggatctacacgttcaagcagcggctggcgtggaacccgccgatgaacctggacttcctgcgctcgctgcggcgggtgtgccccctcagctacagccccacggcgttcgccatgctggacgtcaccacgcccagggtcttcgacaacgcctacttcaacaacctccgctacaacaagggcctgctcgcctccgaccaggtgctcttcaccgaccgccgctcccgacccaccgtcaacctcttcgccgccaacgccaccgccttccacgaggcattcgtcgccgccatggccaagctcggcaggatcggcctcaagaccggcgccgacggcgagatacgccgcgtctgcaccgccgtcaactaagcctgcattggctgcttgctgcttgcgtgcgtgggtttcacttcttctttctcttgtttatatacgtacgtttgtcggatggattttgttggtagccatgagatgacatccttgctctgagctagcggacctgccccgactggatgatagagattgatccagatgttcttctagtagattctaattctttatggatgtttcccattgacacgcggttacgcgctcttcaaccgc

SEQ ID NO: 35208 - protein, 199 aa, Zea mays subsp. mays
MAARDVVSLLGGPSYGVELGRLDGKTFNRAIVKHVLPGPGFNLDQLNALFAQNGLTQTDMIALSGAHTIGVTHCDKFVRRIYTFKQRLAWNPPMNLDFLRSLRRVCPLSYSPTAFAMLDVTTPRVFDNAYFNNLRYNKGLLASDQVLFTDRRSRPTVNLFAANATAFHEAFVAAMAKLGRIGLKTGADGEIRRVCTAVN

SEQ ID NO: 35209 - protein, 188 aa, Zea mays subsp. mays
ISTPRSGTFSPRARATHASVSGTQAAARTEGRPELAARPRARARARTAMARAGGGGPFFPVRGAALVVVLLGIVAGAARAQLRLNYYGSSCPSAESTVRSVISQRLQQSFAVGPGTLRLFFHDCFVRGCDASVMLMAPNGDDESHSGADATLSSGRRGRHQQGEGGRGGAPRVRRQGLVRGHPRHGRT

SEQ ID NO: 35210 - protein, 140 aa, Zea mays subsp. mays
MIALSGAHTIGVTHCDKFVRRIYTFKQRLAWNPPMNLDFLRSLRRVCPLSYSPTAFAMLDVTTPRVFDNAYFNNLRYNKGLLASDQVLFTDRRSRPTVNLFAANATAFHEAFVAAMAKLGRIGLKTGADGEIRRVCTAVN

SEQ ID NO: 35211 - DNA, 1374 bp, Zea mays subsp. mays
  misc_feature (260)..(260): n is a, c, g, or t
  misc_feature (263)..(263): n is a, c, g, or t
  misc_feature (383)..(383): n is a, c, g, or t
  misc_feature (992)..(992): n is a, c, g, or t
ccaattccattctcggaagagaccatttccttcctcctgatctctcacggagttcctctccatggcgacgccccgctctccgagcccccgcgccgaagcgcccctcgattccgcgccgctgctgggcggtgcctccggcggcgggagccgtcgccgaggcggagcgctccgccgaccctcgctccgcggtgcggcgcggctgctgcgccgcggcgggcggcgagccatgcgggagccctcggtgctggtgcgggaggccnccncagagcacctggaggaacggcaggcggactgggcctactcccgccccgtcgtggcgctcgacctgctctggaacctcgccttcatcaccgtcgctgcggtcgtgctcgtgctcagccgcnacgaggactcgcccatgccgctccggacctgggtcgccggctacgccctgcagtgcagtcatacacatggtgtgcgtcgcaatctgagtaaccggatgctgccatggccagcgcggcggcgccggcgcagcgcccgctgacgaggtaaaggggcagcgacggatcgtcgtcgtctagtgatgaggatgacagggagctcgatcgccatggtcgccgcaccgattacgccagtattgcaaaacacttggagtctgctaatacaatgttctccttcatatggtggataatcggattttattggatatctgctgggggtgaagaggttatccgggacgcacctcagctttactggctctgcatagtcttcctggcatttgatgtgttttttgttgtattctgtgttgctctggcttgtatcattggtattgctgtctgttgttgccttccttgtatcatagcaattctctatgcagtatctgatcaggaaggagcatctgaagatgacattcgtcaaatcccaagatacaaatttcggcggaccgatgagcctgaaaagcaagatgttgaccccatgggtccttttggtggaataatgacagagtgtggcanccaatcaacctattgagaaagtgcttgcagctgaagatgcagagtgttgtatttgcctatctgcttatgatgatggtgcagagttgcgggaactcccttgtgggcaccatttccactgcacctgcatcgataagtggcttcacatcaatgcaacatgccccctgtgcaagtacaacattcggaaaagcaacagtagcagtggaagtgaagaagtatgaatgcaaccgcttgacaatgccaatctgtttaaacttcgtgcctgtgtcgttgctaatgtaactccagggcttgagcagtgtaaatttttgtactaaaagaagtgctgatagagtcaattatgtattaaagttactcaaagtgctgtctatatgtcgtataagtt

SEQ ID NO: 35212 - protein, 157 aa, Zea mays subsp. mays
  misc_feature (87)..(88): Xaa can be any naturally occurring amino acid
  misc_feature (128)..(128): Xaa can be any naturally occurring amino acid
PIPFSEETISFLLISHGVPLHGDAPLSEPPRRSAPRFRAAAGRCLRRREPSPRRSAPPTLAPRCGAAAAPRRAASHAGALGAGAGGXXRAPGGTAGGLGLLPPRRGARPALEPRLHHRRCGRARAQPXRGLAHAAPDLGRRLRPAVQSYTWCASQSE

SEQ ID NO: 35213 - protein, 155 aa, Zea mays subsp. mays
  misc_feature (86)..(87): Xaa can be any naturally occurring amino acid
  misc_feature (127)..(127): Xaa can be any naturally occurring amino acid
NSILGRDHFLPPDLSRSSSPWRRPALRAPAPKRPSIPRRCWAVPPAAGAVAEAERSADPRSAVRRGCCAAAGGEPCGSPRCWCGRXXQSTWRNGRRTGPTPAPSWRSTCSGTSPSSPSLRSCSCSAXTRTRPCRSGPGSPATPCSAVIHMVCVAI

SEQ ID NO: 35214 - protein, 153 aa, Zea mays subsp. mays
  misc_feature (67)..(68): Xaa can be any naturally occurring amino acid
  misc_feature (108)..(108): Xaa can be any naturally occurring amino acid
MATPRSPSPRAEAPLDSAPLLGGASGGGSRRRGGALRRPSLRGAARLLRRGGRRAMREPSVLVREAXXEHLEERQADWAYSRPVVALDLLWNLAFITVAAVVLVLSRXEDSPMPLRTWVAGYALQCSHTHGVRRNLSNRMLPWPARRRRRSAR

SEQ ID NO: 35215 - DNA, 654 bp, Zea mays subsp. mays
ctccgccgtcgcctgtccactttccccgtgcttctccgccgtcgaggccgcgtcccagtgcgaagagaccacgactcagatggccagccgctgggtccggcccgaggtgtacccgctgttcgcggcaacgggcgtggccgtcggcatctgcggatttcagctcttccggaacatcaccggcaacccggaagtcagggtaaacaaggcagggagggcagctggtgtgcttgagaaccatgaggaggggaggcgttacgccatgcatggcctaacgcctaccctcctatgggttctttcagcagcactggcctcactatttcttctaaattaccaagattctcggacatgtacactctcacaatagcaagtgcggatccacagtctatctctgcaaacaagccagttcatttcactaagagcgtaacaaagtggtttacaaaggaaggagttcttgtggagggcctgttctggaaggatgtcgagaagctgattgatgactacaacagtgagcgcaagagtaaatgaattggtagctcgtgtctctggccatctggggagacatcgctgtctagagaaatccgtcaaagtttagcttaatctgaacaggcatttttgctatactgtaccggttgaccagtgaatgaatgatgttct

SEQ ID NO: 35216 - protein, 120 aa, Zea mays subsp. mays
SAVACPLSPCFSAVEAASQCEETTTQMASRWVRPEVYPLFAATGVAVGICGFQLFRNITGNPEVRVNKAGRAAGVLENHEEGRRYAMHGLTPTLLWVLSAALASLFLLNYQDSRTCTLSQ

SEQ ID NO: 35217 - protein, 94 aa, Zea mays subsp. mays
MASRWVRPEVYPLFAATGVAVGICGFQLFRNITGNPEVRVNKAGRAAGVLENHEEGRRYAMHGLTPTLLWVLSAALASLFLLNYQDSRTCTLSQ

SEQ ID NO: 35218 - protein, 79 aa, Zea mays subsp. mays
MGSFSSTGLTISSKLPRFSDMYTLTIASADPQSISANKPVHFTKSVTKWFTKEGVLVEGLFWKDVEKLIDDYNSERKSK

SEQ ID NO: 35219 - DNA, 1225 bp, Zea mays subsp. mays
  misc_feature (278)..(278): n is a, c, g, or t
  misc_feature (379)..(379): n is a, c, g, or t
aattttatgaccgtcgaaaaccaaaatttagataggccacccaaatccaggtgcaaatcccaacctccctccctcccaggccccctccccacctccacctccaggcaccactggtcccacctcctcacctgcgaggatgctgctcgtgagtcaggcagcgaacggctccctctccgcgcggcgctgccgtcgaagccgccggggccgtccaccaccaacccctacccgctcttcgccaaccctcgcctcctgcgccgccgcctggcgctctccggcgntggcgccgaccaagccccgcgccgcgccgcgccgaccccagccgccgcgggcgagggcccctccgcctcctccaccgaggacccggtccttgtccgcgtcnccgacgacggcgtgccgctcgagggcgtcatccagattgagaagcccggggatgcggccgccgagtccaagctcgtctcctacgcgaagctgggtcttctggccggcggggacgtgttctgccttctgctgttctctgcgattggaaggttcagccatggcctgcccgtcctcgacgccgagacgttcaagacggccgaccccttcattgctgagtggctgctgagcgcctaccttcttggcggatttggcgatgatgccaaagggcgcaatggcgtcggaagcgcggttatcaccgcagctaaatcatgggctgttgggataccgttgggacttgctatccgagcagtgacgtctggtcatcttccaccaactccttttatcttggtaaccatgggaagtacaggggtcttgttaactgcatggcgtgctttggtatcacaactgttttccaaccagcaaaagcagcaggatgatgtctaccggcgtggaagtccttttgagctttttgagctactcacatcgctggtgcggaggtggtgacatctgaaggctgaagcctatagaaggtaagaagggcattgttccgctctggtatccgcaatcatcaggttcagccatctgtgtctattgtgtaagtacaattttgaaggtgaagaagagcaggctaaaacctagtttggagcatttgccgaacccaaaaaaaatgtttggcaataacacgcccgcgatgttggtttagtatattatattatattcataagatgtactcatattcctgatcttccacttgtaaaattgtatccagcttaacaaatcctaatcgataagaccgttgcctcttgtt

SEQ ID NO: 35220 - protein, 306 aa, Zea mays subsp. mays
  misc_feature (93)..(93): Xaa can be any naturally occurring amino acid
  misc_feature (127)..(127): Xaa can be any naturally occurring amino acid
NFMTVENQNLDRPPKSRCKSQPPSLPGPLPTSTSRHHWSHLLTCEDAARESGSERLPLRAALPSKPPGPSTTNPYPLFANPRLLRRRLALSGXGADQAPRRAAPTPAAAGEGPSASSTEDPVLVRVXDDGVPLEGVIQIEKPGDAAAESKLVSYAKLGLLAGGDVFCLLLFSAIGRFSHGLPVLDAETFKTADPFIAEWLLSAYLLGGFGDDAKGRNGVGSAVITAAKSWAVGIPLGLAIRAVTSGHLPPTPFILVTMGSTGVLLTAWRALVSQLFSNQQKQQDDVYRRGSPFELFELLTSLVRRW

SEQ ID NO: 35221 - protein, 304 aa, Zea mays subsp. mays
  misc_feature (91)..(91): Xaa can be any naturally occurring amino acid
  misc_feature (125)..(125): Xaa can be any naturally occurring amino acid
MTVENQNLDRPPKSRCKSQPPSLPGPLPTSTSRHHWSHLLTCEDAARESGSERLPLRAALPSKPPGPSTTNPYPLFANPRLLRRRLALSGXGADQAPRRAAPTPAAAGEGPSASSTEDPVLVRVXDDGVPLEGVIQIEKPGDAAAESKLVSYAKLGLLAGGDVFCLLLFSAIGRFSHGLPVLDAETFKTADPFIAEWLLSAYLLGGFGDDAKGRNGVGSAVITAAKSWAVGIPLGLAIRAVTSGHLPPTPFILVTMGSTGVLLTAWRALVSQLFSNQQKQQDDVYRRGSPFELFELLTSLVRRW

SEQ ID NO: 35222 - protein, 155 aa, Zea mays subsp. mays
  misc_feature (48)..(48): Xaa can be any naturally occurring amino acid
  misc_feature (81)..(81): Xaa can be any naturally occurring amino acid
MLLVSQAANGSLSARRCRRSRRGRPPPTPTRSSPTLASCAAAWRSPAXAPTKPRAAPRRPQPPRARAPPPPPPRTRSLSAXPTTACRSRASSRLRSPGMRPPSPSSSPTRSWVFWPAGTCSAFCCSLRLEGSAMACPSSTPRRSRRPTPSLLSGC

SEQ ID NO: 35223 - DNA, 862 bp, Zea mays subsp. mays
aagcaagcgaagcatcgccagattggtatatcgatcgattgatcggtggcggaggaaggggaggacggggggcagatggcggcgtgccggggcttcttcgagtgcctgctcaggctgctcaacttcatcctcaccgtcgccggcctcgctatggttggttacgggatctacctgctcgtcgagtggatgaagatatccgaggacggcatcggcggggcttcgacggcggaggtgctcgtctctggccggccgttgttgggggctgtcattctcggtgacagcttcctcgacaatctacccaaagcatggtttatttatttgtttattggtgttggcaccatcgtcatcttggtgtctctgtttggctgcattggagcagggacaagaaacacctgctgtttgtgtttctatgctttcttggtcatattgttgatccttgctgaagctgcagctgctgcattcattttctttgaccatggctggaaagatgtaattccagtggacaaaacacataactttgatgttatgtatgactttctgaaggaaaactgggagattgcaagatgggtcgctctgggcgttgttgtttttgaggcagtgctcttgctgttagctctggctgtcagggcaatgaacaaacctgctgagtatgacagtgatgacgaaattatagcaattggccgaagccctaccatccggcagccactgatccatacccaaaatgttcctgccactggtgttcctgtcccaacacttgatcaacgtgcaagtagaaatgatgcctggagccaaaggatgcgagagaagtatggtctggacacgagccagttcacatacaacccttcagacccaagcaggtacc

SEQ ID NO: 35224 - protein, 262 aa, Zea mays subsp. mays
MAACRGFFECLLRLLNFILTVAGLAMVGYGIYLLVEWMKISEDGIGGASTAEVLVSGRPLLGAVILGDSFLDNLPKAWFIYLFIGVGTIVILVSLFGCIGAGTRNTCCLCFYAFLVILLILAEAAAAAFIFFDHGWKDVIPVDKTHNFDVMYDFLKENWEIARWVALGVVVFEAVLLLLALAVRAMNKPAEYDSDDEIIAIGRSPTIRQPLIHTQNVPATGVPVPTLDQRASRNDAWSQRMREKYGLDTSQFTYNPSDPSRY

SEQ ID NO: 35225 - protein, 237 aa, Zea mays subsp. mays
MVGYGIYLLVEWMKISEDGIGGASTAEVLVSGRPLLGAVILGDSFLDNLPKAWFIYLFIGVGTIVILVSLFGCIGAGTRNTCCLCFYAFLVILLILAEAAAAAFIFFDHGWKDVIPVDKTHNFDVMYDFLKENWEIARWVALGVVVFEAVLLLLALAVRAMNKPAEYDSDDEIIAIGRSPTIRQPLIHTQNVPATGVPVPTLDQRASRNDAWSQRMREKYGLDTSQFTYNPSDPSRY

SEQ ID NO: 35226 - protein, 225 aa, Zea mays subsp. mays
MKISEDGIGGASTAEVLVSGRPLLGAVILGDSFLDNLPKAWFIYLFIGVGTIVILVSLFGCIGAGTRNTCCLCFYAFLVILLILAEAAAAAFIFFDHGWKDVIPVDKTHNFDVMYDFLKENWEIARWVALGVVVFEAVLLLLALAVRAMNKPAEYDSDDEIIAIGRSPTIRQPLIHTQNVPATGVPVPTLDQRASRNDAWSQRMREKYGLDTSQFTYNPSDPSRY

SEQ ID NO: 35227 - DNA, 569 bp, Zea mays subsp. mays
aacacgcgaatcctccaatctgcccttgccgccgccgccgcccgatccaggtctgcagactgctcacttctccccacccaacgcggcggcactcctccctcccccagtgcctgttgtgcgcctgtacttcacaccggcgtcgccccctcctccagagctccccaccggagccaccctcacccgtcacgccctcctccgctgagtgcagcaagtgctgatcagttcggttagcacactcttctacaaatccacagtcacttcttcacagtgggtgggcgggagatggtgctgaggcgggcgataaccgaaagccccaagaaggttgcggggctgaaggatctggtgaacctgccgatccagctgcgagagttcgccggaggccagtcccaaatgtcacatatctccttcttcctccgtgtctggtcgtacatcaaggacaacaaacttcaggacccaacgaataagaacattgtgaagtgtgatgagaagctgaagaccgtattattgggtaggtccaaagtgcaagttgtcctttgctatttagaatggaagaagaaatgccttgttcc

SEQ ID NO: 35228 - protein, 95 aa, Zea mays subsp. mays
MVLRRAITESPKKVAGLKDLVNLPIQLREFAGGQSQMSHISFFLRVWSYIKDNKLQDPTNKNIVKCDEKLKTVLLGRSKVQVVLCYLEWKKKCLV

SEQ ID NO: 35229 - protein, 76 aa, Zea mays subsp. mays
NTRILQSALAAAAARSRSADCSLLPTQRGGTPPSPSACCAPVLHTGVAPSSRAPHRSHPHPSRPPPLSAASADQFG

SEQ ID NO: 35230 - protein, 71 aa, Zea mays subsp. mays
HANPPICPCRRRRPIQVCRLLTSPHPTRRHSSLPQCLLCACTSHRRRPLLQSSPPEPPSPVTPSSAECSKC

SEQ ID NO: 35231 - DNA, 542 bp, Zea mays subsp. mays
agttcggacaaccccgccgccgcaacatccctagtcgctcgtcagatcctccagcaccacagcaccttcgccgccgccgccgccgccgccgccatgggtaaggttcacggatcgctggcccgcgctgggaaggtgcgcgggcagacgcccaaggttgcaaagcaggacaagaagaagaagccccgcggccgcgctcacaagcgcatgcaatacaaccgccgcttcgtcaccgccgttgttggattcggcaagaagcgcggccccaactcatcggagaagtagatctagctatggctttgtgttttattccccactagtttcctcactgatggcaacttgctgaagacttatgctattatctgtatcgatgttactgcaatactgttaagtacgatatatgcatcgtttagttgatcaagttgcctgtggtggtgatccttttagtttgtctggaatgttggaaacatgtttgtgtcgtgctgtgttcgttttgttttgaaactggtaacatgtttgagtctaaatgccggtctattctgttt

SEQ ID NO: 35232 - protein, 93 aa, Zea mays subsp. mays
SSDNPAAATSLVARQILQHHSTFAAAAAAAAMGKVHGSLARAGKVRGQTPKVAKQDKKKKPRGRAHKRMQYNRRFVTAVVGFGKKRGPNSSEK

SEQ ID NO: 35233 - protein, 62 aa, Zea mays subsp. mays
MGKVHGSLARAGKVRGQTPKVAKQDKKKKPRGRAHKRMQYNRRFVTAVVGFGKKRGPNSSEK

SEQ ID NO: 35234 - DNA, 1183 bp, Zea mays subsp. mays
atcctccaacgactcacctcccacccactcacccaccccatggcgaccaacccctccaacggcgccggcgccgacgtccctgcagccccggcggcggtgcggctctcggttgcggcgcaggcggccgcgatccagccctcgtccccgcgcttcttcttctcctcgcttgccgggaccaacccggcctccccgcaccgtcgcatcgccatcgccgttgatctctccgacgagtccgccttcgcagtcaagtgggccgtgcagaactacgtccgccccggggacgccgtcgtgctgctccacgtgcgccccacctccgtcctctacggcgccgactggggttccatcccggtctccgtcgctgacgaggacgacgctgccgaggacgccgccgccgccgccgagggcgatccctcggaggaggagctgcagaagaaacgggaggaggactacgacgccttcacctccaccaaggcgcaggacctcgcgcaaccgctggtcgacgcccagatccccttcaagatccacgtcgtcaaggaccacgacatgaaggagcgcctctgcctcgaggctgagcgccttggcctctccgccatgatcatggggagccgcggtttcggggcctcccggaaaggcagcaaggggcggcttgggagtgttagtgattactgcgtacaccactgtgtatgccctgttgtggttgttcgctaccctgatgatgctgcagatgccggtggagatgcatcaggggtgacagatgagttgcacactgtaccagaggacgaacctgtttatcacgatgcacctgaggtgcagaaagaaaactgaggcaacggccacatgcagctgaagaacgaaggaaaacacgaggcttatagtgaggcaatcctgtgtatctggaagatgggaccggatgtttatctttgcttctatatatcaactgcgtatcatgatcagctgtctgcttcccgttgagtttcatatcggcgtcgtagatcatctgagttttttgttggtttgcttgtgagatgtagagtactcttcccgtgggtcgaaggtgtcttgcagatgcttgagctttatgttgtcgaacggtagttatctacacggtatcatctgctctgttaagcctgtttagtgtttactgtattggatactcgttaatagagaaccgctacttttcagt

SEQ ID NO: 35235 - protein, 274 aa, Zea mays subsp. mays
ILQRLTSHPLTHPMATNPSNGAGADVPAAPAAVRLSVAAQAAAIQPSSPRFFFSSLAGTNPASPHRRIAIAVDLSDESAFAVKWAVQNYVRPGDAVVLLHVRPTSVLYGADWGSIPVSVADEDDAAEDAAAAAEGDPSEEELQKKREEDYDAFTSTKAQDLAQPLVDAQIPFKIHVVKDHDMKERLCLEAERLGLSAMIMGSRGFGASRKGSKGRLGSVSDYCVHHCVCPVVVVRYPDDAADAGGDASGVTDELHTVPEDEPVYHDAPEVQKEN

SEQ ID NO: 35236 - protein, 261 aa, Zea mays subsp. mays
MATNPSNGAGADVPAAPAAVRLSVAAQAAAIQPSSPRFFFSSLAGTNPASPHRRIAIAVDLSDESAFAVKWAVQNYVRPGDAVVLLHVRPTSVLYGADWGSIPVSVADEDDAAEDAAAAAEGDPSEEELQKKREEDYDAFTSTKAQDLAQPLVDAQIPFKIHVVKDHDMKERLCLEAERLGLSAMIMGSRGFGASRKGSKGRLGSVSDYCVHHCVCPVVVVRYPDDAADAGGDASGVTDELHTVPEDEPVYHDAPEVQKEN

SEQ ID NO: 35237 - protein, 181 aa, Zea mays subsp. mays
SSNDSPPTHSPTPWRPTPPTAPAPTSLQPRRRCGSRLRRRRPRSSPRPRASSSPRLPGPTRPPRTVASPSPLISPTSPPSQSSGPCRTTSAPGTPSCCSTCAPPPSSTAPTGVPSRSPSLTRTTLPRTPPPPPRAIPRRRSCRRNGRRTTTPSPPPRRRTSRNRWSTPRSPSRSTSSRTTT

SEQ ID NO: 35238 - DNA, 1052 bp, Zea mays subsp. mays
aaccagcaccagcgccagcaacagcaacagctgtggttttagcacaagaaggacgaggaagaagcgcagctgcgtttcttggacggtgagcgcggctactccggcggacatggcgaccaacagtgccctggcgaagctggcgccgctggaagccatcctgttcgacatcgacggcacgctctgcgactccgaccccatccacttctgcgccttccgagagctcctgcagcaggccggcttcaacggcggtgtccccatcacggaggagttctacagcgccaacatcagcgggggccacaacgacgacctcgccaggtcgctgttcccgggcatggatcaccagaaggcgatgcggttcatggatgataaagaagctatgttcagaaagttggcgcctgggcagctgaagcccgtggatgggctgcaggagctgtgcggatggatggaaggccgcgacatgaagcgcgcggcggtgacgaacgccccgagggcgaacgccgagctgatgctgtcgctgctggggctcaccgacttcttcccggtgctcgtcatcgggagcgagtgcgaccgggccaagccgttccctgacccgtacctcaaggcgctccagctcatcgacgcatcgcctcaacacaccttcatatttgaagactctgcatcgggggtccgggccggtgtggctgccggagtgcccgtggttggcctgacgacgaggaaccccgggaaggtgctgaaagacgcaggggccagcttgctggtcaaggattttcaggacccggagctgctgtccgtgcttcaacaggtggaggtcgaacccgcagcggagaatgcacaaggctgatgggtcgggcattgcggaaaatgtcatgctggacagactagccatcagcgattctttcacggagtggaatagctgtgtaactgcatcgtggaataaactaactccggtcggttcctcggcaggaacctggagccggtgcgcatggatgtgtgctgtgtgcaaaacctggcgcctactacactggttcttaacatgcaacaggcattttggc

SEQ ID NO: 35239 - protein, 279 aa, Zea mays subsp. mays
TSTSASNSNSCGFSTRRTRKKRSCVSWTVSAATPADMATNSALAKLAPLEAILFDIDGTLCDSDPIHFCAFRELLQQAGFNGGVPITEEFYSANISGGHNDDLARSLFPGMDHQKAMRFMDDKEAMFRKLAPGQLKPVDGLQELCGWMEGRDMKRAAVTNAPRANAELMLSLLGLTDFFPVLVIGSECDRAKPFPDPYLKALQLIDASPQHTFIFEDSASGVRAGVAAGVPVVGLTTRNPGKVLKDAGASLLVKDFQDPELLSVLQQVEVEPAAENAQG

SEQ ID NO: 35240 - protein, 243 aa, Zea mays subsp. mays
MATNSALAKLAPLEAILFDIDGTLCDSDPIHFCAFRELLQQAGFNGGVPITEEFYSANISGGHNDDLARSLFPGMDHQKAMRFMDDKEAMFRKLAPGQLKPVDGLQELCGWMEGRDMKRAAVTNAPRANAELMLSLLGLTDFFPVLVIGSECDRAKPFPDPYLKALQLIDASPQHTFIFEDSASGVRAGVAAGVPVVGLTTRNPGKVLKDAGASLLVKDFQDPELLSVLQQVEVEPAAENAQG

SEQ ID NO: 35241 - protein, 169 aa, Zea mays subsp. mays
MDHQKAMRFMDDKEAMFRKLAPGQLKPVDGLQELCGWMEGRDMKRAAVTNAPRANAELMLSLLGLTDFFPVLVIGSECDRAKPFPDPYLKALQLIDASPQHTFIFEDSASGVRAGVAAGVPVVGLTTRNPGKVLKDAGASLLVKDFQDPELLSVLQQVEVEPAAENAQG

SEQ ID NO: 35242 - DNA, 1175 bp, Zea mays subsp. mays
acacccatctcctgagtcctgcctgcgctcgcctcagctcctttcttccccgccccttggcttttgcttggttgcatcgggccggtcgagccggagaggaaaagctagctactagctaccagctctcggccggcggtggtagtctgcctgcagctggggttagctgcaagggttgggagctagccatggggaggggtcgggtggagctcaagcggatcgagaacaagatcaaccgccaggtcaccttcgccaagcgccgcaacggcctgctcaagaaggcgtacgagctctccgtgctctgcgacgccgaagtcgcgctcatcatcttctccaaccgcggcaagctctacgagttctgcagcggacagagcatcaccaaaacacttgagaggtatgaaaaaaacagttatggaggaccagatactgctgtacagaacaaggagaacgagttagtccagagcagtcgtaatgagtacctcaagctgaaagcgagggtggataatttacagaggactcagaggaatttgcttggtgaagatctggggtcacttggtgtcaaagagcttgagcagcttgagaagcaacttgattcatccttaaggcacataagatccacaaggacacaacatatgcttgatcagctcactgatcttcagaggagggagcaaatgctgtgtgaagcaaataagtgccttagaagaaagctggaggagaccagcaaccaggtgcatggccaagtgtgggagcacggtgccaacttactcggctacgagaggcactctcctcaacagcaggccccatcacatgttggcaatggtttgttctttcatcccctggaagctgcagcagagccaaccctgcagatcgggttcgctcctgagcatatgaataacttcatgccaacatggctaccctgaagatggatcttgaggcaaaggaaataaataaagatgcggtggcagcatcatactctatgcaagctaagagtgacagctgtgtttcagtcacatatatgatctagtctgtgtgtcaatgtgtcgaaaaacatgtctgtgattttgttatatgaatgtaacgcgcaatgaaacatacatgactagctgcttgcttgacgatgcgtttgcgtgtatccgtataaattaaaggctataagccacatcgtatatgcgtactgc

SEQ ID NO: 35243 - protein, 304 aa, Zea mays subsp. mays
THLLSPACARLSSFLPRPLAFAWLHRAGRAGEEKLATSYQLSAGGGSLPAAGVSCKGWELAMGRGRVELKRIENKINRQVTFAKRRNGLLKKAYELSVLCDAEVALIIFSNRGKLYEFCSGQSITKTLERYEKNSYGGPDTAVQNKENELVQSSRNEYLKLKARVDNLQRTQRNLLGEDLGSLGVKELEQLEKQLDSSLRHIRSTRTQHMLDQLTDLQRREQMLCEANKCLRRKLEETSNQVHGQVWEHGANLLGYERHSPQQQAPSHVGNGLFFHPLEAAAEPTLQIGFAPEHMNNFMPTWLP

SEQ ID NO: 35244 - protein, 243 aa, Zea mays subsp. mays
MGRGRVELKRIENKINRQVTFAKRRNGLLKKAYELSVLCDAEVALIIFSNRGKLYEFCSGQSITKTLERYEKNSYGGPDTAVQNKENELVQSSRNEYLKLKARVDNLQRTQRNLLGEDLGSLGVKELEQLEKQLDSSLRHIRSTRTQHMLDQLTDLQRREQMLCEANKCLRRKLEETSNQVHGQVWEHGANLLGYERHSPQQQAPSHVGNGLFFHPLEAAAEPTLQIGFAPEHMNNFMPTWLP

SEQ ID NO: 35245 - DNA, 1337 bp, Zea mays subsp. mays
  misc_feature (492)..(493): n is a, c, g, or t
gcacgagaccattacctagaacatcctaatcgaaaaatgtcatttgacagcgcaacacggcgctgcagggtaaagatctcccccgctcgccggtctctctgcccaggccagcaggacgaagaagaagccggccgggaagacccaggcctgaccgcctgagctaggggagaggaggacgacgatggggctgctgtctcagcgggtggagcggtcggagatggagcccggcgaccacatctacacctggcgcgccggctacacctactcccaccacgggatttacgtcggcggcagcaaggtggtgcacttcacgcggaagagggaggcgggcggcgcgggtctggactcggccatcgccgtgtccagcctcctcctctcgcggggctcggacgagtgccccagcttcccggactgcggcttccagctccccgacagcggcgtggtgctgacctgcgtggactgcttcctcggcggcggcgcgctgcaccgctnngagtacggcgtgcccgccgcggcgttcctggccaaggtccgcgggggcacgtccaccacggcgcgcgccgacccgggcgacgccgccgtgcgccgcgccatgcacctcctccggcacggcttcggcgactacgacgtgttcgagaacaactgcgaggacttcgcgctctactgcaagacggggctcctgctcctccccgccgccgcggctggcggcggggtcgggaggagcgggcaggccgcggccgccctcggcgtgccgctggccgcgctcttctccaccccgttcaagctcgtggccgccggcccgctcggcatggccgccgtcaccgcgggcgtgtactgcgccggcaggtacgtcaccgacatcggggtgaggacggacgtggtgaaggtggaggtgaaggacctgtcggcgcacctcggctggcgccgcgccagggctcaggagaagaagaagaagcagcagcaggaggaggcgccggcggcggccaagagcttgcttccgctcaagcggaaacgggagacctgcgtttgattggcgtgcggttgcaaatagatttgatttcttcgtctttagttactgcatagaaattaataagcccgatatagatagatatatgtcctagcgttcttgcccgatgccccgatcgatattgttcgttgttctttgtacgtactctgtatcattctaagagtttcagttactcctacatacattcttcattactgcaacaagatagttgagaacacagttgttaattgagctgagctgtacgtctcgtactgttccacaatagaatgcgaaggcatgcatgaggtccacgacatttggtccatttctg

SEQ ID NO: 35246 - protein, 282 aa, Zea mays subsp. mays
  misc_feature (104)..(104): Xaa can be any naturally occurring amino acid
MGLLSQRVERSEMEPGDHIYTWRAGYTYSHHGIYVGGSKVVHFTRKREAGGAGLDSAIAVSSLLLSRGSDECPSFPDCGFQLPDSGVVLTCVDCFLGGGALHRXEYGVPAAAFLAKVRGGTSTTARADPGDAAVRRAMHLLRHGFGDYDVFENNCEDFALYCKTGLLLLPAAAAGGGVGRSGQAAAALGVPLAALFSTPFKLVAAGPLGMAAVTAGVYCAGRYVTDIGVRTDVVKVEVKDLSAHLGWRRARAQEKKKKQQQEEAPAAAKSLLPLKRKRETCV

SEQ ID NO: 35247 - protein, 270 aa, Zea mays subsp. mays
  misc_feature (92)..(92): Xaa can be any naturally occurring amino acid
MEPGDHIYTWRAGYTYSHHGIYVGGSKVVHFTRKREAGGAGLDSAIAVSSLLLSRGSDECPSFPDCGFQLPDSGVVLTCVDCFLGGGALHRXEYGVPAAAFLAKVRGGTSTTARADPGDAAVRRAMHLLRHGFGDYDVFENNCEDFALYCKTGLLLLPAAAAGGGVGRSGQAAAALGVPLAALFSTPFKLVAAGPLGMAAVTAGVYCAGRYVTDIGVRTDVVKVEVKDLSAHLGWRRARAQEKKKKQQQEEAPAAAKSLLPLKRKRETCV

SEQ ID NO: 35248 - protein, 145 aa, Zea mays subsp. mays
MHLLRHGFGDYDVFENNCEDFALYCKTGLLLLPAAAAGGGVGRSGQAAAALGVPLAALFSTPFKLVAAGPLGMAAVTAGVYCAGRYVTDIGVRTDVVKVEVKDLSAHLGWRRARAQEKKKKQQQEEAPAAAKSLLPLKRKRETCV

SEQ ID NO: 35249 - DNA, 812 bp, Zea mays subsp. mays
ccagcctcgccgccccaccaccccagcattgccttaccttgccttgccttgccctgccctccattccacctccacctcgccgcccaaatccccccacccaacaatcccccatggggtcgcaggccatcgaggcgcaccgcgcgggcgcggaggtgtaccgcggcgcggcgctgtgcgcggagaagtcgacggagctgctggcagaggcgcacctcccgctgggcctgctgccgctggccgacatggaggaggtcggctacaaccgcgccacgggcttcgtgtggctgcgccagaggaagtcgctcacgcacacgttccgcccgatcgcgcgccaggtctcgtacgccgccgaggtcaccgccttcgtggaggaccggcggatgaggcgcatgaccggggtcaagaccaaggagctcctcatctgggtcaccctctccgacatgttcgtcgacagggacgacccctccaagatcaccttcaagacgcccaccgggctcggcaggacctaccccgtctccgccttcgctaaggaaggcgccggtgacgacggcgcggcggccaagcacaaggatgatgcccccgccccgaccgccgccggtaaggctgctgccagcaagtgaggtgcgcggcgtccggagctttttaccttgccgtagtcgccatacttgcctccccaataatggcgtttgtaccccctctacctgcttcaaattagtgtgttttatgaatggaaacgaccatccaactttccatccgtccttgcaatgtgtcacggcgggatgtttttactacacatcagctttaccagttcc

SEQ ID NO: 35250 - protein, 205 aa, Zea mays subsp. mays
SLAAPPPQHCLTLPCLALPSIPPPPRRPNPPTQQSPMGSQAIEAHRAGAEVYRGAALCAEKSTELLAEAHLPLGLLPLADMEEVGYNRATGFVWLRQRKSLTHTFRPIARQVSYAAEVTAFVEDRRMRRMTGVKTKELLIWVTLSDMFVDRDDPSKITFKTPTGLGRTYPVSAFAKEGAGDDGAAAKHKDDAPAPTAAGKAAASK

SEQ ID NO: 35251 - protein, 175 aa, Zea mays subsp. mays
QPRRPTTPALPYLALPCPALHSTSTSPPKSPHPTIPHGVAGHRGAPRGRGGVPRRGAVRGEVDGAAGRGAPPAGPAAAGRHGGGRLQPRHGLRVAAPEEVAHAHVPPDRAPGLVRRRGHRLRGGPADEAHDRGQDQGAPHLGHPLRHVRRQGRPLQDHLQDAHRARQDLPRLRLR

SEQ ID NO: 35252 - protein, 169 aa, Zea mays subsp. mays
MGSQAIEAHRAGAEVYRGAALCAEKSTELLAEAHLPLGLLPLADMEEVGYNRATGFVWLRQRKSLTHTFRPIARQVSYAAEVTAFVEDRRMRRMTGVKTKELLIWVTLSDMFVDRDDPSKITFKTPTGLGRTYPVSAFAKEGAGDDGAAAKHKDDAPAPTAAGKAAASK

SEQ ID NO: 35253 - DNA, 2006 bp, Zea mays subsp. mays
accgatcgcggggccgatcgagtctgctgaagcctcgcctcgcctcgcagaagaagcagcgtgagtaaaaaacccgcagggtgcagacgaaaacctcgtccgtttccgtcgtcttcctcctccctccgtctcccttcacccggcctcggtgggtccgctccccagccacgcgccgctctcttatttaaccccggccccggcctccgctccgccactcgcgcacccatcacaccccctaaccactccacctccctcagcagccctcacggccactacccactgcggctgtaccacctgtacggctgcactgtccgtcgatcggctttgcaccacacgtccgcgcgctcgctccgtcggtgtcggtagccatggcgctggcggggacgggggtgttcgcggagatcctggacagcgaggtgtacaggtactacgccgacggggagtggcgcagctccgcctccggcaagtccgtcgccatcgtcaaccccaccacccgcaagacgcagtacagggtgcaagcatgcacgcaggaggaggtgaacaaggcgatggacgcggccaaggtcgcgcagaaggcatgggcccggacgccgctgtggaagcgtgcggagctcctccacaaggcggccgcgatcctcaaggagcacaaggcccccatcgccgagtgccttgtcaaggagatagccaagccggccaaggatgccgtttctgaggttgtccggtctggggatttggtgtcgtacacagctgaggagggtgtgcggatactcggggagggcaagctgcttgtttcggatagcttccctggtaatgaacgaaacaagtactgtctgagctccaagataccccttggagtagttttggcaatcccgccgttcaactatcctgtcaacttagcagtttctaagattggcccagcactaattgcaggcaatgctcttgtgctaaagcctccaactcagggcgctgtggctgcacttcatatggtacactgcttccacctggctggtttcccgaaaggtttgatcagttgtgtgactgggaagggttctgaaataggagattttcttacaatgcatcctggagtcaactgcataagttttactggtggcgatactggtatagccatttcaaagaaggctggaatggtccctcttcagatggagcttgggggaaaagatgcttgcattgtgctagaggatgcagatctggatttggtttccgcaaatatagtaaagggtggcttctcatacagtggccagaggtgcactgctgtcaaagtagtgctgatcatggaatcgattgctgatgctgtggtacagaaggttaatgccaagttggcgaaactgaaagttggcccacctgaggacgactctgatatcaccccggttgtaacagaatcctcagccaacttcatcgagggtctggtgatggatgcaaaggagaaaggagcaactttctgccaggagtacaggagagaaggcaaccttatctggccgttgctgctggatcatgtccgccctgacatgaggatcgcatgggaggagccttttgggcctgtcttgcctgtgattaggattaactcagttgaggaaggcatccaccattgcaatgccagtaatttcggcctacagggatgcatttttacaagagacatcaacaaggcaatcctgatcagtgatgcaatggagactggaactgtgcagatcaactctgcaccggctcgtgggcctgatcatttccccttccagggactgaaagacagtggcattgggtcccaggggataacaaacagcattaacatgatgaccaaggtgaagagcactgtcataaacctgccgtcaccatcctacaccatgggctgagatattcttgttaagtgttctatagctccatgagcaatgtagagagttaaatgtttcatagccacgtgagatttggacgctatttacacctcagttcttcctgcagaagatcttttgcagtttaaagaataaagtgcgttg

SEQ ID NO: 35254 - protein, 498 aa, Zea mays subsp. mays
MALAGTGVFAEILDSEVYRYYADGEWRSSASGKSVAIVNPTTRKTQYRVQACTQEEVNKAMDAAKVAQKAWARTPLWKRAELLHKAAAILKEHKAPIAECLVKEIAKPAKDAVSEVVRSGDLVSYTAEEGVRILGEGKLLVSDSFPGNERNKYCLSSKIPLGVVLAIPPFNYPVNLAVSKIGPALIAGNALVLKPPTQGAVAALHMVHCFHLAGFPKGLISCVTGKGSEIGDFLTMHPGVNCISFTGGDTGIAISKKAGMVPLQMELGGKDACIVLEDADLDLVSANIVKGGFSYSGQRCTAVKVVLIMESIADAVVQKVNAKLAKLKVGPPEDDSDITPVVTESSANFIEGLVMDAKEKGATFCQEYRREGNLIWPLLLDHVRPDMRIAWEEPFGPVLPVIRINSVEEGIHHCNASNFGLQGCIFTRDINKAILISDAMETGTVQINSAPARGPDHFPFQGLKDSGIGSQGITNSINMMTKVKSTVINLPSPSYTMG

SEQ ID NO: 35255 - protein, 438 aa, Zea mays subsp. mays
MDAAKVAQKAWARTPLWKRAELLHKAAAILKEHKAPIAECLVKEIAKPAKDAVSEVVRSGDLVSYTAEEGVRILGEGKLLVSDSFPGNERNKYCLSSKIPLGVVLAIPPFNYPVNLAVSKIGPALIAGNALVLKPPTQGAVAALHMVHCFHLAGFPKGLISCVTGKGSEIGDFLTMHPGVNCISFTGGDTGIAISKKAGMVPLQMELGGKDACIVLEDADLDLVSANIVKGGFSYSGQRCTAVKVVLIMESIADAVVQKVNAKLAKLKVGPPEDDSDITPVVTESSANFIEGLVMDAKEKGATFCQEYRREGNLIWPLLLDHVRPDMRIAWEEPFGPVLPVIRINSVEEGIHHCNASNFGLQGCIFTRDINKAILISDAMETGTVQINSAPARGPDHFPFQGLKDSGIGSQGITNSINMMTKVKSTVINLPSPSYTMG

SEQ ID NO: 35256 - protein, 293 aa, Zea mays subsp. mays
MVHCFHLAGFPKGLISCVTGKGSEIGDFLTMHPGVNCISFTGGDTGIAISKKAGMVPLQMELGGKDACIVLEDADLDLVSANIVKGGFSYSGQRCTAVKVVLIMESIADAVVQKVNAKLAKLKVGPPEDDSDITPVVTESSANFIEGLVMDAKEKGATFCQEYRREGNLIWPLLLDHVRPDMRIAWEEPFGPVLPVIRINSVEEGIHHCNASNFGLQGCIFTRDINKAILISDAMETGTVQINSAPARGPDHFPFQGLKDSGIGSQGITNSINMMTKVKSTVINLPSPSYTMG

SEQ ID NO: 35257 - DNA, 962 bp, Zea mays subsp. mays
acgtacgtataggccggcgggaacgcgtaccaggtgccggcggggcggcgggacgggtccgtgtcgcgcgcgtcggacaccagcaacctgccgccgccgacggccaacgtcgcgcagctcacgcagatcttcggcaccaagggcctgacgcagaaggagatggtcatcctgtcgggcgcgcacaccatcggctcctcgcactgcagctccttcagcggccggctgtcggggtcggccacgacggcgggcgggcaggacccgaccatggaccccgcgtacgtggcgcagctggcgcggcagtgcccgcagggcggcgacccgctcgtgcccatggactacgtctcccccaacgccttcgacgagggcttctacaagggcgtcatggccaaccggggcctgctgtcctcggaccaggcgctgctcagcgacaagaacaccgccgtgcaggtcgtcacctacgccaacgacccggccaccttccaggccgacttcgccgccgccatggtcaagatgggctccgtcggcgtgctcaccggcaccagcggcaaggtcagggccaactgcagagtcgcctgattcatcgtcatcactcgtgtggagttgtagattcattatattgattgatttggaccggacgacgtcgacgggatgctacatggcctgcttgcgcaattgtatgtatgcctgtacttgcgcgtgtatgggtttcgctgtgcaaattttcgttgtctcccccgattgattgaggcgtgtgtgcgtgtgtgtctcttctgaatctgaatggaaaatctgtaacctgagctaaaactgctcgtgtactacccaatagttgcttcaaactacgatggatttttattcaaactatcacttccaaacacgcacaaatatgtactcaatcaactagggatcggagaaactggtttgtaaagggaattttataaacacaagctattcagacatgt

SEQ ID NO: 35258 - protein, 205 aa, Zea mays subsp. mays
VRIGRRERVPGAGGAAGRVRVARVGHQQPAAADGQRRAAHADLRHQGPDAEGDGHPVGRAHHRLLALQLLQRPAVGVGHDGGRAGPDHGPRVRGAAGAAVPAGRRPARAHGLRLPQRLRRGLLQGRHGQPGPAVLGPGAAQRQEHRRAGRHLRQRPGHLPGRLRRRHGQDGLRRRAHRHQRQGQGQLQSRLIHRHHSCGVVDSLY

SEQ ID NO: 35259 - protein, 138 aa, Zea mays subsp. mays
MVILSGAHTIGSSHCSSFSGRLSGSATTAGGQDPTMDPAYVAQLARQCPQGGDPLVPMDYVSPNAFDEGFYKGVMANRGLLSSDQALLSDKNTAVQVVTYANDPATFQADFAAAMVKMGSVGVLTGTSGKVRANCRVA

SEQ ID NO: 35260 - protein, 103 aa, Zea mays subsp. mays
MDPAYVAQLARQCPQGGDPLVPMDYVSPNAFDEGFYKGVMANRGLLSSDQALLSDKNTAVQVVTYANDPATFQADFAAAMVKMGSVGVLTGTSGKVRANCRVA

SEQ ID NO: 35261 - DNA, 598 bp, Zea mays subsp. mays
aaaaacgcacccatggcgctcctcctctccccgccgatcgtatccttcgtctccccgtctgctcctcgctcccgacctatctccgctgtcgccaacgtctcattctctgcctcaaggctgcaatgcaagaacctgtcatccctacagagccctctgaacgtgactgctacttgcgcttctttcgccgagaagaggtcggctcctgtccatgccacggctgaggggtctgaggctggtgcggcggagcagccagaagaaccgaaacctgcgaccaagatcgaggaaatgccgctcgagtcgaagcagaagatgatcatggagcagaggacgcggatgaagcttgccaagaaactgagacagcggcgcaagcggctcgtccgcaagaggaagcttaggaagaagggcaggtggccaccgtccaagatgaagaagctcaagaatgtatgaacggcaccgccaccctgccttggctttgtgtcgtgtggtgccccgtttaccaatttcgctgttcagaacctgagacacgatgcctacgaaatataattctgtttccatgtaatcgaatcttcttacagtctagtgtactcaaatgtgtctg

SEQ ID NO: 35262 - protein, 148 aa, Zea mays subsp. mays
KNAPMALLLSPPIVSFVSPSAPRSRPISAVANVSFSASRLQCKNLSSLQSPLNVTATCASFAEKRSAPVHATAEGSEAGAAEQPEEPKPATKIEEMPLESKQKMIMEQRTRMKLAKKLRQRRKRLVRKRKLRKKGRWPPSKMKKLKNV

SEQ ID NO: 35263 - protein, 144 aa, Zea mays subsp. mays
MALLLSPPIVSFVSPSAPRSRPISAVANVSFSASRLQCKNLSSLQSPLNVTATCASFAEKRSAPVHATAEGSEAGAAEQPEEPKPATKIEEMPLESKQKMIMEQRTRMKLAKKLRQRRKRLVRKRKLRKKGRWPPSKMKKLKNV

SEQ ID NO: 35264 - DNA, 619 bp, Zea mays subsp. mays
aagcacccaaatcgacgaattcttcccccctctccgatctcgacgcgcaccgatgcgggcgatgtcgtcggcggttaatggtatgctgcgggcacggctgcgcggggcagcgcgcgttcgcggcggcggcggcgagggggccgggcggtggacgaccccaggtcacgaggagcgccccaaggggtacctcttcaaccggccgccgccgcctccggggggaatctcgcaagtgggaggattgggagctgccctgctacgtgacctccttcctcaccgtcgtcatcctcggcgtcggcctcaacgcgaagcccgaccttacaatcgagacgtgggcgcaccagaaggcgctcgagcgcctccagcagcaggagctcgccgctgccgacacccaggccgagtgatccgcgcgtctcaggtcctctcgaactctcggctgcctctgatttggttccaataagatggccacaatgtgcggtcctgaatgttctggacttctggtattgatggaacacgagctgaacactatgctgctgttttttctgttctgttttgaaatttgcccggtgatgatggcgaatgtcctgaatattctgaatattttgaaatgtttgactgttgt

SEQ ID NO: 35265 - protein, 151 aa, Zea mays subsp. mays
STQIDEFFPPLRSRRAPMRAMSSAVNGMLRARLRGAARVRGGGGEGAGRWTTPGHEERPKGYLFNRPPPPPGGISQVGGLGAALLRDLLPHRRHPRRRPQREARPYNRDVGAPEGARAPPAAGARRCRHPGRVIRASQVLSNSRLPLIWFQ

SEQ ID NO: 35266 - protein, 134 aa, Zea mays subsp. mays
MRAMSSAVNGMLRARLRGAARVRGGGGEGAGRWTTPGHEERPKGYLFNRPPPPPGGISQVGGLGAALLRDLLPHRRHPRRRPQREARPYNRDVGAPEGARAPPAAGARRCRHPGRVIRASQVLSNSRLPLIWFQ

SEQ ID NO: 35267 - protein, 132 aa, Zea mays subsp. mays
APKSTNSSPLSDLDAHRCGRCRRRLMVCCGHGCAGQRAFAAAAARGPGGGRPQVTRSAPRGTSSTGRRRLRGESRKWEDWELPCYVTSFLTVVILGVGLNAKPDLTIETWAHQKALERLQQQELAAADTQAE

SEQ ID NO: 35268 - protein, 107 aa, Zea mays subsp. mays
MVCCGHGCAGQRAFAAAAARGPGGGRPQVTRSAPRGTSSTGRRRLRGESRKWEDWELPCYVTSFLTVVILGVGLNAKPDLTIETWAHQKALERLQQQELAAADTQAE

SEQ ID NO: 35269 - DNA, 705 bp, Zea mays subsp. mays
atgcatagaagagcacgaccgagctaggagaagcacgaacgcgtgcacgcgctgacgccgacgtcaaggtgtacggtaactcggagcgtcatcggagagagagacccgccaccgccacgcttgaccgtaatccgtggagagtgagtgcccggccgggctaccagctaagacacgacggtccatccagccatcggtggcccagcagattccacaatggcggcaacggcggacatggagcggatcttcaagcggttcgacaccaacggggacggcaagatctcgctgtcggagctgacggaggctctgcggactctggggtccacctccgccgacgaggtgcagcgcatgatggccgagatcgacaccgacggcgacggctgcatcgacttcaacgagttcatcaccttcagtaacgccaacccggggctcatgaaggacgtcgcaaaggtcttctgaaacatcacatcatcatcaataggataccatcgatgatcatgcccccaacgtgtcatttcatctggcctgcctcgccggtcttattgctgtcgttcacctccttataagtactactagtaggattttgttttgttttattttatattttcatggtcaccaatcaaatatatatgtggacttccatttatttattttttctgtgtttcctcgaccggataagtgtatacctgccagtccagctttaatttc

SEQ ID NO: 35270 - protein, 80 aa, Zea mays subsp. mays
MAATADMERIFKRFDTNGDGKISLSELTEALRTLGSTSADEVQRMMAEIDTDGDGCIDFNEFITFSNANPGLMKDVAKVF

SEQ ID NO: 35271 - protein, 74 aa, Zea mays subsp. mays
MERIFKRFDTNGDGKISLSELTEALRTLGSTSADEVQRMMAEIDTDGDGCIDFNEFITFSNANPGLMKDVAKVF

SEQ ID NO: 35272 - DNA, 894 bp, Zea mays subsp. mays
  misc_feature (608)..(608): n is a, c, g, or t
  misc_feature (883)..(883): n is a, c, g, or t
gcacgagaccattacctagaacatcctaatcaaaaagcaccgggtccttgctttgcgcgttgctgttcgcataaacaagagatcctagttctactcccaagcaatgtatccgtcagcccctccggacgcgtataacaagttcagcgccggggctccgccaacggcgccgccgccgccggcagcgtaccaccagcagcagcagcagcacggagcgaacatggacacttcacgccccggcggcgggctgaggaaatggtccaccggcctcttccactgcatggacgacccggggaactgtctcatcacatgcctgtgcccctgcgtcacgttcgggcaggtcgctgacatcgtggacaaggggcacctgcccatgtatcgcgagcggactggtgtacgggctcatctgcgcgtcgacggggatggggtgcctgtactcgtgcctctaccggtccaagctgagggccgagtacgacctggacgaaggggagtgcccggacatcctggtgcactgctgctgcgagcacctggctctgtgccaagagtaccgcgagctcaagaaccgcggcttcgacctggggatcggttgggaggctaacatggaccggcanaggcgaggagttgccggcggcggcgcggtgatgggggcgccgccggccataccgctgggcatgattaggtagatgattgattgatgcgaaatggcagaacttgctttcgtggttcttttgtttgactatgtaatgtatcttcgtttccatcgattctatgtaatttaactgtccctttttttttggctctctattgtggaggtcgctgggtgtgaatagcactgttttggatgggtttgtgattggtctagatgacttatataaggtgattgtanagcggagtttt

SEQ ID NO: 35273 - protein, 163 aa, Zea mays subsp. mays
MYPSAPPDAYNKFSAGAPPTAPPPPAAYHQQQQQHGANMDTSRPGGGLRKWSTGLFHCMDDPGNCLITCLCPCVTFGQVADIVDKGHLPMYRERTGVRAHLRVDGDGVPVLVPLPVQAEGRVRPGRRGVPGHPGALLLRAPGSVPRVPRAQEPRLRPGDRLGG

SEQ ID NO: 35274 - protein, 125 aa, Zea mays subsp. mays
MDTSRPGGGLRKWSTGLFHCMDDPGNCLITCLCPCVTFGQVADIVDKGHLPMYRERTGVRAHLRVDGDGVPVLVPLPVQAEGRVRPGRRGVPGHPGALLLRAPGSVPRVPRAQEPRLRPGDRLGG

SEQ ID NO: 35275 - protein, 105 aa, Zea mays subsp. mays
MDDPGNCLITCLCPCVTFGQVADIVDKGHLPMYRERTGVRAHLRVDGDGVPVLVPLPVQAEGRVRPGRRGVPGHPGALLLRAPGSVPRVPRAQEPRLRPGDRLGG

SEQ ID NO: 35276 - DNA, 1435 bp, Zea mays subsp. mays
  misc_feature (496)..(497): n is a, c, g, or t
  misc_feature (501)..(502): n is a, c, g, or t
tagaacatcctaatcgaaaagtttctcgagtaacagtcaacagacaacggcacgtcggcacatcatcttccctggaccctggttgcggctgcaacacagggactcgatggcgtcctcctccctcccggcgcccgcggccggccgcgccgagctcctcaaggccttcgacgacgcccgcacgggcgtgcgaggcctcgtggagtcggttgtctcgtccgtcccggagctcttccgccacgcggacccctacgcctccatcccgctcgccccgcccggcgtttccatccccgtcgtagacctctccctcccgccccacctcgccgcggcggccgccgcggcggccgcccgcacctggggcttcttccacctcgtcaaccacctccacgccctccccgcggccgccgccgccgccgacgacgactaccccgagcgcgccttcgcggcggtgcgcgccttcaacgaactcccccgcccacgagcgcgcgccgcactacanncgcnncgtggacggcggggtcaactactcctccaacgtcgacctgtacaactcccccgcggccagctggcgcgacaccatccagatcctgctgggccccaaccgccacccggacctcgccgaccggatcccggccgcctgccgcgccgaggtgctcgagtgggaggtccgcgccaccgccgtcgcccgcgccttgctcaggctcctctcccaggggctcggcctccgccccgaggcgctggaggacgcgtcctgcgccgacgggaagctcatggtgtgccactactacccgcactgccccgagccggagcggaccatgggcatcgtcccgcacacggaccccggcgtgctcaccgtgctcgcgcaggacggcgtcgggggcctgcaggtgaagcaccaggatgaggacggcaaaatctcatgggtggatgtgaagcccgtgcccggagcgctcgtcatcaacgtcggggacctcttgcagataatgtctaatgacgagtacacgagcgtcgagcatcgggtggtcatgaacacgcgtgaagaacccagggtttccatcggcatcttcttcagccctgggaagagaggggactcggtgttctatgggccgctgccagagctggtctcttcagagaacccgcccaagtacaggaacttcaccatgtccgagttttacgggaccttcttctcacgagaccttgccagcaaggctctactcgataacttcaagctgtcaccgtaaagtgtcgactccagctcgaagagtttagatagactcgtgtatactatagtcatgcgtgaattgtgattgccggctggcaatgtatagaaattgttctgtcttggcctgcatcagtcgtacgcaggtcaccagccgccaccgcagcgtgcccggccgcgctgggcacgctgcatgaccggccagagaagcagcgtcac

SEQ ID NO: 35277 - protein, 264 aa, Zea mays subsp. mays
  misc_feature (130)..(132): Xaa can be any naturally occurring amino acid
MASSSLPAPAAGRAELLKAFDDARTGVRGLVESVVSSVPELFRHADPYASIPLAPPGVSIPVVDLSLPPHLAAAAAAAAARTWGFFHLVNHLHALPAAAAAADDDYPERAFAAVRAFNELPRPRARAALXXXRGRRGQLLLQRRPVQLPRGQLARHHPDPAGPQPPPGPRRPDPGRLPRRGARVGGPRHRRRPRLAQAPLPGARPPPRGAGGRVLRRREAHGVPLLPALPRAGADHGHRPAHGPRRAHRARAGRRRGPAGEAPG

SEQ ID NO: 35278 - protein, 156 aa, Zea mays subsp. mays
MVCHYYPHCPEPERTMGIVPHTDPGVLTVLAQDGVGGLQVKHQDEDGKISWVDVKPVPGALVINVGDLLQIMSNDEYTSVEHRVVMNTREEPRVSIGIFFSPGKRGDSVFYGPLPELVSSENPPKYRNFTMSEFYGTFFSRDLASKALLDNFKLSP

SEQ ID NO: 35279 - protein, 141 aa, Zea mays subsp. mays
MGIVPHTDPGVLTVLAQDGVGGLQVKHQDEDGKISWVDVKPVPGALVINVGDLLQIMSNDEYTSVEHRVVMNTREEPRVSIGIFFSPGKRGDSVFYGPLPELVSSENPPKYRNFTMSEFYGTFFSRDLASKALLDNFKLSP

SEQ ID NO: 35280 - DNA, 1161 bp, Zea mays subsp. mays
caaaacaatgagacggaccatatcatacatattaaagatgtgtgacatgctgttctctcaattatgcctgagaattccatccacaaatgcgatgcaagttaggggtcttcagtcccttggtcaactttttggttatacatctaagaacatcgatagtcatttggaaacccttgcatctcaccaaagtattggaaataagaatatttgccggagtgagacattgcaagatattggcatagatcaatctggtcaatccacttctttctgtgaagcatcaatggcagcactgcttctgagagggctcgcgatagccccaatgcagcttgtagcccgtgtaccaacctctttgtttttctggccattgatacagcttgaaggggcagccagtgatgacattgcattgggtattgctgttggtagcacaggaagaggcaaccttcctggtgctacatcagatatccgagcagcactccttttacttttgatcggtaaatgcacagctgatcaggaggcactgaaagaggtagaaggcaatgagttcttcaggggtcttctggatgacacagattcaagggtagcatactattctgccgcttttcttttgaagagaatgatgacagaggaaccagagatataccaacggatgcttcaaagcctcatctcaaaagctcaacagtgtaacaatgagaaacttctggagaacccataccttcagatgcgtgggatattgcagttatcaaatgacctaggagttcaatgataagatcgtgatgacatttcaatggataaagctctaagttagaatcactacttctggctgtgtttattgcagagaacctgaagatgttccgaactaagttttgcagatgctatgtgaatcatgtaaattattgctttggccagatgcatgtacagatccatgaatttctttattctttgttagactagtcacagtccaagggagtcacagattaacaagataatctgatgatcatcctgtgttatggacacagtgcattgtggtttaccaacctggacgacttgacaaaggtttaagccaaggtggcgtagatgtgactccctacaattttgtattgcagaaaccgttgagatctgaggcaaggcattatatatattttttgggcgagacatgctcggttc

SEQ ID NO: 35281 - protein, 252 aa, Zea mays subsp. mays
KTMRRTISYILKMCDMLFSQLCLRIPSTNAMQVRGLQSLGQLFGYTSKNIDSHLETLASHQSIGNKNICRSETLQDIGIDQSGQSTSFCEASMAALLLRGLAIAPMQLVARVPTSLFFWPLIQLEGAASDDIALGIAVGSTGRGNLPGATSDIRAALLLLLIGKCTADQEALKEVEGNEFFRGLLDDTDSRVAYYSAAFLLKRMMTEEPEIYQRMLQSLISKAQQCNNEKLLENPYLQMRGILQLSNDLGVQ

SEQ ID NO: 35282 - protein, 250 aa, Zea mays subsp. mays
MRRTISYILKMCDMLFSQLCLRIPSTNAMQVRGLQSLGQLFGYTSKNIDSHLETLASHQSIGNKNICRSETLQDIGIDQSGQSTSFCEASMAALLLRGLAIAPMQLVARVPTSLFFWPLIQLEGAASDDIALGIAVGSTGRGNLPGATSDIRAALLLLLIGKCTADQEALKEVEGNEFFRGLLDDTDSRVAYYSAAFLLKRMMTEEPEIYQRMLQSLISKAQQCNNEKLLENPYLQMRGILQLSNDLGVQ

SEQ ID NO: 35283 - protein, 240 aa, Zea mays subsp. mays
MCDMLFSQLCLRIPSTNAMQVRGLQSLGQLFGYTSKNIDSHLETLASHQSIGNKNICRSETLQDIGIDQSGQSTSFCEASMAALLLRGLAIAPMQLVARVPTSLFFWPLIQLEGAASDDIALGIAVGSTGRGNLPGATSDIRAALLLLLIGKCTADQEALKEVEGNEFFRGLLDDTDSRVAYYSAAFLLKRMMTEEPEIYQRMLQSLISKAQQCNNEKLLENPYLQMRGILQLSNDLGVQ

SEQ ID NO: 35284 - DNA, 1061 bp, Zea mays subsp. mays
gagagtcgcagccgccgactcccagtcgcccacgccccaccgacccgcccccagcctcggagctccgtcggctgtgccccggccgtccgtctctggccagagctccgccacacccagtaccaccgccagccgatcagagctccgcctccggccagtggctcaggccgcccgcccgcctggcaggacgcctcgccgagctctttcccggcagctgctcgcccgcgccgatcttttcttcggcagccgcgcgcccgcgccaagctcctccccgcggatccgcctctgctcagtctgagctccggccagccgcgagctccgtcgaggcgtcgacgccgaggcccagctccgcccgtgagtgcctgtgccggattcagcaaacagaaatttgctctgctggttatatagatggaggtgccaatgaacaccacgcaatctggtcctcacttccctgtgcagcatcggtccctctcgttagacatcaagggaaataaaacagatattgttatcaataaatatgaagatacctttctggtgattgtgacacaaatcggctgcatgggaaccatactagctgccaagaaagatgaaagtgttttctccaacccaacctacaatgtgtctgttctttttgggaagagagatgagccactcctactagcttgcgcacgtcaacttattgagcacataagtggcagtggctcagcccggtcattggtgatttctctgggtctgaaagatcattctcagggaacactgaaggatattactgtagctgtgatcgacaatcgcctttggtgatgattgaatagctgatgagctgggcttgggattggctcgatggttggcatattcagcccatcgataaagatactgtttagccatcgtttataccatgcactaaattctggtagttttgtagttagaccttctatctacttggattaacaaaaggtgggtttaagctgctgtcaaaatttgagtgtcaattttcacgctaaacaaaaggcactgtacactggtaaaacacttctgaggcgaatcatgcttttcgaggctatctg

SEQ ID NO: 35285 - protein, 162 aa, Zea mays subsp. mays
ESQPPTPSRPRPTDPPPASELRRLCPGRPSLARAPPHPVPPPADQSSASGQWLRPPARLAGRLAELFPGSCSPAPIFSSAAARPRQAPPRGSASAQSELRPAASSVEASTPRPSSARECLCRIQQTEICSAGYIDGGANEHHAIWSSLPCAASVPLVRHQGK

SEQ ID NO: 35286 - protein, 134 aa, Zea mays subsp. mays
ESRSRRLPVAHAPPTRPQPRSSVGCAPAVRLWPELRHTQYHRQPIRAPPPASGSGRPPAWQDASPSSFPAAARPRRSFLRQPRARAKLLPADPPLLSLSSGQPRAPSRRRRRGPAPPVSACAGFSKQKFALLVI

SEQ ID NO: 35287 - protein, 130 aa, Zea mays subsp. mays
MEVPMNTTQSGPHFPVQHRSLSLDIKGNKTDIVINKYEDTFLVIVTQIGCMGTILAAKKDESVFSNPTYNVSVLFGKRDEPLLLACARQLIEHISGSGSARSLVISLGLKDHSQGTLKDITVAVIDNRLW

SEQ ID NO: 35288 - DNA, 1178 bp, Zea mays subsp. mays
gcacgagaccattacctagaacatcctaatcgaaaaaaagaagcgttggatcgtcttcggctagcttccggcgcgatggcggggcaggggcagcgcctgaacgtggtgccgacggtgacgacgctgggcacggtgaaggcgcggctggcgggcgccgcccgcggccacgcgctgctcaagaagaagtcggacgcgctgacggtgcagttccgcgccatcctcaggcgcatcgtgtccgccaaggacgccgtgggcgacgccatgcgcaccgcctcgctctcgctcgccgaggcgctgtacgtggccggcgcgccgctccggccacgctgcgcagcagtccgtgtccggcccggccaggctccgcgtgcgcgcgcaccaggacaacatcgccggcgtccgcctcccgcgcttcgagagcgacgcagcgtcgcctgcaggctctgcagcatcgccggcgtcgctcgccgggctcgccggcggcgggcagcaggtgtcggcctgccgcgcggcgtacgcgcgcgcgctccaggtgctggtggagctggcgtcgctgcagacgtcgttcctcgcgctggacgcgtccatcaagaccaccaaccggcgcgtcaacgcgctggagagcgtggtgaagccgcgcctggagaacaccatcgcctacatcaggggcgagctggacgagcacgagcgggaggagttcttccgcctcaagaagatccaggggtacaagcagcgcgagctcgagcgccagaaggaggccgccagccgctacgccgaggagaaggccgccggcgaggtcgcgctcaagcgcggcgtttccgtcgccactgcggagagcatgctggagaacggcgacagggacgaggaggatatcatcttttgagcctgtggagtgtggagtcctatgagtagagcgtgcagtggctgtgctacacctgcggcgccaaacagcaaccttctgtacacacagcccaataagctcgtagctgcagccggtgagccggagcccggaggctacgcgtatattccatctctgcgttaatccatgcgtgtgttttctcacttttttttgttgactgtcacagtggcgaagaacatcctcagctgaatttcattgaaagcaaccttgtttttggaaaaaagaggcaaaacctatataaaattgtggttgaccacatatt

SEQ ID NO: 35289 - protein, 302 aa, Zea mays subsp. mays
ARDHYLEHPNRKKEALDRLRLASGAMAGQGQRLNVVPTVTTLGTVKARLAGAARGHALLKKKSDALTVQFRAILRRIVSAKDAVGDAMRTASLSLAEALYVAGAPLRPRCAAVRVRPGQAPRARAPGQHRRRPPPALRERRSVACRLCSIAGVARRARRRRAAGVGLPRGVRARAPGAGGAGVAADVVPRAGRVHQDHQPARQRAGERGEAAPGEHHRLHQGRAGRARAGGVLPPQEDPGVQAARARAPEGGRQPLRRGEGRRRGRAQARRFRRHCGEHAGERRQGRGGYHLLSLWSVESYE

SEQ ID NO: 35290 - protein, 277 aa, Zea mays subsp. mays
MAGQGQRLNVVPTVTTLGTVKARLAGAARGHALLKKKSDALTVQFRAILRRIVSAKDAVGDAMRTASLSLAEALYVAGAPLRPRCAAVRVRPGQAPRARAPGQHRRRPPPALRERRSVACRLCSIAGVARRARRRRAAGVGLPRGVRARAPGAGGAGVAADVVPRAGRVHQDHQPARQRAGERGEAAPGEHHRLHQGRAGRARAGGVLPPQEDPGVQAARARAPEGGRQPLRRGEGRRRGRAQARRFRRHCGEHAGERRQGRGGYHLLSLWSVESYE

SEQ ID NO: 35291 - protein, 215 aa, Zea mays subsp. mays
MRTASLSLAEALYVAGAPLRPRCAAVRVRPGQAPRARAPGQHRRRPPPALRERRSVACRLCSIAGVARRARRRRAAGVGLPRGVRARAPGAGGAGVAADVVPRAGRVHQDHQPARQRAGERGEAAPGEHHRLHQGRAGRARAGGVLPPQEDPGVQAARARAPEGGRQPLRRGEGRRRGRAQARRFRRHCGEHAGERRQGRGGYHLLSLWSVESYE

SEQ ID NO: 35292 - DNA, 1016 bp, Zea mays subsp. mays
acacagacacagcagccgtttccactgacagtttctcagaaccacagcctcgatccatcgggggagaggatgggagagcctacgcggcaggagctggcggaggcggcgctcgccggggagtcggcggagcagcgcaaccgcttcctggtgctgcggctgtacgaggcgctcggctcccgcgacgcgcgccgggcgcggaagctgctggcgcccgacctcgagtggtggttccacgggccccccacgcgccagcacatgatgcgcctcctcaccggcgcggaccaccagcgccacatgagcggcggcgggttcgccttctccccgcgctccgtcgacgccttcgggtccaccgtcgtcgcggagggcggcgctgacgacgcgcgccagctctactgggtgcacgcctggaccgtggggcccgacggggtcatcacacagctcagggagtacttcaacaccgacctcactgtcaccctcctcgccggcgctgcctccgccaagaaagctgctccgcctaagcagcagcaggacgctgcctcttcttctacctcctcctcctcacccccctcggctgcgtcgtcgtctgcagctgcagggtccaggtgcctgtggcagagccgccgcgccgacagcgcgcacaagtcgctgccgggcctcgtcctcgccatctgagactagagacagcaagatccatctaccctccattataagtttataaccttattacaaaagatcctaaaattcgaaactgttattgcataaataatctggaactgcactagttgtatgtactcggagtcggagtcagtcagtgaagacgtaatgacgatgcgcgtatggactgaactgctcgatcctccgtgttgtgacttgtgaggttcaggtaccagttccttgcttagctcgtgtcgtgtgtgctgctactaggctgtaaggatcgactgttattgtccgagtctgctggatcatggatgtgatgtgatggtatatcgtggtggttaaataaaagttgcatg

SEQ ID NO: 35293 - protein, 223 aa, Zea mays subsp. mays
TQTQQPFPLTVSQNHSLDPSGERMGEPTRQELAEAALAGESAEQRNRFLVLRLYEALGSRDARRARKLLAPDLEWWFHGPPTRQHMMRLLTGADHQRHMSGGGFAFSPRSVDAFGSTVVAEGGADDARQLYWVHAWTVGPDGVITQLREYFNTDLTVTLLAGAASAKKAAPPKQQQDAASSSTSSSSPPSAASSSAAAGSRCLWQSRRADSAHKSLPGLVLAI

SEQ ID NO: 35294 - protein, 200 aa, Zea mays subsp. mays
MGEPTRQELAEAALAGESAEQRNRFLVLRLYEALGSRDARRARKLLAPDLEWWFHGPPTRQHMMRLLTGADHQRHMSGGGFAFSPRSVDAFGSTVVAEGGADDARQLYWVHAWTVGPDGVITQLREYFNTDLTVTLLAGAASAKKAAPPKQQQDAASSSTSSSSPPSAASSSAAAGSRCLWQSRRADSAHKSLPGLVLAI

SEQ ID NO: 35295 - protein, 138 aa, Zea mays subsp. mays
MMRLLTGADHQRHMSGGGFAFSPRSVDAFGSTVVAEGGADDARQLYWVHAWTVGPDGVITQLREYFNTDLTVTLLAGAASAKKAAPPKQQQDAASSSTSSSSPPSAASSSAAAGSRCLWQSRRADSAHKSLPGLVLAI

SEQ ID NO: 35296 - DNA, 1829 bp, Zea mays subsp. mays
  misc_feature (584)..(584): n is a, c, g, or t
aagacaagcaagcacacgcgtctcgtagtactgggggagaacgacgaagcaaacaccaccaagataatgacgtccaagggaacgaggccgtggagcaggctctccgaggccgagaccgccgtgaaccgcgccgtcgccgggagccgcgtggggagatacttcaagctggacgcgcgcaagagctccttcaccaaggagctccgcgccggcgccgccacgttcctcaccatggcctacatcatctccgtcaacgccgccgtcctgaccgactccggcgggccgtgcacggtgcgggactgcacccccgtgcccaccaactcgaccgtggcggccacgccgcctgggccggagtgcacggtcgccggggctaataacccggggtaccagcagtgcctggcgcgcaccaagagcgacctggtcgtggccacggccgtggccgccatggccggctccttcgccatgggcctcttcgccaacctctcgctcgcgctggcccccggcatgggcgccaacgcctacttcgcctacaacatggtcgggttccacgggtccggccccatcggctacagcacggcgctggaggnccctccaggcgcaccagggggtcgggctcgtcggcgccagcccgtccacgctggtcacgctcaccgcctgctccgacgtggacacggtcaccggcgcctgcctcggcggcaccatgcgcagcccgacgttctggctcggcgccgtcggcttcctcatcacggccacgtgcctggccagggacgtcaaggggagcatgatcttcggcatgctgttcgttacggtggtctcctggatcaggggcaccagcgtcaccatgttcccggacacgccggtgggcaatgccggcttcgcctacttcaagaaggtggtggacttccacatgatccgcaacaccgcggggcagctgagcttcggcggcttccggcacggcaacgtctggctcgccctgctcacgctcctctacgtggacgtccttgacacgacggggacaatgtactcgatggccgagtacggagggttcacggacggcgccggcggcgggttcgagggcgagtaccgcgcgttcctcgtggacgccgggtccacggtgctcagcgcggggctcgggagctccacggtcactacctacatcgagtccaccgcggggatccgggagggcgggcggacggggctgacggccatcaccgtggccgcctgcttcctggcgtccctcttcttcggtccgctgctgatgagcgtgccgccgtgggccgtaggcccgtcgcctggtcctcgtgggcgccatgatgatgcgcgtcgccaaggacatcgagtggggcgacatgaaggagggagtcccggcgttcgtgaccatggcgctgatgccgttgtccttctccatcgccaacggcatcatcgccgggctgggcgtctacgtcgcgctgcactggtacgactgggcgcgccacgggtacggcaaggtgaggaacgcgctggacgagcggcggaaccaggtggccgccgccgcgggcgaagtcggaccggcggcgcaggacgtcgtctgatcggtctccgatgtgtttgaccgtagcaggtcatgttgtttacttgtttagtaggctaattagctttgtcatgcatcatcgcttttgggggagctttcagatggcgtcgctggattagaagttcggtcggcacgggttggtgctgggccctacatgcccctgtgtatggactatggagtatgtatggtaatggagtgggaacaactgaatggggcctgctcggagattcttgatgtgcaaggaggtgttcgtactttgacc

SEQ ID NO: 35297 - protein, 333 aa, Zea mays subsp. mays
  misc_feature (195)..(195): Xaa can be any naturally occurring amino acid
KTSKHTRLVVLGENDEANTTKIMTSKGTRPWSRLSEAETAVNRAVAGSRVGRYFKLDARKSSFTKELRAGAATFLTMAYIISVNAAVLTDSGGPCTVRDCTPVPTNSTVAATPPGPECTVAGANNPGYQQCLARTKSDLVVATAVAAMAGSFAMGLFANLSLALAPGMGANAYFAYNMVGFHGSGPIGYSTALEXPPGAPGGRARRRQPVHAGHAHRLLRRGHGHRRLPRRHHAQPDVLARRRRLPHHGHVPGQGRQGEHDLRHAVRYGGLLDQGHQRHHVPGHAGGQCRLRLLQEGGGLPHDPQHRGAAELRRLPARQRLARPAHAPLRGRP

SEQ ID NO: 35298 - protein, 311 aa, Zea mays subsp. mays
  misc_feature (173)..(173): Xaa can be any naturally occurring amino acid
MTSKGTRPWSRLSEAETAVNRAVAGSRVGRYFKLDARKSSFTKELRAGAATFLTMAYIISVNAAVLTDSGGPCTVRDCTPVPTNSTVAATPPGPECTVAGANNPGYQQCLARTKSDLVVATAVAAMAGSFAMGLFANLSLALAPGMGANAYFAYNMVGFHGSGPIGYSTALEXPPGAPGGRARRRQPVHAGHAHRLLRRGHGHRRLPRRHHAQPDVLARRRRLPHHGHVPGQGRQGEHDLRHAVRYGGLLDQGHQRHHVPGHAGGQCRLRLLQEGGGLPHDPQHRGAAELRRLPARQRLARPAHAPLRGRP

SEQ ID NO: 35299 - protein, 296 aa, Zea mays subsp. mays
MRSPTFWLGAVGFLITATCLARDVKGSMIFGMLFVTVVSWIRGTSVTMFPDTPVGNAGFAYFKKVVDFHMIRNTAGQLSFGGFRHGNVWLALLTLLYVDVLDTTGTMYSMAEYGGFTDGAGGGFEGEYRAFLVDAGSTVLSAGLGSSTVTTYIESTAGIREGGRTGLTAITVAACFLASLFFGPLLMSVPPWAVGPSPGPRGRHDDARRQGHRVGRHEGGSPGVRDHGADAVVLLHRQRHHRRAGRLRRAALVRLGAPRVRQGEERAGRAAEPGGRRRGRSRTGGAGRRLIGLRCV

SEQ ID NO: 35300 - DNA, 1564 bp, Zea mays subsp. mays
catcctaatcaaaaaagctgcaatgtctctcaagagcatcgttcgggagctgaaggagatgagggacggcatcgggagcatgtcgagacgcggcggcagcggctccgacggccgcgccgccggccacgcccgctcggggtcgcggcattcctggcctagcctgtgggcggagcagcaacagccgcagcggcagggccagggccagggcctgggtcaggaggggccgcggcatcagcaccaggggcggtgggcggacctgcctccggaactgctgctggatgtgatacagagggtggagtccagcgaggcgacgtggccggcgcggcgccaggtcgtggcgtgcgccgctgtttgccggtcgtggcgcgaggtcaccaaggatgtggtgaagacgctcgaggagtgcggcagaatcaccttccccatatcccttaagcagcccgggcctcgcgaactgccggtacagtgttttgtgaggagggagagggcgacatccacatatctactctacctagggctcagcccatctatgaaatgtggaaaacgacaagctatttgcttgcagctcgtaaggtcaggcgtgccactcggacttctttcgtgatctcactggtctctgatgatttctctcgctccagtagcacctacgtcggcaagctgaagccgaacttcctcggcacaaagttcacgatattcgacagccagccgcctcccgacgctgttgcgctaccaaacaacagaccgagcaaaaggcagtcgaagcaagtgtcaccgagactgccactaggcaactacaacgtcgccacggtcacgtatgagctcaccgtcctgcgcaacagggggccaaggagaatgcagtgcaccatgcactcgataccagccgagtgcatccaggagggcgggaaggccccaacccctaccggcaccgtccagtcgcttgacgagccagtgcccaccttacctagtaccaccaaggggaaggaagtggctgtacaattttcttcgacgagcctcagcgccgatctgtctggaccggtttctgggaacgaagcgcctctagttctgaagaacaaagccccgcgctggcacgagcagctgcagtgctggtgcctcaacttccgggggcgtgtcaccgtcgcttcggtgaagaacttccagctcgtcgcgtcagttgacccttccctaaacgtccccgcagcggagcaggagaaggtgatcctccagttcgggaagatcgggaaggatatattcaccatggactaccggtacccactctcggcgttccaggccttcgcgatctgcctgaccagcttcgacaccaagccagcgtgcgaataactgaaggtagcataaaagctggggtgggtatgttcgtcctgggcgacgtgaatttcttgatcttgccacatcggagcctgtgcccaggcgaaatggtcgcttgtgatgggggtgtgaagatgagctatggcatttgtaccataggaacagatttgaacgacctggactgttatatgtatcgttgttgggatgcctggctgtgaaatatcactgccgcatcgtatcg

SEQ ID NO: 35301 - protein, 267 aa, Zea mays subsp. mays
MWKTTSYLLAARKVRRATRTSFVISLVSDDFSRSSSTYVGKLKPNFLGTKFTIFDSQPPPDAVALPNNRPSKRQSKQVSPRLPLGNYNVATVTYELTVLRNRGPRRMQCTMHSIPAECIQEGGKAPTPTGTVQSLDEPVPTLPSTTKGKEVAVQFSSTSLSADLSGPVSGNEAPLVLKNKAPRWHEQLQCWCLNFRGRVTVASVKNFQLVASVDPSLNVPAAEQEKVILQFGKIGKDIFTMDYRYPLSAFQAFAICLTSFDTKPACE

SEQ ID NO: 35302 - protein, 200 aa, Zea mays subsp. mays
ILIKKAAMSLKSIVRELKEMRDGIGSMSRRGGSGSDGRAAGHARSGSRHSWPSLWAEQQQPQRQGQGQGLGQEGPRHQHQGRWADLPPELLLDVIQRVESSEATWPARRQVVACAAVCRSWREVTKDVVKTLEECGRITFPISLKQPGPRELPVQCFVRRERATSTYLLYLGLSPSMKCGKRQAICLQLVRSGVPLGLLS

SEQ ID NO: 35303 - protein, 193 aa, Zea mays subsp. mays
MSLKSIVRELKEMRDGIGSMSRRGGSGSDGRAAGHARSGSRHSWPSLWAEQQQPQRQGQGQGLGQEGPRHQHQGRWADLPPELLLDVIQRVESSEATWPARRQVVACAAVCRSWREVTKDVVKTLEECGRITFPISLKQPGPRELPVQCFVRRERATSTYLLYLGLSPSMKCGKRQAICLQLVRSGVPLGLLS

SEQ ID NO: 35304 - DNA, 1307 bp, Zea mays subsp. mays
gaccaccgctcgaggggacgcgggacgccctccatgattctgcgctccgcgccgcgtcgcctccacctactccgcccgcaccacctccggctcctctccgccgccgcgctcgcttccgcggtcccggtcccggccccggcccagtccccaattgagtgggccgaggctccgcttgcctccgtgcgccctgccaccgccgacgcatcgctcttccacgtctccctcgacctctccgcgcaccgggggctcctcgcctcccacaccgccgccggccagttcctccgcttccgcctccccgcctcttcctaccacatcttcctcgccatcgcatcccctcctcccccacctgcgctcgagaccctagccctagccgggccaccttcctgcttcgaattcctcgtcaagcgcctcccgggaaccccctccgcgcgcctctgcgacctccgccccggcgaccttgtccatgttggcgccagcgtcgtcggccgcggatttgatgtcgccaggatatctgatgccctcgacgttctcgtcttcgccaccggatccgggatcagccctatacggtcacttattgagtcaggttttgctgaaaacaaaaaaactgatgtaagactcttttatggggttagaaatcttcagaggatggcatatcaggaaaggtttgaggattgggaatccagaggagttaaaattgtacctgtcctctccagaccagatagtcaatggacaggggagagaggttatatccagaatgtgttctcaaggatgaagaatactgtaaaccctccatcagtgggagtaattttgtgtgggcataaacagatgagtgaggagatcacaagagttcttgttgccgatggtttgtcaaaagatagaatcttaactaacttctgatcgccagaaggacattgttccatcctttgtagaggttgtacctttttttttttgtaccacagtcaagcagctactctttacaaccgcacaatggcacaagtgcaaatcgcaacaggaagacagttgcgtgattacaaataagttcattttcttctccatgtgaccacattggcttattgctgaatgactggtgtagttctccttttttagaaaaagaatacctgatgtgaatctcacatgcactggctctagctgagatgtgttctatagcatctgagacattgatcccctgtaaggctctgatgtacttcagagaaggccctttttggagaagtaagaaggggatatagatgtagcattattcaaaattttgaattaattgagtggaatgtaatggatgcatgctgttt

SEQ ID NO: 35305 - protein, 298 aa, Zea mays subsp. mays
DHRSRGRGTPSMILRSAPRRLHLLRPHHLRLLSAAALASAVPVPAPAQSPIEWAEAPLASVRPATADASLFHVSLDLSAHRGLLASHTAAGQFLRFRLPASSYHIFLAIASPPPPPALETLALAGPPSCFEFLVKRLPGTPSARLCDLRPGDLVHVGASVVGRGFDVARISDALDVLVFATGSGISPIRSLIESGFAENKKTDVRLFYGVRNLQRMAYQERFEDWESRGVKIVPVLSRPDSQWTGERGYIQNVFSRMKNTVNPPSVGVILCGHKQMSEEITRVLVADGLSKDRILTNF

SEQ ID NO: 35306 - protein, 287 aa, Zea mays subsp. mays
MILRSAPRRLHLLRPHHLRLLSAAALASAVPVPAPAQSPIEWAEAPLASVRPATADASLFHVSLDLSAHRGLLASHTAAGQFLRFRLPASSYHIFLAIASPPPPPALETLALAGPPSCFEFLVKRLPGTPSARLCDLRPGDLVHVGASVVGRGFDVARISDALDVLVFATGSGISPIRSLIESGFAENKKTDVRLFYGVRNLQRMAYQERFEDWESRGVKIVPVLSRPDSQWTGERGYIQNVFSRMKNTVNPPSVGVILCGHKQMSEEITRVLVADGLSKDRILTNF

SEQ ID NO: 35307 - DNA, 1189 bp, Zea mays subsp. mays
actcggagacggcgttgggagaggagaaccgcaccgcggcgcagacatgggcgagttctgcccctccccgcagggggactccgcgctggcggcgccgcccttgacgctctcctccccgtccccagcaacggcggttaggccgagctacgggagctgcgaccgccgctacgtgaagctggtcttcgacaacctccacgggagcatctccgtagacccgttggccctgcagtttgttgataccgaagagtttcagaggttgcgggacttgaaacaacttggtcttacatatctcgtctatcctggagcggttcacacacgcttcgaacactcattaggtgtatattcgttggctggaaaggctataaataatcttaagacatatcagggagaagaacttggaattgatcatgttgacatgcagactgtaaaacttgcaggtctcttgcatgatatcggacatggacccttcagtcatttgtttgagcatgagtttcttcctcgagttgatcctggctcatcctggtctcatgaagatatgtcagtgctccttttggacagtattgttgacaaacatgcaatagatattgaaaatggttatctcaaaatggtcaaggagatgataactgccagcgctaagcctaccagcacaaaaagtgcaaacgagaagcattttctttatgacattgttgctaatggtcgtaatggtatagatgttgacaagtttgactacgttggccgtgactgcagagcatgtggtcttggctgtaatttccagtattggaggttgttggaaggcatgcgagtgatgggtgatgaaatttgctacccagccaaagactacttgagcatccataaattgttttcaacacgtgctgatctgcaccgcacagtctacacccatgcgaaagtaaaggctgttgaactcatgcttgtcgatgcactcattgaggctaatgactacttggggatatcattgcatgcacacgacccagaagatttttggaagttggatgacacaatcatcaaaaccattgagactgctcccaacaatgaactgaaaaaagcaaaagaaatcattcaacgtattcgccgaagagaactttacaagttttgcaaccagtattctgttccaaaggacaaactggagcatttcaaaaatattactgcacaggacatagtttgttcgcag

SEQ ID NO: 35308 - protein, 396 aa, Zea mays subsp. mays
LGDGVGRGEPHRGADMGEFCPSPQGDSALAAPPLTLSSPSPATAVRPSYGSCDRRYVKLVFDNLHGSISVDPLALQFVDTEEFQRLRDLKQLGLTYLVYPGAVHTRFEHSLGVYSLAGKAINNLKTYQGEELGIDHVDMQTVKLAGLLHDIGHGPFSHLFEHEFLPRVDPGSSWSHEDMSVLLLDSIVDKHAIDIENGYLKMVKEMITASAKPTSTKSANEKHFLYDIVANGRNGIDVDKFDYVGRDCRACGLGCNFQYWRLLEGMRVMGDEICYPAKDYLSIHKLFSTRADLHRTVYTHAKVKAVELMLVDALIEANDYLGISLHAHDPEDFWKLDDTIIKTIETAPNNELKKAKEIIQRIRRRELYKFCNQYSVPKDKLEHFKNITAQDIVCSQ

SEQ ID NO: 35309 - protein, 381 aa, Zea mays subsp. mays
MGEFCPSPQGDSALAAPPLTLSSPSPATAVRPSYGSCDRRYVKLVFDNLHGSISVDPLALQFVDTEEFQRLRDLKQLGLTYLVYPGAVHTRFEHSLGVYSLAGKAINNLKTYQGEELGIDHVDMQTVKLAGLLHDIGHGPFSHLFEHEFLPRVDPGSSWSHEDMSVLLLDSIVDKHAIDIENGYLKMVKEMITASAKPTSTKSANEKHFLYDIVANGRNGIDVDKFDYVGRDCRACGLGCNFQYWRLLEGMRVMGDEICYPAKDYLSIHKLFSTRADLHRTVYTHAKVKAVELMLVDALIEANDYLGISLHAHDPEDFWKLDDTIIKTIETAPNNELKKAKEIIQRIRRRELYKFCNQYSVPKDKLEHFKNITAQDIVCSQ

SEQ ID NO: 35310 - protein, 258 aa, Zea mays subsp. mays
MQTVKLAGLLHDIGHGPFSHLFEHEFLPRVDPGSSWSHEDMSVLLLDSIVDKHAIDIENGYLKMVKEMITASAKPTSTKSANEKHFLYDIVANGRNGIDVDKFDYVGRDCRACGLGCNFQYWRLLEGMRVMGDEICYPAKDYLSIHKLFSTRADLHRTVYTHAKVKAVELMLVDALIEANDYLGISLHAHDPEDFWKLDDTIIKTIETAPNNELKKAKEIIQRIRRRELYKFCNQYSVPKDKLEHFKNITAQDIVCSQ

SEQ ID NO: 35311 - DNA, 885 bp, Zea mays subsp. mays
  misc_feature (658)..(658): n is a, c, g, or t
caagggatatgttttggagtatgaaacgccagaaggggttgtttcggtgcaggctataaagtgttatcatgactattccatctatatgttgctagcaacattttgcgtccactttcaagcgatgctgcagatgctctatcaagattctattatccaccggttgctgctgtaactgtttcgtatccaaaggaagcaattagaaaagaatgcttaattgatggggagctccagggctttggccagttgcatccacgtagtcaaggagttgagacattaggaacaatatacagttcatctactctttccaaatcgtgctcctgatggtagggtgttacttctaaactacataggaggtgctacaaacacaggaattgtttccaagattgaaagtgagctggtcgaagcagttgaccgtgacctccgaaaaatgcttataaattctacagcagtggaccctttagtccttggtgtccgagtttggccacaagccatacctcagttcctggtaggacatcttgatcttctggaagccgcaaaagctgccctggaccgaggtggctacgatgggctgttcctaggagggaactatgttgcaggagttgccctgggcagatgcgttgagggcgcgtatgagagtgcctcgcaaatatctgacttnttgaccaagtatgcctacaagtgatgaaagaagtggagcgctacttgttaattgtttatgttgcatagatgaggtgcctccggaaaaaaaagctttaatattttttattcttattttgtaaattgcatttctgttcttttttctgtcagtaattagttatattttagttctgtaggagattgttctgttcactgcccttcaaaagaaattttatttttcattctttt

SEQ ID NO: 35312 - protein, 84 aa, Zea mays subsp. mays
  misc_feature (77)..(77): Xaa can be any naturally occurring amino acid
MLINSTAVDPLVLGVRVWPQAIPQFLVGHLDLLEAAKAALDRGGYDGLFLGGNYVAGVALGRCVEGAYESASQISDXLTKYAYK

SEQ ID NO: 35313 - protein, 56 aa, Zea mays subsp. mays
KGYVLEYETPEGVVSVQAIKCYHDYSIYMLLATFCVHFQAMLQMLYQDSIIHRLLL

SEQ ID NO: 35314 - DNA, 811 bp, Zea mays subsp. mays
atatgcctaataaaaggcataaacctggcctcaccccaccgcgagccgaaccggagcgtcaagcaaacatccgtcgatcccgattccgaccactgcgctcgcgccatcgcgccatccacccggcattgtgcgcccgagccgggctcgttggatggcgtccggaggcgccgcccgcggtcgccttgctgaggagcgcaaggcgtggcgcaagagccatcccctcggctttgtggccaagccggcgatgctgccggatggttctgtcaatctcatgctctggaactgcgtcgtccccggcaaggaaggcactgattgggaaggtggatatttcccggtcactctccatttcactgaaaattacccaagtaaccccccaacctgcaagttcccacgaaggtttttccatgtcaatgtctatgattctggggatgtatgcctgtcaatacttggtgatgcatgggcgccttctatcacagtgcggcaaattctaataggcatccaggagctgctggagaacccaaacccagcctctcccgcacaggattttgcttacgatgtttttgcagagaatatgccagaatacaagagacgcgtccgtgagcaagccaagaggtatccgtcgctcgtgtagccgtggacctctgcaacacaattgctgctaaccaagtagtcactcactttggtgtagtggaacttgttcatgacgtgcttaactatggtgtctagttagccgtacgcttgttggaactgctaaagtgcagcttattggaactgctaaaatgcccttgactacgtcttattattatggttt

SEQ ID NO: 35315 - protein, 162 aa, Zea mays subsp. mays
MPNKRHKPGLTPPRAEPERQANIRRSRFRPLRSRHRAIHPALCARAGLVGWRPEAPPAVALLRSARRGARAIPSALWPSRRCCRMVLSISCSGTASSPARKALIGKVDISRSLSISLKITQVTPQPASSHEGFSMSMSMILGMYACQYLVMHGRLLSQCGKF

SEQ ID NO: 35316 - protein, 159 aa, Zea mays subsp. mays
MASGGAARGRLAEERKAWRKSHPLGFVAKPAMLPDGSVNLMLWNCVVPGKEGTDWEGGYFPVTLHFTENYPSNPPTCKFPRRFFHVNVYDSGDVCLSILGDAWAPSITVRQILIGIQELLENPNPASPAQDFAYDVFAENMPEYKRRVREQAKRYPSLV

SEQ ID NO: 35317 - protein, 128 aa, Zea mays subsp. mays
MLPDGSVNLMLWNCVVPGKEGTDWEGGYFPVTLHFTENYPSNPPTCKFPRRFFHVNVYDSGDVCLSILGDAWAPSITVRQILIGIQELLENPNPASPAQDFAYDVFAENMPEYKRRVREQAKRYPSLV

SEQ ID NO: 35318 - DNA, 1076 bp, Zea mays subsp. mays
gaggctgcgagagagagagagagagagagagagagagagagagagagagcgagagagagagagagagagagagaggcgccgccgcgccgacgccgagtcctttctccatcctgcatctgccgctgtttccgacaggatgtttctcacgaggacggagtacgaccgcggggtgaacaccttctctccggaggggcggctgttccaggtcgagtacgccatcgaggccatcaagttgggatccactgcgatcggtttgaagacaaaggatggtgttgtactcgccgttgagaaacgtgtgacctcaccactgctggaaccaagcagtgtggaaaaaataatggaaattgatgagcacataggctgtgccatgagtggacttattgctgatgctagaacactagtggaacatgctcgtgttgaaactcagaatcataggttctcatacggagagccaatgactgtagaatcttcgacacaagctatctgtgacttagctctgcgttttggcgaaggtgacgaagagtcaatgtcacggccatttggagtctctctcctaattgctggacatgatgagaatggacctagcctgtactacactgacccatctggtacattttggcaatgcaacgcaaaggcaattggatcaggttctgagggagctgatagttccttgcaggaacagtacaacaaggaattgaccctccaggaggcggagaccatagccctttctatcctgaagcaggttatggaagagaaggtgaccccaaacaacgtcgatattgccaaggttgcccccaagtaccacctctacacccctgccgaggtggaagccgtcatcgcgaggctgtgaaacgcttccgagctcttgctatccacgtcatcaatcggtaatagacgacccttgtacgaagcgtgggcaccatggtccttgattatggcttgattatggcaaggacagtcgatgttagtttgattcacagctcagccgggctcacttgtctttttaaatttttatgaattagcgttgagaactttgtactgccaagaaagttcattttttttaccctttcggtttc

SEQ ID NO: 35319 - protein, 282 aa, Zea mays subsp. mays
RLRERERERERERERERERERERERRRRADAESFLHPASAAVSDRMFLTRTEYDRGVNTFSPEGRLFQVEYAIEAIKLGSTAIGLKTKDGVVLAVEKRVTSPLLEPSSVEKIMEIDEHIGCAMSGLIADARTLVEHARVETQNHRFSYGEPMTVESSTQAICDLALRFGEGDEESMSRPFGVSLLIAGHDENGPSLYYTDPSGTFWQCNAKAIGSGSEGADSSLQEQYNKELTLQEAETIALSILKQVMEEKVTPNNVDIAKVAPKYHLYTPAEVEAVIARL

SEQ ID NO: 35320 - protein, 237 aa, Zea mays subsp. mays; identical to SEQ ID NO: 33311

SEQ ID NO: 35321 - protein, 170 aa, Zea mays subsp. mays; identical to SEQ ID NO: 33312

SEQ ID NO: 35322 - DNA, 1142 bp, Zea mays subsp. mays
tagaacatcctaatcgaaaaatgacaatacccggcggcgagcaacggatcctccctgtcccggccgtgctcttcatccgccgcccgggcgcgcctttcggcaacgcgatgcacgagcgcttccgcgtgctggagctgccctcgccggcctcgggcgagcaggcagcggctttcctcgccgccgccgcggcagagccggacccgcctcgcgccgcggtcgtcatgggaggcggcgccgtccgcgcggacgcggcgttcctcgacgccgtcccctcggtccgctgcctcgtcagcacggccgcgggcgttgaccacatcgacctcgccgagtgcgcgcgccgcggcgtcgccgtcgccaactctgggacagtctacgccgccgacgtcgcagaccacgccgtccgcatgctcatcgacgtgcttcgccgcgtgtcggcggcggggcggttcgtacggcgcgggctatggccgctgcaggagggcgagtaccctctcggctccaagctagggggcaagcgtgtgggcatcatcggattggggaacattggttcgctggttgcaaagaggctggaagctttcggctgtgtcatctgctacaattccagaagacgcatggactcagtctcctacagatacttctccaacgttcagcgtcttgcttccgaatcagacgtgctcgttgtcgcatgcgcactgaacaaagagacacgccacattgtgaatgaggatgtcctggaggccctggggaaggatggggtcgtcataaacattggccgaggcgcaagcatcgacgaggcggccttagtcagcgcgctgaaagagggaaggatcgctggagctgggctcgaagtctttgagaacgaacccaaggtgcctccggagctcatgtccatggacagtgtggtgctgacgcctcattcagcggttttcacgacggagtcgagggcggacctgtgtcagcacctgatttgcaacctggaagcgttctttgccggtaagccactcatcacgcccgtgctgcgtttgacagagtaggtcgtgttgcaggctagttaagctattgggaggtaactaaattgttatttgtatatatagctgcaaactatagggctgtgttccttataaaatggatccattgattcg

SEQ ID NO: 35323 - protein, 343 aa, Zea mays subsp. mays
EHPNRKMTIPGGEQRILPVPAVLFIRRPGAPFGNAMHERFRVLELPSPASGEQAAAFLAAAAAEPDPPRAAVVMGGGAVRADAAFLDAVPSVRCLVSTAAGVDHIDLAECARRGVAVANSGTVYAADVADHAVRMLIDVLRRVSAAGRFVRRGLWPLQEGEYPLGSKLGGKRVGIIGLGNIGSLVAKRLEAFGCVICYNSRRRMDSVSYRYFSNVQRLASESDVLVVACALNKETRHIVNEDVLEALGKDGVVINIGRGASIDEAALVSALKEGRIAGAGLEVFENEPKVPPELMSMDSVVLTPHSAVFTTESRADLCQHLICNLEAFFAGKPLITPVLRLTE

SEQ ID NO: 35324 - protein, 337 aa, Zea mays subsp. mays
MTIPGGEQRILPVPAVLFIRRPGAPFGNAMHERFRVLELPSPASGEQAAAFLAAAAAEPDPPRAAVVMGGGAVRADAAFLDAVPSVRCLVSTAAGVDHIDLAECARRGVAVANSGTVYAADVADHAVRMLIDVLRRVSAAGRFVRRGLWPLQEGEYPLGSKLGGKRVGIIGLGNIGSLVAKRLEAFGCVICYNSRRRMDSVSYRYFSNVQRLASESDVLVVACALNKETRHIVNEDVLEALGKDGVVINIGRGASIDEAALVSALKEGRIAGAGLEVFENEPKVPPELMSMDSVVLTPHSAVFTTESRADLCQHLICNLEAFFAGKPLITPVLRLTE

SEQ ID NO: 35325 - protein, 308 aa, Zea mays subsp. mays
MHERFRVLELPSPASGEQAAAFLAAAAAEPDPPRAAVVMGGGAVRADAAFLDAVPSVRCLVSTAAGVDHIDLAECARRGVAVANSGTVYAADVADHAVRMLIDVLRRVSAAGRFVRRGLWPLQEGEYPLGSKLGGKRVGIIGLGNIGSLVAKRLEAFGCVICYNSRRRMDSVSYRYFSNVQRLASESDVLVVACALNKETRHIVNEDVLEALGKDGVVINIGRGASIDEAALVSALKEGRIAGAGLEVFENEPKVPPELMSMDSVVLTPHSAVFTTESRADLCQHLICNLEAFFAGKPLITPVLRLTE

SEQ ID NO: 35326 - DNA, 1217 bp, Zea mays subsp. mays
  misc_feature (368)..(368): n is a, c, g, or t
  misc_feature (382)..(382): n is a, c, g, or t
  misc_feature (563)..(563): n is a, c, g, or t
  misc_feature (745)..(745): n is a, c, g, or t
  misc_feature (862)..(862): n is a, c, g, or t
gacaaacggattgacaccgacacataaaaaacacctttttagacatttctcgagaccaccactactcgtgcccgtgcggtggttcgaccagatccatctcacacccttatcctctttacgcctcaccactacagagaaaaagagaaacctgcgagcgacggggactatggccgccacccgcaccgccctggccctgctagggcacgagggcatggaatctgggcccaggccggcggcgccgcgccgcagcaggctacgcgtcgtcgccgtcgcgctgcggaccaggcccaccagcctcgcggccccgggtctcccgcccgcggcgccggagcccgtgctgccgtcgccgcccgtggccgcgggcgccncggcggtgctgctngaggcgggcgtgccgcccgccgacctccggcgcgcggcggggatgtgcccggagctgctgtccgtgtccgcggaggccgtcgaggccgcgctccggttcctcacggaggaggcgggcgtcgccgaggccgacctcccgcgcgtgctccggcggcgcccgcgcctgctcgtctctcccgtgncggcgcggctgcggcccacgctctacttcctgcgcgcgctcggcgtgcccgacctgcaccgccgcgccgacctgctatccttctccgtggagggcaagctgctgccgcggctcgagttcctcgagtcgctgggcctgccggcgcgcgccgcccgctccatggcgcgccgcttccccgcgctnttcggctacggcgtggaggggaacatgcggcccaaggcggactacctcctgggcgccatggcccgccgcgccgacgagctgtacgacttccccgagtacttctcctacgcgctggcnacgcgcatcgtgccgcgttacgaggcctgcgccgcgcgcggggtcagcaggctgccactgcccgccatgtccgccccggggacgccaagttccgcgccactctcgccagctgtgtcgggtccatgctgccccggaggcggtcggcgctgtggcacgccaagtgggtggatgacgacgcggcggcggcggcgaaggagaccacggtgtgacgtgcgcattggtagcgagcgagaggctcttgcctcttggtggtgtaacatatgtccataaggatcggcattggctgcttgtaaagtatgatagccatgatgaattatctagttggtcctcccagtgaacaatggcactgttggct

SEQ ID NO: 35327 - protein, 376 aa, Zea mays subsp. mays
  misc_feature (123)..(123): Xaa can be any naturally occurring amino acid
  misc_feature (127)..(127): Xaa can be any naturally occurring amino acid
  misc_feature (188)..(188): Xaa can be any naturally occurring amino acid
  misc_feature (248)..(248): Xaa can be any naturally occurring amino acid
  misc_feature (287)..(287): Xaa can be any naturally occurring amino acid
TNGLTPTHKKHLFRHFSRPPLLVPVRWFDQIHLTPLSSLRLTTTEKKRNLRATGTMAATRTALALLGHEGMESGPRPAAPRRSRLRVVAVALRTRPTSLAAPGLPPAAPEPVLPSPPVAAGAXAVLXEAGVPPADLRRAAGMCPELLSVSAEAVEAALRFLTEEAGVAEADLPRVLRRRPRLLVSPVXARLRPTLYFLRALGVPDLHRRADLLSFSVEGKLLPRLEFLESLGLPARAARSMARRFPAXFGYGVEGNMRPKADYLLGAMARRADELYDFPEYFSYALXTRIVPRYEACAARGVSRLPLPAMSAPGTPSSAPLSPAVSGPCCPGGGRRCGTPSGWMTTRRRRRRRPRCDVRIGSEREALASWWCNICP

SEQ ID NO: 35328 - protein, 321 aa, Zea mays subsp. mays
  misc_feature (68)..(68): Xaa can be any naturally occurring amino acid
  misc_feature (72)..(72): Xaa can be any naturally occurring amino acid
  misc_feature (133)..(133): Xaa can be any naturally occurring amino acid
  misc_feature (193)..(193): Xaa can be any naturally occurring amino acid
  misc_feature (232)..(232): Xaa can be any naturally occurring amino acid
MAATRTALALLGHEGMESGPRPAAPRRSRLRVVAVALRTRPTSLAAPGLPPAAPEPVLPSPPVAAGAXAVLXEAGVPPADLRRAAGMCPELLSVSAEAVEAALRFLTEEAGVAEADLPRVLRRRPRLLVSPVXARLRPTLYFLRALGVPDLHRRADLLSFSVEGKLLPRLEFLESLGLPARAARSMARRFPAXFGYGVEGNMRPKADYLLGAMARRADELYDFPEYFSYALXTRIVPRYEACAARGVSRLPLPAMSAPGTPSSAPLSPAVSGPCCPGGGRRCGTPSGWMTTRRRRRRRPRCDVRIGSEREALASWWCNICP

SEQ ID NO: 35329 - protein, 306 aa, Zea mays subsp. mays
  misc_feature (53)..(53): Xaa can be any naturally occurring amino acid
  misc_feature (57)..(57): Xaa can be any naturally occurring amino acid
  misc_feature (118)..(118): Xaa can be any naturally occurring amino acid
  misc_feature (178)..(178): Xaa can be any naturally occurring amino acid
  misc_feature (217)..(217): Xaa can be any naturally occurring amino acid
MESGPRPAAPRRSRLRVVAVALRTRPTSLAAPGLPPAAPEPVLPSPPVAAGAXAVLXEAGVPPADLRRAAGMCPELLSVSAEAVEAALRFLTEEAGVAEADLPRVLRRRPRLLVSPVXARLRPTLYFLRALGVPDLHRRADLLSFSVEGKLLPRLEFLESLGLPARAARSMARRFPAXFGYGVEGNMRPKADYLLGAMARRADELYDFPEYFSYALXTRIVPRYEACAARGVSRLPLPAMSAPGTPSSAPLSPAVSGPCCPGGGRRCGTPSGWMTTRRRRRRRPRCDVRIGSEREALASWWCNICP

SEQ ID NO: 35330 - DNA, 1154 bp, Zea mays subsp. mays
cattacctagaacatcctaatcgaaaagagaatttttgggctagcggggtgtgaacaaaaacttggtgccccgctgctctgccttttgtcgtccactgtttcgcgtcaattctcgcgcgaaaagggatgggcactggagaggggtcgccgccggcgaggcggggcatcagcggtaggcgccgtcgatggccggacgaggacgacgacgagtatgtgctgtaggaggaagaagaagaggattatgtggaggagctctccgcctcgagcgccggcgaggagggggtggattcagacgccgagtaccaggaggcagaggaggaggacgagatcgagaagccgcgcccaaagcgaccagcgaagggcatcacatcgagcgccggcgagaggggattggattcagacgccgaataccaggaggcagaggaggacgacgagatcgagccgccgcgcctgaagcgaccggccaagggcagcacatcgagcgcgggtgaggaggggttggattcagacgccgaataccaggaggcagaggaggacgagatggagacgccgcgcccaaagcgaccggcgaaggacagcacatcgagcgccggcgaggatgggttggattcagacgccgaataccaggaggcagaggaggaggacgacgacgaaatcgagacgccgcgcccgaagcgacgggcaaagggcagcaacagagtacggaaaggaaaggtggatctggccgccgcacgatctcgacgccggaagtatgaggaggacgaggactacgaggaggaggttgacgaagacgacgaggtggaggaggagtaccatgatgaccttgaggaggtcgaggaggaggaagaagtggcaccacagcggccgaagagcattgtgaaatgcggtgcccgtggccggaatgtgaagctgtctctggcagcgaagcgatctcatcagcggaagcaggaggatgatgaggatatggattttgacccagagttggatgacgaggaggtcgagatagatgaggatattgattttgatcccgatgtcgatggtgacgaggaggatgagtattaagacgaggaggaagaggaactggttcctgcccgtgccagaaaggtaactgtaaagaatccggtgaagcgaaagtccatttcaaagaggcgaac

SEQ ID NO: 35331 - protein, 173 aa, Zea mays subsp. mays
METPRPKRPAKDSTSSAGEDGLDSDAEYQEAEEEDDDEIETPRPKRRAKGSNRVRKGKVDLAAARSRRRKYEEDEDYEEEVDEDDEVEEEYHDDLEEVEEEEEVAPQRPKSIVKCGARGRNVKLSLAAKRSHQRKQEDDEDMDFDPELDDEEVEIDEDIDFDPDVDGDEEDEY

SEQ ID NO: 35332 - protein, 101 aa, Zea mays subsp. mays
MAGRGRRRVCAVGGRRRGLCGGALRLERRRGGGGFRRRVPGGRGGGRDREAAPKATSEGHHIERRREGIGFRRRIPGGRGGRRDRAAAPEATGQGQHIERG

SEQ ID NO: 35333 - protein, 93 aa, Zea mays subsp. mays
MGWIQTPNTRRQRRRTTTKSRRRARSDGQRAATEYGKERWIWPPHDLDAGSMRRTRTTRRRLTKTTRWRRSTMMTLRRSRRRKKWHHSGRRAL

SEQ ID NO: 35334 - DNA, 935 bp, Zea mays subsp. mays
aaaatccagccaaggacgacgatcgcctcatccatccaaatggccacgcctgctccagccggcgccgccatgcccgagctcgccccggggcagggaagagaagccaagcacgggcgcgccggcggcgggccacgccagagcgccggcgcgcgcctcctatcgctctccgtgcaggcggccgtgatggcggccacgctcgcggtcttcctcgtctttgccgccgcgtccgccttactcctcctcgtcctcgtcctcgccgcgcgcgccttcccccgccaccaccgcatcacgtcgctcgaccttgccccttcgccgccgccgcctctacgcgcggggctctcgcccgtcgacatccgccgcctgccgagcttcgccttcccctccacgcgtggcgactccggcgacgagaccgccgccgcctccccctcgtgcgtcgtgtgcctcgatgccgcgcgcgccggggagcggtggcgcgcgatgccggcctgcacgcacgcgttccacgccgcctgcgtcgaccggtggctcgccaggacgcctgtctgccccgtctgccgcgccgccgtcgccgtcccgatatgagctaaggccgacgccgcgaacctgcccacgcgtgcccttcgtcctggtcgtgtagtcatggaggccgatatgagcggtggctgttgtaaagaagaatgcgggggaaagaaaagaatgaacccacgaaaccttaccatcgcagatacagtacttgctattttgaatgccaaaactcctccttggattgcaacatgttacttgtacattacatgctgcattaggatccagcattagaattggatgatccagcatcagaattggatttgatgtgatacttgtgctaatgtgctgtacaacgatattgtatcgcagtgaggtagaaagattggacaaattgttagaactgatgattg

SEQ ID NO: 35335 - protein, 194 aa, Zea mays subsp. mays
NPAKDDDRLIHPNGHACSSRRRHARARPGAGKRSQARARRRRATPERRRAPPIALRAGGRDGGHARGLPRLCRRVRLTPPRPRPRRARLPPPPPHHVARPCPFAAAASTRGALARRHPPPAELRLPLHAWRLRRRDRRRLPLVRRVPRCRARRGAVARDAGLHARVPRRLRRPVARQDACLPRLPRRRRRPDMS

SEQ ID NO: 35336 - protein, 193 aa, Zea mays subsp. mays
KIQPRTTIASSIQMATPAPAGAAMPELAPGQGREAKHGRAGGGPRQSAGARLLSLSVQAAVMAATLAVFLVFAAASALLLLVLVLAARAFPRHHRITSLDLAPSPPPPLRAGLSPVDIRRLPSFAFPSTRGDSGDETAAASPSCVVCLDAARAGERWRAMPACTHAFHAACVDRWLARTPVCPVCRAAVAVPI

SEQ ID NO: 35337 - protein, 180 aa, Zea mays subsp. mays
MATPAPAGAAMPELAPGQGREAKHGRAGGGPRQSAGARLLSLSVQAAVMAATLAVFLVFAAASALLLLVLVLAARAFPRHHRITSLDLAPSPPPPLRAGLSPVDIRRLPSFAFPSTRGDSGDETAAASPSCVVCLDAARAGERWRAMPACTHAFHAACVDRWLARTPVCPVCRAAVAVPI

SEQ ID NO: 35338 - DNA, 513 bp, Zea mays subsp. mays
tttctcgagcctgacccttacgccttcgctcgcgccgccgccgctcgcgggcggcgcgcacgccggactgctacgacgactgcttcaaggactgcatggccaggttcaagtccatgagagactactgcagctacgcgtgcgagaaggtctgcgatccggacgccacgctccagcgccccctcgccgttgtggggccagcagcagcgttggccgaccaccacccgttggacaagaagcatggtgctgtctggccggcggcgttgcccgaccatcctttccacgagacgcacggcgacgtcgagccggcaggggagccggacccagctaggcacgtcgtccgtccggcacgtgtccccgtcctcccctgaacgccgccggagcgagagcgcgcgatgctagccgctcggcctggcgcccgtatgttaagcactagacgaagtgtgtgatgtgtcaaacgtataagcatgccttaactatctcacgtttatgcaaggggtagcggtgtcaatttgc

SEQ ID NO: 35339 - protein, 108 aa, Zea mays subsp. mays
FSSLTLTPSLAPPPLAGGAHAGLLRRLLQGLHGQVQVHERLLQLRVREGLRSGRHAPAPPRRCGASSSVGRPPPVGQEAWCCLAGGVARPSFPRDARRRRAGRGAGPS

SEQ ID NO: 35340 - protein, 90 aa, Zea mays subsp. mays
MARFKSMRDYCSYACEKVCDPDATLQRPLAVVGPAAALADHHPLDKKHGAVWPAALPDHPFHETHGDVEPAGEPDPARHVVRPARVPVLP

SEQ ID NO: 35341 - protein, 84 aa, Zea mays subsp. mays
MRDYCSYACEKVCDPDATLQRPLAVVGPAAALADHHPLDKKHGAVWPAALPDHPFHETHGDVEPAGEPDPARHVVRPARVPVLP

SEQ ID NO: 35342 - DNA, 1582 bp, Zea mays subsp. mays
  misc_feature (468)..(469): n is a, c, g, or t
actattatagccaacgtctctgcgcgtgcggtgccggagcggcggagcctcccctccctcccccatcctacctcaccatgatggcaatgccggacgcggatcgcaacgccatgtcggcgccgctgctcccgcggcccgcgtgcctgacggcgtccttctcctcctcctcctcctccttcgcgtccttctcctcctccaactcctccagctccgacccctcacccccgtccgccttcccgccggcggggccgtgcaaggcgctggcggtgctgcgggaccacgcgggctccgtctccagcctctccctctgcggggagttcctgctcagcgcgtccacggccggcgacgtcgtggcgtggcagcagcccgacctccggcgcttcgcgcgcttcggccacggcgagagcggcggctccgtcaaggcgctggcggccgcgggcggccgcgtcttctccgcgcaccaggacnnccgcgtccgcgtctggcgcgtctcccgcggccgccgctccgagaacgccttcaagctcgtcgccgcgctgcccaccgccagggactacctgggccgggtgttccgccaggacagctacgtgcagaccaccgccaccacggcggcgcgccgcgcccaccaccgccgcctctggatcgagcacgccaacagcatctcctgcctcgccgtcgccgtgcacgacgccgcgctcctctactcgggctcctgggaccgcacgctcaaggtctggcgcgtcgccgacctcaggtgcctcgagtccatccgcgcccacgacgacgccgtcaacgccgtcgccgcagacgccggcatcgtctactccgcctccgccgacggccgcgtcaaggcctgggagaaggggaaggcgtcgcatttcctccagggcgtcctcgtcgcccgcgacggcgtctcgtggaacgcgctcaccgtcgccgccgacgaccgccggctctacgccgcgggctccgacggccacgtcgccgcctgggaccgcctcggcggcaggaccgccgcgcgctggaccctcgcgtgcgacgtcagggcgcacgacgccgccgtgctgtgcctctgcgtcgccagggacctgctctgcaccggctccgccgacaagaccatcggcctgtggcgccgtcagagcgccggcgagctggccaaggtgggcgtcgtcagaggccacgagggccccgtcaaatgcatccaggcgtcctggtgcaggctcaccaatggctgcatggtctacagcgggagccttgacaagaccatcagagtttggtgggtgcccggtgccttgcagcatgccaatgacaaagatcagcagcagcagcagcaaaaagatggcttcaaggatcacaagcacaaggcttctttgttcttgagatgaaacttgtgtctgctccaaatttcgaaatggattgattgagattgctcaggtctagtctgtattttggattggttgatttatattacaaggataaatgggtaacacacaaaagtagccatagagtggatgtgcttctgtaaatggctgtatactatgttctgattcttctttgatataggttttgactacatggagag

SEQ ID NO: 35343 - protein, 460 aa, Zea mays subsp. mays
  misc_feature (156)..(156): Xaa can be any naturally occurring amino acid
YYSQRLCACGAGAAEPPLPPPSYLTMMAMPDADRNAMSAPLLPRPACLTASFSSSSSSFASFSSSNSSSSDPSPPSAFPPAGPCKALAVLRDHAGSVSSLSLCGEFLLSASTAGDVVAWQQPDLRRFARFGHGESGGSVKALAAAGGRVFSAHQDXRVRVWRVSRGRRSENAFKLVAALPTARDYLGRVFRQDSYVQTTATTAARRAHHRRLWIEHANSISCLAVAVHDAALLYSGSWDRTLKVWRVADLRCLESIRAHDDAVNAVAADAGIVYSASADGRVKAWEKGKASHFLQGVLVARDGVSWNALTVAADDRRLYAAGSDGHVAAWDRLGGRTAARWTLACDVRAHDAAVLCLCVARDLLCTGSADKTIGLWRRQSAGELAKVGVVRGHEGPVKCIQASWCRLTNGCMVYSGSLDKTIRVWWVPGALQHANDKDQQQQQQKDGFKDHKHKASLFLR

SEQ ID NO: 35344 - protein, 435 aa, Zea mays subsp. mays
  misc_feature (131)..(131): Xaa can be any naturally occurring amino acid
MMAMPDADRNAMSAPLLPRPACLTASFSSSSSSFASFSSSNSSSSDPSPPSAFPPAGPCKALAVLRDHAGSVSSLSLCGEFLLSASTAGDVVAWQQPDLRRFARFGHGESGGSVKALAAAGGRVFSAHQDXRVRVWRVSRGRRSENAFKLVAALPTARDYLGRVFRQDSYVQTTATTAARRAHHRRLWIEHANSISCLAVAVHDAALLYSGSWDRTLKVWRVADLRCLESIRAHDDAVNAVAADAGIVYSASADGRVKAWEKGKASHFLQGVLVARDGVSWNALTVAADDRRLYAAGSDGHVAAWDRLGGRTAARWTLACDVRAHDAAVLCLCVARDLLCTGSADKTIGLWRRQSAGELAKVGVVRGHEGPVKCIQASWCRLTNGCMVYSGSLDKTIRVWWVPGALQHANDKDQQQQQQKDGFKDHKHKASLFLR

SEQ ID NO: 35345 - protein, 434 aa, Zea mays subsp. mays
  misc_feature (130)..(130): Xaa can be any naturally occurring amino acid
MAMPDADRNAMSAPLLPRPACLTASFSSSSSSFASFSSSNSSSSDPSPPSAFPPAGPCKALAVLRDHAGSVSSLSLCGEFLLSASTAGDVVAWQQPDLRRFARFGHGESGGSVKALAAAGGRVFSAHQDXRVRVWRVSRGRRSENAFKLVAALPTARDYLGRVFRQDSYVQTTATTAARRAHHRRLWIEHANSISCLAVAVHDAALLYSGSWDRTLKVWRVADLRCLESIRAHDDAVNAVAADAGIVYSASADGRVKAWEKGKASHFLQGVLVARDGVSWNALTVAADDRRLYAAGSDGHVAAWDRLGGRTAARWTLACDVRAHDAAVLCLCVARDLLCTGSADKTIGLWRRQSAGELAKVGVVRGHEGPVKCIQASWCRLTNGCMVYSGSLDKTIRVWWVPGALQHANDKDQQQQQQKDGFKDHKHKASLFLR

SEQ ID NO: 35346 - DNA, 2225 bp, Zea mays subsp. mays
aaacacacgattcgcctcccaacgctactacccctttccttccaacttccgcccgccggcgccagccgcaaccgaacaatccaagcaacgcgtcaggcgccgtcatggccacgtggcgcctccgccgcgccggtgccgccctagctgcctcctccaccctcgccgctgtcctcgccgcctcatcggcttccgccaccgacccgtccgccgccgccctagaagcggcaaggcagcgtgttgcgcggtcgggggccacgccgcccctgcgagacgcgcagcgtgcggcgctggcagggtccacccctgctgagcccctagacgtgctcgtcgttggcggcggcgccaccggatgcggcgtcgcgctcgatgccgccacccgcgggctccgtgtaggccttgtggagcgcgaggatttctcttctggaacctcctcccgatccaccaaactcatccatggcggtgtccgctacttggagaaggcagtgttcaatcttgattacgggcagctgaaacttgtttttcatgcacttaaggaacgcaaacaagtcatcgagaatgctccccatttgtgccatgctttgccatgcatgactccttgctttaactggtttgaggttgtatactactggtttggtttgaagctttatgatcttgttgctggaagaaggctactacatttgtcccgatattattctgtggatgaatcagttgagcttttcccaacccttgcaaaaaacggacataattgtagcctaaaaggaacagttgtgtactatgatggtcaaatgaatgactcacggctgaatgtggggttggcatgcactgctgcagttgttggtgcagctgttctcaattatgctgaagtggtctctctcattaaggatgaatcgggggagagaatcattggtgcacgcgtccgtgacacactatcaggtaaggagtttgaaaccttcgcaaaggtggttgttaatgcagcaggaccattctgtgactctgtgaggaagatggctgacagtaccgtagcacctatgatctgtcctagtagtggtgtgcacattgtacttcctgattactactcccctgaagggatggggctaattgttccaaaaaccaaggatggcagagttgtatttatgttgccatggttaggaaggaccgttgcgggaacaactgattcgaacacagcaataacaatgcttcctgaaccacacgaggatgaaatacagttcatattggatgcaatctctgactatcttaatgttcaggtaaggcgttcagatgttctttctgcctggagtggtatacgtcctttggcgatggatccatcagcaaagaatactgagagtatttctcgagatcatgttgtatttgaagactaccccgggttaataacaattaccggtggaaaatggacaacctataggagtatggctgaagatgctgtaaatgcagcagtcatgtctgggaatttgaaaccagccaatggttgtttgactgataatttgcatattgttggtggatatggatgggaccctgcttcttttacggttcttgctcagaattataagcgaatgaagaagacatatggtggcaaggttattccaggtgcaatggacagtgctgtatcgaaacatttatcgcatgcatatggatctttggctgaacaagtggctactattgcccagaacgaaggcttgggaaagcgccttgctcatggatacccatttttggaagctgaagtagcatactgtgctcgttatgagtactgtgaatctgccgtggattttgttgcaaggagatgccggcttgctttccttgacacagatgctgctggtagagcattgccccgaatcattgaaattttagcttcagagcacaagtgggacaaggcaaggaagaaggcggagctgcagaagggtagagagttcttggaaacattcaagtcatctaagaacgcccaattccatgatgggaagcataatggacgttcatgaccgaatatgcagttttctgaataagtgttgattttatacatgaacaagcaggctccgatacaagagtgagcctgcgaatgcagaaaggtttcgtttccacatttctacgcatggctgtgaaaatcggcgtgctggtttccagcagaataagatgtggtcacggcactatgtaattgtaaataccacatcatattagtcgattttgaaataaactggaaccaagaatttgtg

SEQ ID NO: 35347 - protein, 663 aa, Zea mays subsp. mays
THDSPPNATTPFLPTSARRRQPQPNNPSNASGAVMATWRLRRAGAALAASSTLAAVLAASSASATDPSAAALEAARQRVARSGATPPLRDAQRAALAGSTPAEPLDVLVVGGGATGCGVALDAATRGLRVGLVEREDFSSGTSSRSTKLIHGGVRYLEKAVFNLDYGQLKLVFHALKERKQVIENAPHLCHALPCMTPCFNWFEVVYYWFGLKLYDLVAGRRLLHLSRYYSVDESVELFPTLAKNGHNCSLKGTVVYYDGQMNDSRLNVGLACTAAVVGAAVLNYAEVVSLIKDESGERIIGARVRDTLSGKEFETFAKVVVNAAGPFCDSVRKMADSTVAPMICPSSGVHIVLPDYYSPEGMGLIVPKTKDGRVVFMLPWLGRTVAGTTDSNTAITMLPEPHEDEIQFILDAISDYLNVQVRRSDVLSAWSGIRPLAMDPSAKNTESISRDHVVFEDYPGLITITGGKWTTYRSMAEDAVNAAVMSGNLKPANGCLTDNLHIVGGYGWDPASFTVLAQNYKRMKKTYGGKVIPGAMDSAVSKHLSHAYGSLAEQVATIAQNEGLGKRLAHGYPFLEAEVAYCARYEYCESAVDFVARRCRLAFLDTDAAGRALPRIIEILASEHKWDKARKKAELQKGREFLETFKSSKNAQFHDGKHNGRS

SEQ ID NO: 35348 - protein, 629 aa, Zea mays subsp. mays
MATWRLRRAGAALAASSTLAAVLAASSASATDPSAAALEAARQRVARSGATPPLRDAQRAALAGSTPAEPLDVLVVGGGATGCGVALDAATRGLRVGLVEREDFSSGTSSRSTKLIHGGVRYLEKAVFNLDYGQLKLVFHALKERKQVIENAPHLCHALPCMTPCFNWFEVVYYWFGLKLYDLVAGRRLLHLSRYYSVDESVELFPTLAKNGHNCSLKGTVVYYDGQMNDSRLNVGLACTAAVVGAAVLNYAEVVSLIKDESGERIIGARVRDTLSGKEFETFAKVVVNAAGPFCDSVRKMADSTVAPMICPSSGVHIVLPDYYSPEGMGLIVPKTKDGRVVFMLPWLGRTVAGTTDSNTAITMLPEPHEDEIQFILDAISDYLNVQVRRSDVLSAWSGIRPLAMDPSAKNTESISRDHVVFEDYPGLITITGGKWTTYRSMAEDAVNAAVMSGNLKPANGCLTDNLHIVGGYGWDPASFTVLAQNYKRMKKTYGGKVIPGAMDSAVSKHLSHAYGSLAEQVATIAQNEGLGKRLAHGYPFLEAEVAYCARYEYCESAVDFVARRCRLAFLDTDAAGRALPRIIEILASEHKWDKARKKAELQKGREFLETFKSSKNAQFHDGKHNGRS

SEQ ID NO: 35349 - protein, 468 aa, Zea mays subsp. mays
MTPCFNWFEVVYYWFGLKLYDLVAGRRLLHLSRYYSVDESVELFPTLAKNGHNCSLKGTVVYYDGQMNDSRLNVGLACTAAVVGAAVLNYAEVVSLIKDESGERIIGARVRDTLSGKEFETFAKVVVNAAGPFCDSVRKMADSTVAPMICPSSGVHIVLPDYYSPEGMGLIVPKTKDGRVVFMLPWLGRTVAGTTDSNTAITMLPEPHEDEIQFILDAISDYLNVQVRRSDVLSAWSGIRPLAMDPSAKNTESISRDHVVFEDYPGLITITGGKWTTYRSMAEDAVNAAVMSGNLKPANGCLTDNLHIVGGYGWDPASFTVLAQNYKRMKKTYGGKVIPGAMDSAVSKHLSHAYGSLAEQVATIAQNEGLGKRLAHGYPFLEAEVAYCARYEYCESAVDFVARRCRLAFLDTDAAGRALPRIIEILASEHKWDKARKKAELQKGREFLETFKSSKNAQFHDGKHNGRS

SEQ ID NO: 35350 - DNA, 2234 bp, Zea mays subsp. mays
gcacgagaccattacctagaacatcctaatcgaaaagaaaaaaaagaaggaaaattttagataccctgccgcacgccgcgaccttcggccccgtctccggtctccgccttcccccacctattggggagcgctcctgattcgcgggagccagcgggcgagacaaagagaatcccccgctcctgcgccgccgcggatcagcgccgtcgccgatcggaggctctcgcttcccccggcgggcggcgcgcgccgggagatggacggcggcgcgggcgcgggcgccggccggaggaacgtctcatcgtcctccggatccaggaggagggtcctgcccgccgagaacgggcacggccatgacgccccgccgccctccaggcggtcctccgtctccctctcccgcgggccactccacgtcactgaccggcgagaggaccgtgaaaaggctgaggctgtccaaggcgctgacgataccggatcacacaaccgtgcacgaggcttgtcggaggatggcgtcacgcagggttgacgccgtgctgctgactgactccaacgctttgctctgtgggatcctcaccgacaaggacataaccacaagggtgattgctcgtgagttgaagatggaagagacaccggtctccaaggtcatgacccgaaaccctgtatttgttctcgcggacacgcttgcagtcgaggcgttgcaaaagatggtgcaaggtaagttcaggcatctgcctgtcgtggagaatggcgaggtcattgcaattctggacatagccaagtgcctatatgatgctattgcacggatggaaagggcggcggagaaaggaaaagcaattgccgctgccgtcgagggcgttgaaaagcattggggagcagctgtgcctggtcctaacaattttattgagacgcttcgagaacggatgtttaggccatcgctgtctactattatctctgagaatccaaaagttgtcactgttgcaccatcagacatggtgttgacagcatcaaagaagatgctggaattaaaagtgagttcagcagttgtagcaattgaaaacaaacctggaggaattctgacatctagagatatattgatgcgtgttatcgcccaaaatcttcctcctgagtccaccacggtcgagaaggtcatgactcagagtcctgaatgtgccacagtggacaccccaattcttgatgctcttcacacaatgcatgatgggaaatttttacatttgcctgtcctggacagggatggaaatgttgtgactgttgttgatgttcttcacataactcatgctgcaattgctacggttggaaacagcggggcagctggatccgaggcaacatctgccatgatgcagaggttctgggattcagcaatgtccattggacctattgatgatgacgatgactcgagaagtgaagggtcgactagagtggtatctgaggcaacagatataggaagagcagccttctttccagcttctggcttatcaaacacttttgggttcaagattcaggataagcaagggaggatgcacagatttaactgtgaaacaagcggtctggcagagctgataaccagcattcttcagagggtcggcgacgacattgacagaaaacacctcccgcaaattttgtacgaagacgaggaccgtgataaggtcgtgctttcgtcggacagtgaccttgtagccgctgtggaccatgcgagaaagatcggttggaagagcataaggttgcatctggattacgccggcgttggccggcggaagggagggggtggtccttcggacttggagtacgctggcaaggacgcagcatgggcttctgcgtacagcgcggtcgcggcaggggcggctctggttgctgggctcggtgtgatggcctacctgaaacggtcggggtaaaagcttggaggcggagagcacgacggcagagggagcacacgcttctcatcggatctgtgtgatacaaatgatactgcgtcggaacgagcagaatggctgtgtaagtaattcttgtgaaaaagagagagagagagggagattttaataatactactgtcaaggcagtgaatggccgcctgcatacgagggagtacacggaactggtcgagcctttttggtgggttcagagtctccacgactaatttaccacggctgttagcgtcgtcacgattgtatttgtatcataaatcacacgatcattatacaagaagagtcttgttgagcctc

SEQ ID NO: 35351 - protein, 518 aa, Zea mays subsp. mays
MTPRRPPGGPPSPSPAGHSTSLTGERTVKRLRLSKALTIPDHTTVHEACRRMASRRVDAVLLTDSNALLCGILTDKDITTRVIARELKMEETPVSKVMTRNPVFVLADTLAVEALQKMVQGKFRHLPVVENGEVIAILDIAKCLYDAIARMERAAEKGKAIAAAVEGVEKHWGAAVPGPNNFIETLRERMFRPSLSTIISENPKVVTVAPSDMVLTASKKMLELKVSSAVVAIENKPGGILTSRDILMRVIAQNLPPESTTVEKVMTQSPECATVDTPILDALHTMHDGKFLHLPVLDRDGNVVTVVDVLHITHAAIATVGNSGAAGSEATSAMMQRFWDSAMSIGPIDDDDDSRSEGSTRVVSEATDIGRAAFFPASGLSNTFGFKIQDKQGRMHRFNCETSGLAELITSILQRVGDDIDRKHLPQILYEDEDRDKVVLSSDSDLVAAVDHARKIGWKSIRLHLDYAGVGRRKGGGGPSDLEYAGKDAAWASAYSAVAAGAALVAGLGVMAYLKRSG

SEQ ID NO: 35352 - protein, 467 aa, Zea mays subsp. mays
MASRRVDAVLLTDSNALLCGILTDKDITTRVIARELKMEETPVSKVMTRNPVFVLADTLAVEALQKMVQGKFRHLPVVENGEVIAILDIAKCLYDAIARMERAAEKGKAIAAAVEGVEKHWGAAVPGPNNFIETLRERMFRPSLSTIISENPKVVTVAPSDMVLTASKKMLELKVSSAVVAIENKPGGILTSRDILMRVIAQNLPPESTTVEKVMTQSPECATVDTPILDALHTMHDGKFLHLPVLDRDGNVVTVVDVLHITHAAIATVGNSGAAGSEATSAMMQRFWDSAMSIGPIDDDDDSRSEGSTRVVSEATDIGRAAFFPASGLSNTFGFKIQDKQGRMHRFNCETSGLAELITSILQRVGDDIDRKHLPQILYEDEDRDKVVLSSDSDLVAAVDHARKIGWKSIRLHLDYAGVGRRKGGGGPSDLEYAGKDAAWASAYSAVAAGAALVAGLGVMAYLKRSG

SEQ ID NO: 35353 - protein, 430 aa, Zea mays subsp. mays
MEETPVSKVMTRNPVFVLADTLAVEALQKMVQGKFRHLPVVENGEVIAILDIAKCLYDAIARMERAAEKGKAIAAAVEGVEKHWGAAVPGPNNFIETLRERMFRPSLSTIISENPKVVTVAPSDMVLTASKKMLELKVSSAVVAIENKPGGILTSRDILMRVIAQNLPPESTTVEKVMTQSPECATVDTPILDALHTMHDGKFLHLPVLDRDGNVVTVVDVLHITHAAIATVGNSGAAGSEATSAMMQRFWDSAMSIGPIDDDDDSRSEGSTRVVSEATDIGRAAFFPASGLSNTFGFKIQDKQGRMHRFNCETSGLAELITSILQRVGDDIDRKHLPQILYEDEDRDKVVLSSDSDLVAAVDHARKIGWKSIRLHLDYAGVGRRKGGGGPSDLEYAGKDAAWASAYSAVAAGAALVAGLGVMAYLKRSG

SEQ ID NO: 35354 - DNA, 1182 bp, Zea mays subsp. mays
gcacgagaccattacctagaacatcctaatcaaaaaatctctagccagcgtcgtcggctgacctcctaccgtcgtcatggcttctcttcacccgttgatcgctgctgcgctcgtagtcgcggcggcctccacggcagcggcggcggcgagctgggcggcaccgtcgtcgccagcacgccctctgttccgcgagtacatcggcgcggagggcaagaacgtgacgttcgcggacgtgccggtgcacccgggcgtggacttccacttcatcctctccttcgccatcgactacgccgcgaacgccaccaacgcctccgcgccgccggtgcccacggacggccgcttcgccgtgttctgggacgaggcgaacctcaccccggccgccgtggccgccctcaagtgcccctcctcccacgcccgcgtcgcgctcagcctcggcggcgacaccgtgttcggcgccaacgccacgttccgcgcgtcctccgtcgacgcctgggtcggcaacgccgtggcgtcgctcgcggccatcctcacccgctacggcctcgacggggtggacgtggactacgagcacttcggggagcgcgagacgcccgaggtgttcgccgagtgcgtcggccgcctcgtgcgcgcgctccgggcccgcggcgtcatctccttcgcctccatcgcgcccttcgccaacccggacgtgcaggcgcactacgccgagctctggcgacgctacggccgcgacttcgactacgtcaacttccagttctacgcgtacccgtccaacaccacggtgccggagttcctggcccactatgacgagcagagcgcccggtacgccggcgccagcggaggggggaaggtgcttgtcagcttcgggacggaccccgccagcggcggcctgcgccccgggaagggcttcttcagggcgtgccgggagctgcgccgccaagggaggttgcatggaattttttgtctgggccgcggataactccgccgccgacgggtttcgcgacgagcgcctcgcgcagacgttcctcgccggcaacgccccgggtttcccctgacgcatgcatgcgttaagctccccgtgtctccgttccatatttccgttccttgtgtacgtcttgttatgttttgtcgcgtccatatgatttgtaattggtccagttcattgattatttgcgtgcatcc

SEQ ID NO: 35355 - protein, 300 aa, Zea mays subsp. mays
MASLHPLIAAALVVAAASTAAAAASWAAPSSPARPLFREYIGAEGKNVTFADVPVHPGVDFHFILSFAIDYAANATNASAPPVPTDGRFAVFWDEANLTPAAVAALKCPSSHARVALSLGGDTVFGANATFRASSVDAWVGNAVASLAAILTRYGLDGVDVDYEHFGERETPEVFAECVGRLVRALRARGVISFASIAPFANPDVQAHYAELWRRYGRDFDYVNFQFYAYPSNTTVPEFLAHYDEQSARYAGASGGGKVLVSFGTDPASGGLRPGKGFFRACRELRRQGRLHGIFCLGRG

SEQ ID NO: 35356 - protein, 268 aa, Zea mays subsp. mays
ARDHYLEHPNQKISSQRRRLTSYRRHGFSSPVDRCCARSRGGLHGSGGGELGGTVVASTPSVPRVHRRGGQERDVRGRAGAPGRGLPLHPLLRHRLRRERHQRLRAAGAHGRPLRRVLGRGEPHPGRRGRPQVPLLPRPRRAQPRRRHRVRRQRHVPRVLRRRLGRQRRGVARGHPHPLRPRRGGRGLRALRGARDARGVRRVRRPPRARAPGPRRHLLRLHRALRQPGRAGALRRALATLRPRLRLRQLPVLRVPVQHHGAGVPGPL

SEQ ID NO: 35357 - DNA, 2620 bp, Zea mays subsp. mays
taatcgaaaaatttgctagccactttctctcgaacgaacaaagcaggcggcgcggctggtctggtcgccgtgtctgtctgggggtgcaccatcatcggcggttcgatcgaccggtccgtctcttcgtccagccacaagaaccagggagcttcctctctgacagggcgcctctcctcgagagtcgagaagaaccacactctctcggtctcggtgctcggtagatgcgcatgcgcaatgcgagcggcagcagctggtgttcccgcgtggcggtgctgcagcaagtgcttggcgcgcaggcttctcctcatggcttcggcgtcggcgccggcgccctgcacctgcagcggctcggtgccgctaccgccccggccggcgtggagtctgcagatgacgcagtgatgccgccggcgccgccgccgctcctcttccgcgccctcgcgtcgctcaacctcctcctgctcgtcggctacctcctgctcgtcctcctcgccaagctcttcgcccgcctgcaccaccacagggccgccgccgaggaccgggcaagtagtggttggtatgatggccgccgctgcgaccaccgccgccgccgcgcggaagccacggccaccgatgacgaagagtacgccgccgcggataccgtcgaagggcagcaaccggacgcgctgttctggttcgacgaggccgtgttcgaggacagcgccgccctgctgatgcttggcgacgaaggaaaggatcaccacctgtacgctgccgcttctacacgttgcttgcagcaggtggagagcacgagcacctttcccgcggaggaatctgcccgcatctcgccgcgcaccgagagccccagcgccagcagcatcgatgcgattgcggagcgtatgcagcgggtgcaggaagaggccaagggcatcgtcgccgtccagcatgccccgacgacgatggtcgtcctggaaccggaacagcggagtgcccctgctgctccggtcgtcgtcgccgtaccaccggagcatgtctccatcgaattagggaacaagcaggaaagcgacggaggagaagacggccgtcgcgacgtcgacgccgaccgtgccgagcacgaagaggaggctgcgcccccgccgcagggggagaggtttcctcaaggccgccatgacgtcaggctgttcgtcaacaaccgcgcgctcgccgacaccaggaagctcctgctggaaggcgtggtggccggaggaggagcgcacgggcggctgcaggacgagagcggcaaggacaggaacggcggggacagcagccggttcggcgcgtcgtcgacgctgacgagcgagtccacgtccaagagctcggtggagtggcagagctcgacgctgaccaaggactcggagacggagtaccccttctcgtcctcgtcgcgccggagctcggcgcgctgggagtcgtacacgctgttccgcaagtacgacgaggacatggtctacttccaccgcgtcggcgcccagaagctcaccgaaacagagtcgttccggtccatcaagtaccagccgcggtcgatgtcggagcggatcgtgcacaggctgacgacgcccaagccgccgacgccgagcgccgctatcgggctgcgggacccgtacccggagctggagcgcgcgtacgtggcgcaggtgtgcctgacgtgggaggccctgaactggagctacaccagcttccggcggcgcaacggcggcgacggcaacctggcggcgcggtgctgccccgcgcgcgtggcgcaggagttccagcagttccaggtgctgctgcaccgcttcgtcgagagcgagccgtacgagtgcggccggcggccggaggtgtacgcgcggatgaagaactccacgcccaagctgctcctcgtgccggagttcagagacgaggatgacgagaaggacgatctgatatcggcggtccagttcctgctcatactggaggagtccatcaggacgttcatggcgttcctccgcgccgacaagaggagccggtacgagatgttcagggagatggtgaagaagaggagggcgagcgccgccgtggaccagacgctggtcgtcacgctcaagaaggccaacaagaaaaagaagaggcggctcaaggacctgacgcggccgcggcggtgcctgaggaggacgaggctgagggaggaggaggagctgtccgtcctgctgggcctcatcgacctcaaggtggtggcgcgggtgctgcgcgcgccggaggtcaccgaccggcagctgcactggtgcgaggagaagatgaacagggtccgggtcgatccggagggcaagatgcagagggaccctgcccctctcttctaccctgcacactgacagggacctgctgctgctttgctgctggtgctggacaacagtcttgtgtgatactaatcttctagtacgtagctcttttgttttctttttcttttctttcttcttcgcatgttcttttgtccaagatatgtgtagtaggagaagagaaccaaaggcaaagttgcatttgcatatatagacatgagaatgtgcatggcacttagcctctcgtctagtagatcagagatgatgttactgtaaaaaggcacatacatgcatatatatctttattaagtagt

SEQ ID NO: 35358 - protein, 706 aa, Zea mays subsp. mays
MRMRNASGSSWCSRVAVLQQVLGAQASPHGFGVGAGALHLQRLGAATAPAGVESADDAVMPPAPPPLLFRALASLNLLLLVGYLLLVLLAKLFARLHHHRAAAEDRASSGWYDGRRCDHRRRRAEATATDDEEYAAADTVEGQQPDALFWFDEAVFEDSAALLMLGDEGKDHHLYAAASTRCLQQVESTSTFPAEESARISPRTESPSASSIDAIAERMQRVQEEAKGIVAVQHAPTTMVVLEPEQRSAPAAPVVVAVPPEHVSIELGNKQESDGGEDGRRDVDADRAEHEEEAAPPPQGERFPQGRHDVRLFVNNRALADTRKLLLEGVVAGGGAHGRLQDESGKDRNGGDSSRFGASSTLTSESTSKSSVEWQSSTLTKDSETEYPFSSSSRRSSARWESYTLFRKYDEDMVYFHRVGAQKLTETESFRSIKYQPRSMSERIVHRLTTPKPPTPSAAIGLRDPYPELERAYVAQVCLTWEALNWSYTSFRRRNGGDGNLAARCCPARVAQEFQQFQVLLHRFVESEPYECGRRPEVYARMKNSTPKLLLVPEFRDEDDEKDDLISAVQFLLILEESIRTFMAFLRADKRSRYEMFREMVKKRRASAAVDQTLVVTLKKANKKKKRRLKDLTRPRRCLRRTRLREEEELSVLLGLIDLKVVARVLRAPEVTDRQLHWCEEKMNRVRVDPEGKMQRDPAPLFYPAH

SEQ ID NO: 35359 - protein, 704 aa, Zea mays subsp. mays
MRNASGSSWCSRVAVLQQVLGAQASPHGFGVGAGALHLQRLGAATAPAGVESADDAVMPPAPPPLLFRALASLNLLLLVGYLLLVLLAKLFARLHHHRAAAEDRASSGWYDGRRCDHRRRRAEATATDDEEYAAADTVEGQQPDALFWFDEAVFEDSAALLMLGDEGKDHHLYAAASTRCLQQVESTSTFPAEESARISPRTESPSASSIDAIAERMQRVQEEAKGIVAVQHAPTTMVVLEPEQRSAPAAPVVVAVPPEHVSIELGNKQESDGGEDGRRDVDADRAEHEEEAAPPPQGERFPQGRHDVRLFVNNRALADTRKLLLEGVVAGGGAHGRLQDESGKDRNGGDSSRFGASSTLTSESTSKSSVEWQSSTLTKDSETEYPFSSSSRRSSARWESYTLFRKYDEDMVYFHRVGAQKLTETESFRSIKYQPRSMSERIVHRLTTPKPPTPSAAIGLRDPYPELERAYVAQVCLTWEALNWSYTSFRRRNGGDGNLAARCCPARVAQEFQQFQVLLHRFVESEPYECGRRPEVYARMKNSTPKLLLVPEFRDEDDEKDDLISAVQFLLILEESIRTFMAFLRADKRSRYEMFREMVKKRRASAAVDQTLVVTLKKANKKKKRRLKDLTRPRRCLRRTRLREEEELSVLLGLIDLKVVARVLRAPEVTDRQLHWCEEKMNRVRVDPEGKMQRDPAPLFYPAH

SEQ ID NO: 35360 - protein, 647 aa, Zea mays subsp. mays
MPPAPPPLLFRALASLNLLLLVGYLLLVLLAKLFARLHHHRAAAEDRASSGWYDGRRCDHRRRRAEATATDDEEYAAADTVEGQQPDALFWFDEAVFEDSAALLMLGDEGKDHHLYAAASTRCLQQVESTSTFPAEESARISPRTESPSASSIDAIAERMQRVQEEAKGIVAVQHAPTTMVVLEPEQRSAPAAPVVVAVPPEHVSIELGNKQESDGGEDGRRDVDADRAEHEEEAAPPPQGERFPQGRHDVRLFVNNRALADTRKLLLEGVVAGGGAHGRLQDESGKDRNGGDSSRFGASSTLTSESTSKSSVEWQSSTLTKDSETEYPFSSSSRRSSARWESYTLFRKYDEDMVYFHRVGAQKLTETESFRSIKYQPRSMSERIVHRLTTPKPPTPSAAIGLRDPYPELERAYVAQVCLTWEALNWSYTSFRRRNGGDGNLAARCCPARVAQEFQQFQVLLHRFVESEPYECGRRPEVYARMKNSTPKLLLVPEFRDEDDEKDDLISAVQFLLILEESIRTFMAFLRADKRSRYEMFREMVKKRRASAAVDQTLVVTLKKANKKKKRRLKDLTRPRRCLRRTRLREEEELSVLLGLIDLKVVARVLRAPEVTDRQLHWCEEKMNRVRVDPEGKMQRDPAPLFYPAH

SEQ ID NO: 35361 - DNA, 1605 bp, Zea mays subsp. mays
tagaacatcctaatcgaaaagtacccatgcttggattggaccaatcacctaacgaaagtttttgccttttcctgtcgagagaaaacccaagatctacctcctcccggtccctcgccgatcgagatctatccccaatcccttctcccccctccagccgacgggcgccggaggccgacggcgacggggcagcacattgcctctgattgattgatcgacagaagcctcgcgacccggcccccgcttcgccgtgatccggcgacccgaggagtcgagccgagcaccgaaatggggtcgttcaacggccacatcctgccggggacgctgttcctggcggtgggcctgtggcgggtgtggtccgccgtcgcgcgcttcgccgccgacccgccggcgttccgcgtccgcacgtggaaccccctccccaaggggccccggctgctggagctctacttggtggccggcggcgcgttcctggacatgtgcctggagctcggcggcggcatcctcgccggcggcgcccgggtcggcccggacagcctcatctacctcgagcacgccggcatgctgctcatgttcttcctcttcggcgcgctcgccctcctctcccagaagacaagcaggtacctgccgctgaccgacggcgagctgagcctagtggcagcgacggcattcacgtcagagctgcttctcttctcctaccactccgccacccacacggggctagagggagaggagaggagaggagaggagaggttgggtctgggacaccatggctccgatgaagctgtacggggcggtgatgtcgtggaacgtgacgaggtgcgcaacggcgctggaggaggctggctccgactacgagatcgtgcccatcaacttcgccaccgccgagcacaagagccccgagcacctcgtccgcaacccgtttggtcaggttccagctctgcaggatggtgacttgtacctcttcgaatcacgagcaatctgcaagtacgctgctcgcaaaaacaagccagagctgttgagggaaggaaacctcgaggaggcagcaatggtggatgtttggatcgaggtggaggctaaccagtacaccgctgcactgaaccccattctcttccaggtcctcatcagtccgatgcttgggggatccaccgaccagaaagttgtggatgagaaccttgagaagctgaagaaggtgctagaggtgtacgaggcacgcctgaccaagtgcaagtaccttgcctggagacttcctcagcctcgccgacctgaaccatgtgtctgtcactctctgcctgttcgctacgccctacgcatctgtgctcgacgcctacccgcatgtgaaggcctggtggtctggtctgatggagaggccgtctgtccagaaggtcgctgccttgatgaagccgtctgcttgaaacggttgccctgtcaatcggtgaatggaataagccaagtctgttctgggttgtttgcttgttcagtgatgtgtctttctatgacgaaagttgagtgcctatgtgtgagcatgcttgcttgtaacgagaccttgaattgttcggaaatgagcattcctgtgctcttctttaaaataaactttgccttaggttc

SEQ ID NO: 35362 - protein, 279 aa, Zea mays subsp. mays
MAPMKLYGAVMSWNVTRCATALEEAGSDYEIVPINFATAEHKSPEHLVRNPFGQVPALQDGDLYLFESRAICKYAARKNKPELLREGNLEEAAMVDVWIEVEANQYTAALNPILFQVLISPMLGGSTDQKVVDENLEKLKKVLEVYEARLTKCKYLAWRLPQPRRPEPCVCHSLPVRYALRICARRLPACEGLVVWSDGEAVCPEGRCLDEAVCLKRLPCQSVNGISQVCSGLFACSVMCLSMTKVECLCVSMLACNETLNCSEMSIPVLFFKINFALG

SEQ ID NO: 35363 - protein, 276 aa, Zea mays subsp. mays
MKLYGAVMSWNVTRCATALEEAGSDYEIVPINFATAEHKSPEHLVRNPFGQVPALQDGDLYLFESRAICKYAARKNKPELLREGNLEEAAMVDVWIEVEANQYTAALNPILFQVLISPMLGGSTDQKVVDENLEKLKKVLEVYEARLTKCKYLAWRLPQPRRPEPCVCHSLPVRYALRICARRLPACEGLVVWSDGEAVCPEGRCLDEAVCLKRLPCQSVNGISQVCSGLFACSVMCLSMTKVECLCVSMLACNETLNCSEMSIPVLFFKINFALG

SEQ ID NO: 35364 - protein, 269 aa, Zea mays subsp. mays
MSWNVTRCATALEEAGSDYEIVPINFATAEHKSPEHLVRNPFGQVPALQDGDLYLFESRAICKYAARKNKPELLREGNLEEAAMVDVWIEVEANQYTAALNPILFQVLISPMLGGSTDQKVVDENLEKLKKVLEVYEARLTKCKYLAWRLPQPRRPEPCVCHSLPVRYALRICARRLPACEGLVVWSDGEAVCPEGRCLDEAVCLKRLPCQSVNGISQVCSGLFACSVMCLSMTKVECLCVSMLACNETLNCSEMSIPVLFFKINFALG

SEQ ID NO: 35365 - DNA, 2697 bp, Zea mays subsp. mays
taatcgaaaaccaagccaacgcccgatcgagagcccgcatatctatatctcgctcgccgcggcaggcagagaggtggggtgccggccggcggcgaggagaaggtggaggagcacgtacgtgagttgggcgcggcgatgtcgcggttcgtcgacaagctgccattctttgaccggaggtcgtcgctgatggaggaggccggggacattccgcggagcggcctcctgcacatgcaccaccaccagccgcaccacagcggcctgctcatgcagccgcagccgtcgccgccggcgaagcagtcgtcgttcacgctcgcgcagctgctgaagcgcgtcaacgaggcgcgcagcgacgcctcgtcgcccacgtcctcgcccacgcactcgcactacaccatcgagctgggcggctccgtgccggggtccaccggcagcgacctgagcgagcgcataggcggcggcggcggcgacgggccgctcctgccgttcgtgctcaagttcacggacctcacgtacagcgtcaagcagcggaagaggggaccgtgcctgccggtgctgccgttccgccgcggggccggggagccggccgagcccgaggtgtcccggatgaaaacgctgctggacaacatctccggcgaggcaagggagggcgagatcatggcggtgctcggcgccagcggctccggcaagagcacgctcatcgacgcgctcgccaaccgcatcgtcaaggagagcctccgcggctccgtcacgctcaacggcgagtcgctcgacagcaacctgctcaaggtcatctccgcgtacgtcatgcaggacgacctcctgtacccgatgctcaccgtggaggagacgctcatgttcgccgccgagttccgcttgccccgctctctgccaaccaaggagaagaagaagcgcgtgcaggcgctcatcgaccagctgggcctgcgcaacgcggccaacaccatcatcggcgacgagggccaccgtggcgtgtccggcggggagcgccgccgggtgtccatcggcgtggacatcatccacgacccaatcgtcctgttccttgacgagcccacctccgggctcgactccaccagcgcgttcatggtggtcaaggtgctgcagcgcatcgcgcagagcggcagcgtggtggtcatgtccatccaccagccgagctaccgcatcctcggcctcctcgaccgcctcctgttcctctcccgcggccagacggtgtactacggcccgccaggcgcgctgccgtccttcttcaacgacttcggcaagcccatccctggcaacgagaacccgacggagttcgcgctcgacctcatcagggagctggagaccatgccggacggggccacggacctcgtggagcacaacaagaaatggcagatgcgcacggcccccaaggcgaagcaccacgacgggcacggcgagaagccgtcgctgtccctgaaggaggccatcagcgccagcatctcccgcgggaagctcgtgtccggcgcgaccgacggatccgtgtcggtgcactcggccggggagtcggcgcccgcagccgcggtgtccaagttcgcgaacccgttctgggtggagatgggcgtgctcacccggcgcgcgttcctcaacacgaagcgcacgccggaggatcttcatcatccgcctagcggccgtgatggtgacggggttcatcctggcgaccatcttctggcgcctggacgactcccccaagggagtccaggagcgcctgggcttcttcgccatcgccatgtccaccatgttctacacctgctccgactcgctgcccgtgttcctcaacgagcgctacatcttcctcagggagacggcctacaacgcgtaccggaggtcctcgtacgtgctctcccacaccatcgtcggcttcccgtcgctgatcgtgctctccttcgcgttcgcgctcacgacgttcttcgccgtgggcctggccggcggcgccgacgggttcttcttcttcgtggccatcgtgctggcctccttctgggcggggtccgggttcgcgacgttcctctccggcgtggtgacgaacgtgatgctgggcttccccgtggtggtgtcgacgctggcctacttcctcctgttcagcggcttcttcatcaaccgggaccgcatcccgcgctactggctctggttccactacctgtcgctggtgaagtatccgtacgaggcagtgatgcagaacgagttcagcgacccgacgcggtgcttcgtgcggggcgtgcagatgttcgacaacacgccgctggcggtgctgccggcggtgctcaaggtgcgggtgctgcgcgccatgagccagtcgctgggcgtggacatcggcacggccacgtgcatcacgacggggccggacttcctggcgcagcaggccgtgacggacctcaccaagtgggactgcctctggatcaccgtcgcctgggggttcctcttccgcatcctcttctacatttcgctgctgctcgggagcagaaacaagaggaggtgagcggttcctcgtcctgctggtgcgatcggtatgcacggggctggttgtatgttgctccctctgcctttattttcttcctcgatcgagctttttatcgcgtgtaaatttgcttgtaagctgtaagttttcgtggcaagtcaaactgtaacacagacaatatttgtacgatggttctctgttattgttcc

SEQ ID NO: 35366 - protein, 825 aa, Zea mays subsp. mays
MSRFVDKLPFFDRRSSLMEEAGDIPRSGLLHMHHHQPHHSGLLMQPQPSPPAKQSSFTLAQLLKRVNEARSDASSPTSSPTHSHYTIELGGSVPGSTGSDLSERIGGGGGDGPLLPFVLKFTDLTYSVKQRKRGPCLPVLPFRRGAGEPAEPEVSRMKTLLDNISGEAREGEIMAVLGASGSGKSTLIDALANRIVKESLRGSVTLNGESLDSNLLKVISAYVMQDDLLYPMLTVEETLMFAAEFRLPRSLPTKEKKKRVQALIDQLGLRNAANTIIGDEGHRGVSGGERRRVSIGVDIIHDPIVLFLDEPTSGLDSTSAFMVVKVLQRIAQSGSVVVMSIHQPSYRILGLLDRLLFLSRGQTVYYGPPGALPSFFNDFGKPIPGNENPTEFALDLIRELETMPDGATDLVEHNKKWQMRTAPKAKHHDGHGEKPSLSLKEAISASISRGKLVSGATDGSVSVHSAGESAPAAAVSKFANPFWVEMGVLTRRAFLNTKRTPEDLHHPPSGRDGDGVHPGDHLLAPGRLPQGSPGAPGLLRHRHVHHVLHLLRLAARVPQRALHLPQGDGLQRVPEVLVRALPHHRRLPVADRALLRVRAHDVLRRGPGRRRRRVLLLRGHRAGLLLGGVRVRDVPLRRGDERDAGLPRGGVDAGLLPPVQRLLHQPGPHPALLALVPLPVAGEVSVRGSDAERVQRPDAVLRAGRADVRQHAAGGAAGGAQGAGAARHEPVAGRGHRHGHVHHDGAGLPGAAGRDGPHQVGLPLDHRRLGVPLPHPLLHFAAAREQKQEEVSGSSSCWCDRYARGWLYVAPSAFIFFLDRAFYRV

SEQ ID NO: 35367 - protein, 808 aa, Zea mays subsp. mays
MEEAGDIPRSGLLHMHHHQPHHSGLLMQPQPSPPAKQSSFTLAQLLKRVNEARSDASSPTSSPTHSHYTIELGGSVPGSTGSDLSERIGGGGGDGPLLPFVLKFTDLTYSVKQRKRGPCLPVLPFRRGAGEPAEPEVSRMKTLLDNISGEAREGEIMAVLGASGSGKSTLIDALANRIVKESLRGSVTLNGESLDSNLLKVISAYVMQDDLLYPMLTVEETLMFAAEFRLPRSLPTKEKKKRVQALIDQLGLRNAANTIIGDEGHRGVSGGERRRVSIGVDIIHDPIVLFLDEPTSGLDSTSAFMVVKVLQRIAQSGSVVVMSIHQPSYRILGLLDRLLFLSRGQTVYYGPPGALPSFFNDFGKPIPGNENPTEFALDLIRELETMPDGATDLVEHNKKWQMRTAPKAKHHDGHGEKPSLSLKEAISASISRGKLVSGATDGSVSVHSAGESAPAAAVSKFANPFWVEMGVLTRRAFLNTKRTPEDLHHPPSGRDGDGVHPGDHLLAPGRLPQGSPGAPGLLRHRHVHHVLHLLRLAARVPQRALHLPQGDGLQRVPEVLVRALPHHRRLPVADRALLRVRAHDVLRRGPGRRRRRVLLLRGHRAGLLLGGVRVRDVPLRRGDERDAGLPRGGVDAGLLPPVQRLLHQPGPHPALLALVPLPVAGEVSVRGSDAERVQRPDAVLRAGRADVRQHAAGGAAGGAQGAGAARHEPVAGRGHRHGHVHHDGAGLPGAAGRDGPHQVGLPLDHRRLGVPLPHPLLHFAAAREQKQEEVSGSSSCWCDRYARGWLYVAPSAFIFFLDRAFYRV

SEQ ID NO: 35368 - protein, 794 aa, Zea mays subsp. mays
MHHHQPHHSGLLMQPQPSPPAKQSSFTLAQLLKRVNEARSDASSPTSSPTHSHYTIELGGSVPGSTGSDLSERIGGGGGDGPLLPFVLKFTDLTYSVKQRKRGPCLPVLPFRRGAGEPAEPEVSRMKTLLDNISGEAREGEIMAVLGASGSGKSTLIDALANRIVKESLRGSVTLNGESLDSNLLKVISAYVMQDDLLYPMLTVEETLMFAAEFRLPRSLPTKEKKKRVQALIDQLGLRNAANTIIGDEGHRGVSGGERRRVSIGVDIIHDPIVLFLDEPTSGLDSTSAFMVVKVLQRIAQSGSVVVMSIHQPSYRILGLLDRLLFLSRGQTVYYGPPGALPSFFNDFGKPIPGNENPTEFALDLIRELETMPDGATDLVEHNKKWQMRTAPKAKHHDGHGEKPSLSLKEAISASISRGKLVSGATDGSVSVHSAGESAPAAAVSKFANPFWVEMGVLTRRAFLNTKRTPEDLHHPPSGRDGDGVHPGDHLLAPGRLPQGSPGAPGLLRHRHVHHVLHLLRLAARVPQRALHLPQGDGLQRVPEVLVRALPHHRRLPVADRALLRVRAHDVLRRGPGRRRRRVLLLRGHRAGLLLGGVRVRDVPLRRGDERDAGLPRGGVDAGLLPPVQRLLHQPGPHPALLALVPLPVAGEVSVRGSDAERVQRPDAVLRAGRADVRQHAAGGAAGGAQGAGAARHEPVAGRGHRHGHVHHDGAGLPGAAGRDGPHQVGLPLDHRRLGVPLPHPLLHFAAAREQKQEEVSGSSSCWCDRYARGWLYVAPSAFIFFLDRAFYRV

SEQ ID NO: 35369 - DNA, 1349 bp, Zea mays subsp. mays
taatcgaaaaaccgcgagctcttgcagcctaacggccttagctaatttaagagagattagtaaacaaacagcagacttaagagcgagcctagctagcggcagtaccatgaggcgcctccagttcctggccgccgccgccgccgccatcttcctcctcgcgcttccgctgatggcgacggcccagccgaagctgaggccggactactacgccggcgtctgcccgaacctcgagagcattgtccgcggcgccgtgcggcagtccgtggcgctctcgccgctcgccgccccggccacgctccggctcttcttccacgactgcgcggtcaggggctgcgacgcgtcggtgatgctcatcgacccggccggcggcgacgagtggcggagccccgacggcgtgatgctgaagccggaagggttcagcacggtgatgagcgccaaggcggcggtggacagcgacccgcagtgccggaacattgtgtcctgcgccgacatcttggccctcgccgccagggactccgtgttcctgagcggagggccagactacgaagtggagctgggcaggttcgacggcagggtgtcgagtggtggcagcgtcgtggttcctcatggcacgttcgacctcgaccagctcaacgccttcttctccagcctcggtctctcccagaccgacatgatcgcactgtcagggggtcacacgatcggcgcggcgtcgtgcggctccttcgcgtaccgggtgggcgcggatccggccatggacccggcgctcgcgcagcaggtcctggcgcgctgcccggggggcgggccagccgggttcgcgttcctggacgccacgacgccgctgcggttcgacaacgagtactaccggaacctgctcggcgggatggggatcctggcctccgaccaggtgctgtacgccgacccgaggtcccgcggcgccgtcgagcgctacgccgcggaccaggccgccttcttcggggactttgccgcggcaatgacgaggctcggcagggtcggggtccgcacggcggccgacggcgagatacgccgcgactgcaggttccccaacccccaactgatgggttcgccggctggctgtggcttggcttgtggttgcgcacttgcgcttgcgcgacggttttgtgttgcttctatcttctgtgacgtcacccgtggacgtggcgcgagtgggtgtctgtgttgcgttgttgacttgagtggacgtgcagaaggccgcgtgtcttttggaccaggaaggctctgggcctggtgggctgtgtcctgtgtggctccaagatgggtgtcatatctgttgtgaagggaaatgaaatgtaaagattggtggttggcct

SEQ ID NO: 35370 - protein, 437 aa, Zea mays subsp. mays
NRKTASSCSLTALANLREISKQTADLRASLASGSTMRRLQFLAAAAAAIFLLALPLMATAQPKLRPDYYAGVCPNLESIVRGAVRQSVALSPLAAPATLRLFFHDCAVRGCDASVMLIDPAGGDEWRSPDGVMLKPEGFSTVMSAKAAVDSDPQCRNIVSCADILALAARDSVFLSGGPDYEVELGRFDGRVSSGGSVVVPHGTFDLDQLNAFFSSLGLSQTDMIALSGGHTIGAASCGSFAYRVGADPAMDPALAQQVLARCPGGGPAGFAFLDATTPLRFDNEYYRNLLGGMGILASDQVLYADPRSRGAVERYAADQAAFFGDFAAAMTRLGRVGVRTAADGEIRRDCRFPNPQLMGSPAGCGLACGCALALARRFCVASIFCDVTRGRGASGCLCCVVDLSGRAEGRVSFGPGRLWAWWAVSCVAPRWVSYLL

SEQ ID NO: 35371 - protein, 402 aa, Zea mays subsp. mays
MRRLQFLAAAAAAIFLLALPLMATAQPKLRPDYYAGVCPNLESIVRGAVRQSVALSPLAAPATLRLFFHDCAVRGCDASVMLIDPAGGDEWRSPDGVMLKPEGFSTVMSAKAAVDSDPQCRNIVSCADILALAARDSVFLSGGPDYEVELGRFDGRVSSGGSVVVPHGTFDLDQLNAFFSSLGLSQTDMIALSGGHTIGAASCGSFAYRVGADPAMDPALAQQVLARCPGGGPAGFAFLDATTPLRFDNEYYRNLLGGMGILASDQVLYADPRSRGAVERYAADQAAFFGDFAAAMTRLGRVGVRTAADGEIRRDCRFPNPQLMGSPAGCGLACGCALALARRFCVASIFCDVTRGRGASGCLCCVVDLSGRAEGRVSFGPGRLWAWWAVSCVAPRWVSYLL

SEQ ID NO: 35372 - protein, 381 aa, Zea mays subsp. mays
MATAQPKLRPDYYAGVCPNLESIVRGAVRQSVALSPLAAPATLRLFFHDCAVRGCDASVMLIDPAGGDEWRSPDGVMLKPEGFSTVMSAKAAVDSDPQCRNIVSCADILALAARDSVFLSGGPDYEVELGRFDGRVSSGGSVVVPHGTFDLDQLNAFFSSLGLSQTDMIALSGGHTIGAASCGSFAYRVGADPAMDPALAQQVLARCPGGGPAGFAFLDATTPLRFDNEYYRNLLGGMGILASDQVLYADPRSRGAVERYAADQAAFFGDFAAAMTRLGRVGVRTAADGEIRRDCRFPNPQLMGSPAGCGLACGCALALARRFCVASIFCDVTRGRGASGCLCCVVDLSGRAEGRVSFGPGRLWAWWAVSCVAPRWVSYLL

SEQ ID NO: 35373 - DNA, 1471 bp, Zea mays subsp. mays
  misc_feature (1141)..(1141): n is a, c, g, or t
gcacgagaccattacctagaacatcctaatcgaaaaaaaaaaaataatgctgggtccctttcaacaatctggagagagagagagagcggttcttccctttggtcccgcagctgcgatccctctccttcctcgtgggacctgggaagctcgttttccacaaccaccatgcgaactgtcctgtgtctgtgtgtgctttggctgcgtccatgaccatgaatgaaccagtggctggttggttggctggcatgcaggggaattcgcggcattcctgacgggggcgaacctgatcatggagtacgtcttctccaacgccgccgtggcgcgcagcttcacggcgtacctcggcacggcggtgggtgtggacgcgcccagcaagtggaggattcctgtgccgggcctgccccaggggttcaaccaggtggacctcgtcgccgtcggcgtcatcctcctgctctctgtctgcatctgctacagcacaaaggagagctcggtggtgaacctggtgctgacgggcgtgcacgtggtgttcatcctcttcatcatcgtcatggggttcgcgcacggcgacgcgcgcaacctgagcaggcccgccgacccggcccacagccccggcggcttcttcccgcacggcgccgcgggcgtgttcaacggcgcggccgcggtgtacctgagctacatcggctacgacgccgtgtccaccatggccgaggaggtggagcggcctgaccgcgacatccccgccggcgtctccggctccgtcgtcctcgtcaccgtgctctactgcctcatggccacctccatgtccatgctcctcccgtacgacgcgatcgacccggaggcgccgttctcgggggcgttcaaggggcgggacgggatggcgtgggtgtccaacgtcatcggcgccggcgcgagcctcggcatcctcacgtcactgatggtggccatgctggggcaggcccggtacctgtgcgtcatcggccgctccggcgtcgtgcccgcctggctcgccagggtcgacccccgcaccgccacccccatcaacgcctccgccttcctcggcctgctgacggcggcgctggcgctgttcacggagctggacgtgctcctgaacctcgtctccatcggcacgctcttcgttttntacatggtggccaacgccgtcgtgtaccgccgctacgtgggcgacccgtgccccggcgcacttgcgaccttccgttctctgctagcaaccttgttgattctgttttgtgcgctcggttctagtcttcccggcgcacttcccataggcaagctgtcaagaggattatagggtacctttgtttcactcctgagtttggtttgtggtactccttgtcttctgccatgtctttgtctgggtattcagatgttgattttgcggcatgtcctttggatcgcaaatctacttttaggacttgttagtttttggggactttgttggtggtcttcacgc

SEQ ID NO: 35374 - protein, 339 aa, Zea mays subsp. mays
  misc_feature (284)..(284): Xaa can be any naturally occurring amino acid
MEYVFSNAAVARSFTAYLGTAVGVDAPSKWRIPVPGLPQGFNQVDLVAVGVILLLSVCICYSTKESSVVNLVLTGVHVVFILFIIVMGFAHGDARNLSRPADPAHSPGGFFPHGAAGVFNGAAAVYLSYIGYDAVSTMAEEVERPDRDIPAGVSGSVVLVTVLYCLMATSMSMLLPYDAIDPEAPFSGAFKGRDGMAWVSNVIGAGASLGILTSLMVAMLGQARYLCVIGRSGVVPAWLARVDPRTATPINASAFLGLLTAALALFTELDVLLNLVSIGTLFVXYMVANAVVYRRYVGDPCPGALATFRSLLATLLILFCALGSSLPGALPIGKLSRGL

SEQ ID NO: 35375 - protein, 253 aa, Zea mays subsp. mays
  misc_feature (198)..(198): Xaa can be any naturally occurring amino acid
MGFAHGDARNLSRPADPAHSPGGFFPHGAAGVFNGAAAVYLSYIGYDAVSTMAEEVERPDRDIPAGVSGSVVLVTVLYCLMATSMSMLLPYDAIDPEAPFSGAFKGRDGMAWVSNVIGAGASLGILTSLMVAMLGQARYLCVIGRSGVVPAWLARVDPRTATPINASAFLGLLTAALALFTELDVLLNLVSIGTLFVXYMVANAVVYRRYVGDPCPGALATFRSLLATLLILFCALGSSLPGALPIGKLSRGL

SEQ ID NO: 35376 - protein, 202 aa, Zea mays subsp. mays
  misc_feature (147)..(147): Xaa can be any naturally occurring amino acid
MAEEVERPDRDIPAGVSGSVVLVTVLYCLMATSMSMLLPYDAIDPEAPFSGAFKGRDGMAWVSNVIGAGASLGILTSLMVAMLGQARYLCVIGRSGVVPAWLARVDPRTATPINASAFLGLLTAALALFTELDVLLNLVSIGTLFVXYMVANAVVYRRYVGDPCPGALATFRSLLATLLILFCALGSSLPGALPIGKLSRGL

SEQ ID NO: 35377 - DNA, 942 bp, Zea mays subsp. mays
  misc_feature (54)..(54): n is a, c, g, or t
  misc_feature (166)..(166): n is a, c, g, or t
  misc_feature (905)..(906): n is a, c, g, or t
aaaagaacaacctggagaggctgtattgcctgcttcagcagtggaatccaattntgatgggttgcaaagcgtgccccatggctcagttggagctgttgcaggtcgtcgtgctatagctcagggaaaccctgatgaagttgctgcagcattgtgtagatattcagcnccagaagaggttgatactttaccatcaacatgtggagcctgtggaacagaatgcgtcacacgtttctttgctacaaaaatcccatatttccgggaggtgattgttatggcaacaacatgtgacatgtgtggttatcgcaattcagagctgaagcctgggggtgaaattccagctaagggaaagaaaattacactgcgtgttcaaaatgcacaagaccttactcgtgatgtcataaagtcagattcagctagcgtaaaagtacctgaacttgagttggaactttcatgtggaacgttgggtggtatggtcacaactgttgaaggtttaattgtgaaaatatgtgaggctctggagagaatacatggatttcaattaggcgatagtacactggaatggaaaaagaagaaatgggatgacttcaaggagagactatccaagcttctgagtttacaagaagcctggactctaataattgatgatggattggcggcttcatttgtggccccggctactgattcgttagaagatgacagccaactaaccattgaagagtatcagaggagttgggagcagaacgaggaacttggtctgaatgacatggatacgtcctctgcagacgcggcttacaacacgaccaacacataatttttttagttttgttgtgccgaatgtatttgttacgctatcagtttactttgatgaactttcagtgtgtatactaatatcaacaacttatatnncctctgacgataaacatcgagcgaacgtgcgaggcc

SEQ ID NO: 35378 - protein, 269 aa, Zea mays subsp. mays
  misc_feature (18)..(18): Xaa can be any naturally occurring amino acid
  misc_feature (55)..(55): Xaa can be any naturally occurring amino acid
KEQPGEAVLPASAVESNXDGLQSVPHGSVGAVAGRRAIAQGNPDEVAAALCRYSXPEEVDTLPSTCGACGTECVTRFFATKIPYFREVIVMATTCDMCGYRNSELKPGGEIPAKGKKITLRVQNAQDLTRDVIKSDSASVKVPELELELSCGTLGGMVTTVEGLIVKICEALERIHGFQLGDSTLEWKKKKWDDFKERLSKLLSLQEAWTLIIDDGLAASFVAPATDSLEDDSQLTIEEYQRSWEQNEELGLNDMDTSSADAAYNTTNT

SEQ ID NO: 35379 - protein, 179 aa, Zea mays subsp. mays
MATTCDMCGYRNSELKPGGEIPAKGKKITLRVQNAQDLTRDVIKSDSASVKVPELELELSCGTLGGMVTTVEGLIVKICEALERIHGFQLGDSTLEWKKKKWDDFKERLSKLLSLQEAWTLIIDDGLAASFVAPATDSLEDDSQLTIEEYQRSWEQNEELGLNDMDTSSADAAYNTTNT

SEQ ID NO: 35380 - protein, 173 aa, Zea mays subsp. mays
MCGYRNSELKPGGEIPAKGKKITLRVQNAQDLTRDVIKSDSASVKVPELELELSCGTLGGMVTTVEGLIVKICEALERIHGFQLGDSTLEWKKKKWDDFKERLSKLLSLQEAWTLIIDDGLAASFVAPATDSLEDDSQLTIEEYQRSWEQNEELGLNDMDTSSADAAYNTTNT

SEQ ID NO: 35381 - DNA, 1977 bp, Zea mays subsp. mays
  misc_feature (1474)..(1474): n is a, c, g, or t
  misc_feature (1503)..(1503): n is a, c, g, or t
  misc_feature (1581)..(1581): n is a, c, g, or t
  misc_feature (1617)..(1617): n is a, c, g, or t
  misc_feature (1641)..(1641): n is a, c, g, or t
  misc_feature (1667)..(1667): n is a, c, g, or t
  misc_feature (1727)..(1727): n is a, c, g, or t
  misc_feature (1736)..(1736): n is a, c, g, or t
  misc_feature (1803)..(1803): n is a, c, g, or t
  misc_feature (1950)..(1950): n is a, c, g, or t
  misc_feature (1965)..(1965): n is a, c, g, or t
  misc_feature (1971)..(1972): n is a, c, g, or t
cacgccgcactcacacatgcatccataaaccctcagcagagccttgtgtcgcgtcctctcctcgataacccaggccacatcgtccttccgcgccgcgccgccggcgacctaacaacccagaggcctcagcaccgcacgcttgcacgtacgtccaggcgcgctcgccgttacgcccacggggatccaggctttccttcgctgccgttgctggtcgagtgcgccacgctgaaaggtgatcgagctgacgagcgctagacgccaccggccggcgcggcgtggcaaggcaagacgccgtgcgggtctcgccctcgtcagctataagaccgcatccccccctgcggagggaggcacacacacagacacagcgctctcactagcctcgcattccgtccctgcagtgcaggggcaggccggtgaggtctgggagaggaggaggaggaggaggaggagatggccggtagggagagcggcgggatggcggcggcgctgcgctgcgctggaaggatcgggatcctggccaccgtcgccgtgaacctcgcgtggatcgcgacgtacatccgccggcgctacttcggcggcgggaaccgatccgacaacaacggtggcggcggggaggtggagccgtcaagagggaagccgccggtcacttcggactccatcgtcaacctcgatcatggcgacccgactatgtacgaggagttctggcgcggcacaggagatagcgcctcgatcttcatccctggttggcaaacaatgagctacttctccgacctcggcggcatctgttggttcctggagcctggattcgagcgcgaggtgcggcgtctccacaggctcgtggggaatgccgttgtagacggataccatgtgctcgtcgggacaggctccactcagctctttcaggccgtgctgtacgcgctctcacctgcaagtgacggcacacccatgaacgtcgtctcaccggcaccgtactactcgtcttacccatctgtgaccaactatctaaactctgcgctctaccgttgggctggtgatgccaatacatttgatggagacacatgtattgagctcgtctgctcgccaaacaaccctgatggtggcctccggaagcctgtcatcaaatccaagtctagcaagcctgtttatgacttcgcctactactggccgcagtacacacccatcaccgaggcagctgcccatgatatcatgctgttcactgtctccaaatgcaccggccatgccggcaccaggctggggtgggcattggtgaaggatactaaggtggctcagaagatgatcaagtttatagagctcaacacaattggtgtatccaaggactctcaacttcgtgccgctaagattatcggggcaatatgtaatggctatgagccggtaccatcctctggtaaaacaagccaactcttccatttcgccaaggaaaaaatggcggctcgctgggctagacttcgtgcanctgtggcagcctcagacatctttactctncccttatgagctatctggctattgtagcttttccaatgagactgtcaccgccaatcctccatttgcatggcttcgctncaacaaggatgatattgaagatctggaggccttccnactcgagaaaaagattatcactcnaggtggcacaaggtttggagtggatncaagggctgtcagagttagtatggttgacacagaccaagccttcaatgtgttcatcaatngtctggccncaatgaagtgaaatttcagtgcaaattaataaagcactttgtggctactacaaggatgaccgcgttntagatggaacaatcgatgctttggaaagcttaataatgttttatgttgttgaataattccgtgtgttttcgggtatgttgtgtaatactcaatgtcaaatcctatgcttaatcgatgttgtggtccatcctgttatcagcatggccnattatatatggatgnccgtcnntgctc

SEQ ID NO: 35382 - protein, 353 aa, Zea mays subsp. mays
  misc_feature (342)..(342): Xaa can be any naturally occurring amino acid
  misc_feature (351)..(351): Xaa can be any naturally occurring amino acid
MAGRESGGMAAALRCAGRIGILATVAVNLAWIATYIRRRYFGGGNRSDNNGGGGEVEPSRGKPPVTSDSIVNLDHGDPTMYEEFWRGTGDSASIFIPGWQTMSYFSDLGGICWFLEPGFEREVRRLHRLVGNAVVDGYHVLVGTGSTQLFQAVLYALSPASDGTPMNVVSPAPYYSSYPSVTNYLNSALYRWAGDANTFDGDTCIELVCSPNNPDGGLRKPVIKSKSSKPVYDFAYYWPQYTPITEAAAHDIMLFTVSKCTGHAGTRLGWALVKDTKVAQKMIKFIELNTIGVSKDSQLRAAKIIGAICNGYEPVPSSGKTSQLFHFAKEKMAARWARLRAXVAASDIFTXPL

SEQ ID NO: 35383 - protein, 345 aa, Zea mays subsp. mays
  misc_feature (334)..(334): Xaa can be any naturally occurring amino acid
  misc_feature (343)..(343): Xaa can be any naturally occurring amino acid
MAAALRCAGRIGILATVAVNLAWIATYIRRRYFGGGNRSDNNGGGGEVEPSRGKPPVTSDSIVNLDHGDPTMYEEFWRGTGDSASIFIPGWQTMSYFSDLGGICWFLEPGFEREVRRLHRLVGNAVVDGYHVLVGTGSTQLFQAVLYALSPASDGTPMNVVSPAPYYSSYPSVTNYLNSALYRWAGDANTFDGDTCIELVCSPNNPDGGLRKPVIKSKSSKPVYDFAYYWPQYTPITEAAAHDIMLFTVSKCTGHAGTRLGWALVKDTKVAQKMIKFIELNTIGVSKDSQLRAAKIIGAICNGYEPVPSSGKTSQLFHFAKEKMAARWARLRAXVAASDIFTXPL

SEQ ID NO: 35384 - protein, 274 aa, Zea mays subsp. mays
  misc_feature (263)..(263): Xaa can be any naturally occurring amino acid
  misc_feature (272)..(272): Xaa can be any naturally occurring amino acid
MYEEFWRGTGDSASIFIPGWQTMSYFSDLGGICWFLEPGFEREVRRLHRLVGNAVVDGYHVLVGTGSTQLFQAVLYALSPASDGTPMNVVSPAPYYSSYPSVTNYLNSALYRWAGDANTFDGDTCIELVCSPNNPDGGLRKPVIKSKSSKPVYDFAYYWPQYTPITEAAAHDIMLFTVSKCTGHAGTRLGWALVKDTKVAQKMIKFIELNTIGVSKDSQLRAAKIIGAICNGYEPVPSSGKTSQLFHFAKEKMAARWARLRAXVAASDIFTXPL

SEQ ID NO: 35385 - DNA, 742 bp, Zea mays subsp. mays
aagagtctgagagaatggctaacactgctaagggtaaggtctgtgtcactggggcgtctggtttcatcgcctcctggctcgtcaagcggcttcttgagtctgggtaccatgtcctgggaacagtcagagacccagggaatggcaagaaagtagggcacctctggggcctggaaggcgccatgaccgtggagggtatcaccgccccagcccaagacgtagccgcagccctgcagaaccgagacagaatgtgaatgataggcctcgatcaggtcatggcggaggcgatcctgaccacagccctcctgccaacaggtccagatcgaagagccgggaccccttgggacccagatctcctgatgctgccccagccaagagggagagctccagatacaaccgcaggcgcagcagcagctcaaggtccagcagccctgatggaaacaaaggcctggtttcgtactgagaagtaacggcacaacagtttgcaggctccatggaccatgtttcttgctagtttagcatcatgtactcttttgtaatgcattctgaacttgaactgctttcgatgcaggtgtagatttatatgttctgttagatttgaatgtttcttatgccagatatttatagaactactgagtagagcaggggaaaggctcgagcctcgtgaactggcttgagcttgctaaggcttggagaggctcgcgagtttgtaagcctgaatcgagactacttttatgactcgctc

SEQ ID NO: 35386 - protein, 82 aa, Zea mays subsp. mays
ESERMANTAKGKVCVTGASGFIASWLVKRLLESGYHVLGTVRDPGNGKKVGHLWGLEGAMTVEGITAPAQDVAAALQNRDRM

SEQ ID NO: 35387 - protein, 78 aa, Zea mays subsp. mays
MANTAKGKVCVTGASGFIASWLVKRLLESGYHVLGTVRDPGNGKKVGHLWGLEGAMTVEGITAPAQDVAAALQNRDRM

SEQ ID NO: 35388 - protein, 71 aa, Zea mays subsp. mays
MIGLDQVMAEAILTTALLPTGPDRRAGTPWDPDLLMLPQPRGRAPDTTAGAAAAQGPAALMETKAWFRTEK

SEQ ID NO: 35389 - DNA, 1699 bp, Zea mays subsp. mays
gcacgagaccattacctagaacatcctaatcgaaaagcttttcctctttctgcgtctgcctctgccactcgtccctcctggatcagtgagtcccggagtagaagatccggcctttttagctgcttgtagtggtagttggttgtttctggggagttgcaccaccgggaagcggggcaggagaggagggttggtgggattgcggtgatggactccggcaacagcgggagcctccagtcgtctagcggcggcggcgacgacgagtacgactctcgggccggcggcggtggagggggcgtcgactcctccgcgctcgccgcactgctccgaccatcgccgtcgccctcggccgccgcgttctcgctccacggctcctacttcggcctgcaagagctgacgtcgtcggcgccgccgcctccgcagcagcagcagcagccgggtacctggtcattaggggcgttcgctggcgcctcggggctgccctcctcctcgtccccgcgcgtcgcgcaaccccgactcgggcacgggcgggcggcagcaggctgctgacaccacgacagtggggcgggatgcccgcgccggcgcagccaccgagggggacgcggaagcgagcgcgcgcgtcgcggcgggcgcccacgacggtgctgacgaccgacacctccaacttccgcgccatggtgcaggagttcacgggcatcccgtccccgcccttcgccgcgggcgtcggggtcgggggccccgccgcgtcgctccgcacccgcttcgaccacatcttccccccgccgtcctcctccctgccgccgtacctcctgcgccccttcccgcagaagctccctgctgcgccctccagtttcccgcccttcacgacgacgacgacgacggcgacaccgtcgtcgtcctcgtccacgcccgtcggcgtcgccaatgccaatgccgcgacgggcacgtccgccaccgcagcagcaccctccaaccctgccgcgccggcagcggcagcggcagccggagcgggcgacaccttccatcatctgacgtcctcggcgcttctccggctacaggaccccagcggctgctacctctccttcccgaacctcctcgacccgcagccgccgtcgtcgcagtgcattttcggcgcggcgggcgggttcgggcaggcgtcgaggctgcacgacccggcgccgtcgccgtcggatttcctggccagcggaagcctcggcctcagtcacggcggactcttgggctccgagggcctacacttgcaccacccaaggaccgacgacgagctgtcgggtgtggtcgcggccggcgcttcgggcggcagctgcaagctgaactactcccacgccggcgcggccacctcgtcatcgggcgccgacaagccaccagacggcggcggcgccggtgctggcggaaccggaaggccgggacgaggcgagggcctggatccgtggatttgtacatcggagtagggatgggcaaggcatgctgcttcgtcctgtgtgagctgtgcgatacggcggggacgaacacgaaaccgagccaaatccgccatgcatgagcaatgacaaaacgaaggtctgattataccttttgttacttattgttaaatcatcacttctttgccgaggcagttgtcgtagattgccgccccttttgtacattaaattaaaaaaaaaccatcatcttgcttcggcttgatctc

SEQ ID NO: 35390 - protein, 299 aa, Zea mays subsp. mays
MPAPAQPPRGTRKRARASRRAPTTVLTTDTSNFRAMVQEFTGIPSPPFAAGVGVGGPAASLRTRFDHIFPPPSSSLPPYLLRPFPQKLPAAPSSFPPFTTTTTTATPSSSSSTPVGVANANAATGTSATAAAPSNPAAPAAAAAAGAGDTFHHLTSSALLRLQDPSGCYLSFPNLLDPQPPSSQCIFGAAGGFGQASRLHDPAPSPSDFLASGSLGLSHGGLLGSEGLHLHHPRTDDELSGVVAAGASGGSCKLNYSHAGAATSSSGADKPPDGGGAGAGGTGRPGRGEGLDPWICTSE

SEQ ID NO: 35391 - protein, 264 aa, Zea mays subsp. mays
MVQEFTGIPSPPFAAGVGVGGPAASLRTRFDHIFPPPSSSLPPYLLRPFPQKLPAAPSSFPPFTTTTTTATPSSSSSTPVGVANANAATGTSATAAAPSNPAAPAAAAAAGAGDTFHHLTSSALLRLQDPSGCYLSFPNLLDPQPPSSQCIFGAAGGFGQASRLHDPAPSPSDFLASGSLGLSHGGLLGSEGLHLHHPRTDDELSGVVAAGASGGSCKLNYSHAGAATSSSGADKPPDGGGAGAGGTGRPGRGEGLDPWICTSE

SEQ ID NO: 35392 - DNA, 564 bp, Zea mays subsp. mays
aacttttttaactggagcagcagagaactgaaaagtgcccgcctctcgctcgcatcaggaaatcaacgactgagtctccacgactgtcggtcacttcggatggcggcaccaccggaggggaatgtccgcttaggcgaggggtgggacgaggacgacgtgctggagccgcagccgctggaggtcatagcgccggatgtcaagtccaagaagcgcaatccggcgcccggagttcgggttgttggtcgccggatctacgatccagagaatggcaagacctgccaccaatgccgccaggaagacaacagacttcgcagcggcgtgcaagcaagtcaagaagaagggtccgtgcccagtcaagtattgcctcaagtgcctccttaacaggtatggcgagagtgccgaggaggcggccggcaaggaggactggatctgtcctaagtgcaggggcatctgcaactgcagcttctgtagaaagaagaaaggcgagatgccaactgggataatggcccacatcgccaaggcttccgggtgcacctctgtccatgatctccttaaaaaggggtc

SEQ ID NO: 35393 - protein, 126 aa, Zea mays subsp. mays
NFFNWSSRELKSARLSLASGNQRLSLHDCRSLRMAAPPEGNVRLGEGWDEDDVLEPQPLEVIAPDVKSKKRNPAPGVRVVGRRIYDPENGKTCHQCRQEDNRLRSGVQASQEEGSVPSQVLPQVPP

SEQ ID NO: 35394 - protein, 123 aa, Zea mays subsp. mays
MSSPRSAIRRPEFGLLVAGSTIQRMARPATNAARKTTDFAAACKQVKKKGPCPVKYCLKCLLNRYGESAEEAAGKEDWICPKCRGICNCSFCRKKKGEMPTGIMAHIAKASGCTSVHDLLKKG

SEQ ID NO: 35395 - protein, 99 aa, Zea mays subsp. mays
MARPATNAARKTTDFAAACKQVKKKGPCPVKYCLKCLLNRYGESAEEAAGKEDWICPKCRGICNCSFCRKKKGEMPTGIMAHIAKASGCTSVHDLLKKG

SEQ ID NO: 35396 - protein, 93 aa, Zea mays subsp. mays
MAAPPEGNVRLGEGWDEDDVLEPQPLEVIAPDVKSKKRNPAPGVRVVGRRIYDPENGKTCHQCRQEDNRLRSGVQASQEEGSVPSQVLPQVPP

SEQ ID NO: 35397 - DNA, 1295 bp, Zea mays subsp. mays
gcacgagaccattacctagaacatcctaatcgaaaagcaagtgctgtttggtttagctgcctcttgccgctggcagccagcggaagccaaccaccttgtccccgtcgagcaccgagaccgcgactcctcaccgcactgcgccgctcgcgagaacctcgcgtaagcttcggcaagcagcatccgtcccgccgatcgcaatgccggaggacaaggagtacgcgcccctgccactcggccaggcggcggcgcctgaccccgaggaccccgtcaagtcgccgccgcgacccagctcgcctgccacgtccactcgcaaggcatgctttgctgttcttcaaagctgggtgtcaagaaaatttatgaccggatgtgtagttcttttcccaattgctgtcacattcttcctcacgtggtggtttattcaatttgttgatggttttttcagcccactctatgcaaaactggggtttgacatgttcggccttggattttttacctccctggtgttcatacttcttgttggaatctttgtgtcttcttgggtgggttcaactgtcttctgggttggagaatggtttataaaaaaaatgccatttgtaaggcacatatactctgcatcaaagcaagttagtactgctgtttcaccagatcaaaatacaacagcattcaaagaagtagcaattattagtcatccccgtgttggtgaatatgcgtttggattcataacatcaaccatggttcttcagacagacaaaggtgatgaagaattgtgtagtgtttatgtgccaaccaatcatttatatatcggtgacatctttttggtaaactccaccgacattataaggcccaatttgtccattcgtgaaggcattgaaataattgtttcaggaggaatgactatgccacaggtgatcacgtcactggaaccaacacctcggaagagccacgtccgtttagacagagtgaggactgtatgaggcatgaatgaaagcgatgggtgtttcaggatggattgtttaattaatggattcaaagctggggcatggagcatgaagcagtatcagtttgtagattgcattcagaactcgggtgcgcgttggtagacgtagatacatgacaacctgcattgactttcgttgcaatcggttggtgacacgaattttgcagctccacttacaagcacgagatgcacttttaactgttctccagcagtgtgctagatcgtgtttacctgaacgcgattcaatgctgcatctaccagtgttacttgtgtatataaagttccttatgctactgcc

SEQ ID NO: 35398 - protein, 258 aa, Zea mays subsp. mays
MPEDKEYAPLPLGQAAAPDPEDPVKSPPRPSSPATSTRKACFAVLQSWVSRKFMTGCVVLFPIAVTFFLTWWFIQFVDGFFSPLYAKLGFDMFGLGFFTSLVFILLVGIFVSSWVGSTVFWVGEWFIKKMPFVRHIYSASKQVSTAVSPDQNTTAFKEVAIISHPRVGEYAFGFITSTMVLQTDKGDEELCSVYVPTNHLYIGDIFLVNSTDIIRPNLSIREGIEIIVSGGMTMPQVITSLEPTPRKSHVRLDRVRTV

SEQ ID NO: 35399 - protein, 205 aa, Zea mays subsp. mays
MTGCVVLFPIAVTFFLTWWFIQFVDGFFSPLYAKLGFDMFGLGFFTSLVFILLVGIFVSSWVGSTVFWVGEWFIKKMPFVRHIYSASKQVSTAVSPDQNTTAFKEVAIISHPRVGEYAFGFITSTMVLQTDKGDEELCSVYVPTNHLYIGDIFLVNSTDIIRPNLSIREGIEIIVSGGMTMPQVITSLEPTPRKSHVRLDRVRTV

SEQ ID NO: 35400 - protein, 167 aa, Zea mays subsp. mays
MFGLGFFTSLVFILLVGIFVSSWVGSTVFWVGEWFIKKMPFVRHIYSASKQVSTAVSPDQNTTAFKEVAIISHPRVGEYAFGFITSTMVLQTDKGDEELCSVYVPTNHLYIGDIFLVNSTDIIRPNLSIREGIEIIVSGGMTMPQVITSLEPTPRKSHVRLDRVRTV

SEQ ID NO: 35401 - DNA, 1959 bp, Zea mays subsp. mays
actctaggtatcccgtgtccaacggtccacccccaccgcaaccgccgtccgtccgtccgtccgcccgccgccgcaccctgctagggtttcggccaggccggatccgccgccgcctgtagattctcctatccgaccgcggcgcctcgagccgcaccggcaacctcggacctgaatacctgatacactgcacttcttcagtccgcaggaccacagcacgcacaattgttcttcaatctgcaggactgcagccgcgcacaagccgtagctgtttccttggaactttgagctttggaagatgccaaggagaacaggaaatgctgctccaaccaaatcagctgaattggtcaaacaagaccaattggagtttgatgatcctgacgaggtagatgaagaggaagaagttgagtatgaagaaattgaggaggaggttgagtatgaagaggtagaggaggaggaggaggaggaggatgaggaggatgaagaaatggaaggtgtgcatgaaattgatgctaatgatgaaagtaaaatggtggatgctgatgggaaggttgagaatgaaaaagagaagcatgctgagcttcttgctcttcctcctcatggagctgaagtttatgttgggggcatatcttctgatgtatcttctgaagatctcaaacaactatttgaatctgttggtgaagttgtggaagtgcgaatgcgaggaaagggggataacaggacttatgcttttattaatttcagaactaaagcgatggccttaaaggccatccaaaatttgagcaataaagacctaaagggaaagaagataaaagtttctccctcccaggctaagaacaggctatttattgggaatgtaccccatgactggacacatgatgatttcaaaactgcagtggaagaagttggtcctggagttttaaaagttgaactcatgaaggcgccaggcttagatcgcaataagggttatggctttattgaatactacaaccaggcatgtgcagagtatgctaagcagaagatgtctaccccagaattcaaactagatacgaatgctcctactgtcagctgggcagatcctaagaatgccaatgaagctacatctactgcacaggttaaatctctatatgtcaaaaacctccccaagactgttactcaagagcagctgaaaaagctgtttgagcatgttggagaaattacaaaagttgttgttccacctgcaaaatctgggcatgaaaatcggtacggttttgttcattttaaggagcggtacatggctatgaaggctctgaagaacactgagagatatgaactcgatggtcagctgctggattgttcacttgcgaaacctcctgctgataagaaggatagtactgtatcaacacctactgcaaaaggaggcccgttactcccaagttatgccccacttggatatggactggtgggagcttataatccacgtggaaagggattggcagatgcttataataacccccttggaaatggactggcaggtgcttatggtgtgctttccgctcgtgctgcacagccaatggtgtatgctccaggtgctccctcccggctcaacaatgatcccaatggtcctaccagatggccgtcttgtatacgtaccacaggccgcggggcagcagtctgtgcatgcgacttcacctctgccacagcaaggtggtcgtcgattcggtggtagtggcagcggtggtggcggatccagctcttccggcggaaagcggcagaggggagatgaccgtggtagtaacagcaacaacagccgcaggggccggcaccgtccgtattgatgattgcaatgccgctgattagcagttagaagttagaaccgagcagttagcacattcgtcgcagtaccatgctaaacggtggtttgaattatttatttaccatgctggaaacggtagtttgaattgaataagacaaagtttttgg

SEQ ID NO: 35402 - protein, 469 aa, Zea mays subsp. mays
MPRRTGNAAPTKSAELVKQDQLEFDDPDEVDEEEEVEYEEIEEEVEYEEVEEEEEEEDEEDEEMEGVHEIDANDESKMVDADGKVENEKEKHAELLALPPHGAEVYVGGISSDVSSEDLKQLFESVGEVVEVRMRGKGDNRTYAFINFRTKAMALKAIQNLSNKDLKGKKIKVSPSQAKNRLFIGNVPHDWTHDDFKTAVEEVGPGVLKVELMKAPGLDRNKGYGFIEYYNQACAEYAKQKMSTPEFKLDTNAPTVSWADPKNANEATSTAQVKSLYVKNLPKTVTQEQLKKLFEHVGEITKVVVPPAKSGHENRYGFVHFKERYMAMKALKNTERYELDGQLLDCSLAKPPADKKDSTVSTPTAKGGPLLPSYAPLGYGLVGAYNPRGKGLADAYNNPLGNGLAGAYGVLSARAAQPMVYAPGAPSRLNNDPNGPTRWPSCIRTTGRGAAVCACDFTSATARWSSIRW

SEQ ID NO: 35403 - protein, 406 aa, Zea mays subsp. mays
MEGVHEIDANDESKMVDADGKVENEKEKHAELLALPPHGAEVYVGGISSDVSSEDLKQLFESVGEVVEVRMRGKGDNRTYAFINFRTKAMALKAIQNLSNKDLKGKKIKVSPSQAKNRLFIGNVPHDWTHDDFKTAVEEVGPGVLKVELMKAPGLDRNKGYGFIEYYNQACAEYAKQKMSTPEFKLDTNAPTVSWADPKNANEATSTAQVKSLYVKNLPKTVTQEQLKKLFEHVGEITKVVVPPAKSGHENRYGFVHFKERYMAMKALKNTERYELDGQLLDCSLAKPPADKKDSTVSTPTAKGGPLLPSYAPLGYGLVGAYNPRGKGLADAYNNPLGNGLAGAYGVLSARAAQPMVYAPGAPSRLNNDPNGPTRWPSCIRTTGRGAAVCACDFTSATARWSSIRW

SEQ ID NO: 35404 - protein, 392 aa, Zea mays subsp. mays
MVDADGKVENEKEKHAELLALPPHGAEVYVGGISSDVSSEDLKQLFESVGEVVEVRMRGKGDNRTYAFINFRTKAMALKAIQNLSNKDLKGKKIKVSPSQAKNRLFIGNVPHDWTHDDFKTAVEEVGPGVLKVELMKAPGLDRNKGYGFIEYYNQACAEYAKQKMSTPEFKLDTNAPTVSWADPKNANEATSTAQVKSLYVKNLPKTVTQEQLKKLFEHVGEITKVVVPPAKSGHENRYGFVHFKERYMAMKALKNTERYELDGQLLDCSLAKPPADKKDSTVSTPTAKGGPLLPSYAPLGYGLVGAYNPRGKGLADAYNNPLGNGLAGAYGVLSARAAQPMVYAPGAPSRLNNDPNGPTRWPSCIRTTGRGAAVCACDFTSATARWSSIRW

SEQ ID NO: 35405 - DNA, 777 bp, Zea mays subsp. mays
aatcgaaaaacatgtctctctccttggagcgaagcagcagcgtggtccgcgacgtcgccacgcccgcgcctccggcgaccagtggcgccagtgcgccgtatccacgcgcgggcgcgggcgcgtcgctctccctgcccggcgcagcggcggcgcacgggcacagccagtacctgcccctcaacgaggacgactccctggacatggtcctcttcgacgtgctccgcgaggcatccggctccgcctccacctccgccgcggcgcccgccacctaccagccgccctcgtcgctgcctacgctgaaggcgctcgcttccggagccgcgcgcaggggcagcaggaccgcgtacgcaccgaaggcggccacggcggggcgccactaccgcggggtgaggcggcggccgtggggcaagtacgccgcggagatccgtgacccggcgcggcacggggcgcggctctggctcggcaccttcgccacggccgaggaggcagccgccgcgtaggaccgcgccgcggtccgcatgcgcggagccaaggcgctgctcaacttcccgccggcggtcgcgggctgcgggagcgccgcaaccgccacggcgaagcaggctgggctgacggaagccaagtgaacagcgaatgcgatctcaaaggaaccagctgcgaaactgtgtgtaatgtaattgtgtggaatagtagtatataatgtaaatgtggatgaactagagagagatttccattcatcattgaacggaccacaccaaggattccaaggcgccggttccc

SEQ ID NO: 35406 - protein, 165 aa, Zea mays subsp. mays
SKNMSLSLERSSSVVRDVATPAPPATSGASAPYPRAGAGASLSLPGAAAAHGHSQYLPLNEDDSLDMVLFDVLREASGSASTSAAAPATYQPPSSLPTLKALASGAARRGSRTAYAPKAATAGRHYRGVRRRPWGKYAAEIRDPARHGARLWLGTFATAEEAAAA

SEQ ID NO: 35407 - protein, 162 aa, Zea mays subsp. mays
MSLSLERSSSVVRDVATPAPPATSGASAPYPRAGAGASLSLPGAAAAHGHSQYLPLNEDDSLDMVLFDVLREASGSASTSAAAPATYQPPSSLPTLKALASGAARRGSRTAYAPKAATAGRHYRGVRRRPWGKYAAEIRDPARHGARLWLGTFATAEEAAAA

SEQ ID NO: 35408 - protein, 142 aa, Zea mays subsp. mays
IEKHVSLLGAKQQRGPRRRHARASGDQWRQCAVSTRGRGRVALPARRSGGARAQPVPAPQRGRLPGHGPLRRAPRGIRLRLHLRRGARHLPAALVAAYAEGARFRSRAQGQQDRVRTEGGHGGAPLPRGEAAAVGQVRRGDP

SEQ ID NO: 35409 - DNA, 614 bp, Zea mays subsp. mays
  misc_feature (577)..(577): n is a, c, g, or t
aaattttgatttgaaatgcaaatatgcaacgaaatccttgatcgagagaaggcagagaagcgcaaggggggtggcggccctttttaaaaggcgagcgaggcgagggaccaaagccgggcagggcagctgctctgctctcccccacgccccactcacgccttcctcgcccacgccaccggacgaaccaccctcgcctgcgccatggccggcggcgacgcaaggaccacgccgccgaggccccgccgccgcgccccgtcgaccccttcctccgcttcctcatcccggcccccaagccgcgcccgaccgcgctcacgcgcactgagccgccgcaccgcctcatcgcgccgcgggccccggtcccggcgctgctgcgccacgacgagcgcctcttcatcgtcccgcccacgcgccccgactggctcccgcagaaacgaggctctagtgtttgttgatagctcagatgacagttctctggacagtgtgacgatattaataaaattccggagacagaagaaacgatatgggaattgctacgagaaagcaagagatcctgtgtgatgatggcataaagaaacgntaatattggaaaaaaaatgctacattttttgagacct

SEQ ID NO: 35410 - protein, 118 aa, Zea mays subsp. mays
MAGGDARTTPPRPRRRAPSTPSSASSSRPPSRARPRSRALSRRTASSRRGPRSRRCCATTSASSSSRPRAPTGSRRNEALVFVDSSDDSSLDSVTILIKFRRQKKRYGNCYEKARDPV

SEQ ID NO: 35411 - protein, 106 aa, Zea mays subsp. mays
NFDLKCKYATKSLIERRQRSARGVAALFKRRARRGTKAGQGSCSALPHAPLTPSSPTPPDEPPSPAPWPAATQGPRRRGPAAAPRRPLPPLPHPGPQAAPDRAHAH

SEQ ID NO: 35412 - DNA, 833 bp, Zea mays subsp. mays
gcacgagaccattacctagaacatcctaatcgaaaatagaggactccagtgataatggaagccttagtggaagcagtagttgtgtgagtaaccaagatgacatgggggaggacagcactggcctcaatgagtttgaatctagtgcaaatgtcaattattctttcagcaacttctcgttcaagaatctatcacaacttgcttccatcaactacgatctgctcaccaaaggattgaaggatgatccaccgccaagaacagaaatgtagcagttaatctaaatttggatggactcatttgagtactcagacagtctacaaggtgctcgtgggatgtaggtcttgtacatatcaaagtgtgaggcatggtctgttcctattgaggctgttcctacatctcgcggatccgagtacagttttggtgttgccttgttttcatgactattgccatgccatcatcagtgaaatcacccttgaccaaatttggcattcgacctaggagcgctgtctttttggttcgtctttccttttttttttagtcctattatgagccttgggtttacggagattggtcaaggttactgtattcagaatacagctcctgaagacgtaggcgggtttcagagaattgccattctggcatacagttgactctggttcgttaagctggtagcccgctggacttcctgcggccagaactgtccacaacattttgatggccgtggaatataacattttgcttaatgtgtccagtgtccaacagaatcagggacattttaagaagaatattaaccgattgacattataaggatatcaaatggaagcggcgttttatgc

SEQ ID NO: 35413 - protein, 54 aa, Zea mays subsp. mays
MGEDSTGLNEFESSANVNYSFSNFSFKNLSQLASINYDLLTKGLKDDPPPRTEM

SEQ ID NO: 35414 - protein, 45 aa, Zea mays subsp. mays
MTWGRTALASMSLNLVQMSIILSATSRSRIYHNLLPSTTICSPKD

SEQ ID NO: 35415 - protein, 35 aa, Zea mays subsp. mays
MSLNLVQMSIILSATSRSRIYHNLLPSTTICSPKD

SEQ ID NO: 35416 - DNA, 2137 bp, Zea mays subsp. mays
caagttgtcctcctccgcttccctccaaatccaccctggatccaaccccgattttccccagcagaagcaaacccgagcaaattgagcgcttgcagcttcacccggcgaagcagaatcgaatcggagccgctcgccactccgcgatggggatcctcctccggtccctcctcgtcgcctcgctcgtcctcagttcgctcgtcttgcacgtcgcagcggctaaaactatagatccttacaaggttctaggagttgacaagaatgctagccaacgggatattcagaaagcctttcacaaactttctctaaaataccaccctgacaagaataaagggaagggcgcacaggaaaaatttgaagaaataaacaatgcatatgagattctatctgatgaagagaagaggaaaaactatgacctctacggggatgagaagggtaaccctgaatttggtggtggaaattttggaaatcatgggggttctacatacttcactggtggtggccctaagtccagtcaattcacatctggtaatggatggcagacgatgggtggtcaaggaaatacaaaaacgttttcattttcatttggtggtaaacctggggccagtggtggaaacccgtttggtggtggttttgatcttggtgatgttttctcgaacctttttggtggtggaccaatgggtgatagccatattggtggatcaagtggctcagctagagccaacactggaacttctggtcagcattctggcactaccaagattgaggatatcaccacacaagttttcaataaagaagtagctgatcaaggaactacttggcttctgttattttatactccccaatctaaaagtcagtttgtgctagagagtgtcatgcaagacgtggtccattcactagatggtgttcttagggctggtaagatcaactgtgacaatgaaaaatctctttgcaaaaggtctggtgtttcaatagggaaatcggcccgtctcttcatctattcatatgctactgcagagaaagggtctttgcacgagtattctggggaacatgatgctaagagcttgaagacattttgtcaagaacacctgccaagattctccaaacgggtagatattagccaattcagcttccctttaaatgttctaccaaaccttcctcaagtgctcttactatcgagtaagaaggacacaccagcaatgtggcgtgctatcagtgggatgttccgcaatcggataatcttttatgatgctgaggttcacgatgtttctcatcctctgctgaaaagtcttggcgtgaagaatctcccagctgtaattggccgaaccgtgaatggtgaggagctccttctgaaggatggcatttcggtgaaagatctcagatctggtgtcaaggaattgaagacactgctagatagttttgagaagaagaataagaagttattatcgaatctagctaataagaaaccttccggtcaatgggaagaaatcaagaagattcctctcctcacagcttccaactttgaggaaacatgtggagagaagacttcagtatgcatcattggtgttttcgggtcaaacaaagccaaggggcagcttgaagcagtcctgtctgagatatctatgaagactttgataagggggcagaactataattccagaaatgctgtctcctatgctttgctggataaggacaaacaatctggattcctgtcatcgtttgacaagtctggatacaggtcatctgacaagctgctcatcgcctacaagccccgccgggggaagttcgcggtgtacgacggcgaggtgacactggaagaagctgaaaggttcgtgggatccgttttgaacggagacgttcaactgtcgccgacgaaacaaaaacctgtccttcggtagacgattattgcaagttgcaagggttttagatctaacacttattatcttaattaaggccttaattaaggcttgtacatagatggacgaagagagtaaaatcatagagcgtttgctggacagtttagtcgttcggtaaaccagagttgctacatctctccctcaaccgtgccaatgtaaattgtgcaaatgctgcagtcctgtcgagatattgaatatatacaggcatacagcggaccatttct

SEQ ID NO: 35417 - protein, 630 aa, Zea mays subsp. mays
SCPPPLPSKSTLDPTPIFPSRSKPEQIERLQLHPAKQNRIGAARHSAMGILLRSLLVASLVLSSLVLHVAAAKTIDPYKVLGVDKNASQRDIQKAFHKLSLKYHPDKNKGKGAQEKFEEINNAYEILSDEEKRKNYDLYGDEKGNPEFGGGNFGNHGGSTYFTGGGPKSSQFTSGNGWQTMGGQGNTKTFSFSFGGKPGASGGNPFGGGFDLGDVFSNLFGGGPMGDSHIGGSSGSARANTGTSGQHSGTTKIEDITTQVFNKEVADQGTTWLLLFYTPQSKSQFVLESVMQDVVHSLDGVLRAGKINCDNEKSLCKRSGVSIGKSARLFIYSYATAEKGSLHEYSGEHDAKSLKTFCQEHLPRFSKRVDISQFSFPLNVLPNLPQVLLLSSKKDTPAMWRAISGMFRNRIIFYDAEVHDVSHPLLKSLGVKNLPAVIGRTVNGEELLLKDGISVKDLRSGVKELKTLLDSFEKKNKKLLSNLANKKPSGQWEEIKKIPLLTASNFEETCGEKTSVCIIGVFGSNKAKGQLEAVLSEISMKTLIRGQNYNSRNAVSYALLDKDKQSGFLSSFDKSGYRSSDKLLIAYKPRRGKFAVYDGEVTLEEAERFVGSVLNGDVQLSPTKQKPVLR

SEQ ID NO: 35418 - protein, 583 aa, Zea mays subsp. mays
MGILLRSLLVASLVLSSLVLHVAAAKTIDPYKVLGVDKNASQRDIQKAFHKLSLKYHPDKNKGKGAQEKFEEINNAYEILSDEEKRKNYDLYGDEKGNPEFGGGNFGNHGGSTYFTGGGPKSSQFTSGNGWQTMGGQGNTKTFSFSFGGKPGASGGNPFGGGFDLGDVFSNLFGGGPMGDSHIGGSSGSARANTGTSGQHSGTTKIEDITTQVFNKEVADQGTTWLLLFYTPQSKSQFVLESVMQDVVHSLDGVLRAGKINCDNEKSLCKRSGVSIGKSARLFIYSYATAEKGSLHEYSGEHDAKSLKTFCQEHLPRFSKRVDISQFSFPLNVLPNLPQVLLLSSKKDTPAMWRAISGMFRNRIIFYDAEVHDVSHPLLKSLGVKNLPAVIGRTVNGEELLLKDGISVKDLRSGVKELKTLLDSFEKKNKKLLSNLANKKPSGQWEEIKKIPLLTASNFEETCGEKTSVCIIGVFGSNKAKGQLEAVLSEISMKTLIRGQNYNSRNAVSYALLDKDKQSGFLSSFDKSGYRSSDKLLIAYKPRRGKFAVYDGEVTLEEAERFVGSVLNGDVQLSPTKQKPVLR

SEQ ID NO: 35419 - protein, 450 aa, Zea mays subsp. mays
MGGQGNTKTFSFSFGGKPGASGGNPFGGGFDLGDVFSNLFGGGPMGDSHIGGSSGSARANTGTSGQHSGTTKIEDITTQVFNKEVADQGTTWLLLFYTPQSKSQFVLESVMQDVVHSLDGVLRAGKINCDNEKSLCKRSGVSIGKSARLFIYSYATAEKGSLHEYSGEHDAKSLKTFCQEHLPRFSKRVDISQFSFPLNVLPNLPQVLLLSSKKDTPAMWRAISGMFRNRIIFYDAEVHDVSHPLLKSLGVKNLPAVIGRTVNGEELLLKDGISVKDLRSGVKELKTLLDSFEKKNKKLLSNLANKKPSGQWEEIKKIPLLTASNFEETCGEKTSVCIIGVFGSNKAKGQLEAVLSEISMKTLIRGQNYNSRNAVSYALLDKDKQSGFLSSFDKSGYRSSDKLLIAYKPRRGKFAVYDGEVTLEEAERFVGSVLNGDVQLSPTKQKPVLR

SEQ ID NO: 35420 - DNA, 890 bp, Zea mays subsp. mays
tagaacatcctaatcaaaagaccaaccagccaaaacacgcccgcgcgcctgtttgttcggccggaggacgccatggccatggaggagggatcaggagcggtggagaaagggccggccgtgggcacggtggctgacgcctccgccagcgtcatcggcgaaggcgccgtgaaggaggaggccgggggcagacggcagccgtcggccggctacgcggccgtcgtgattggcggcaccttcgaccgcctacaccagggccaccatctcttcctgaaggcggcagcggagctggcgagggagaggatcgtggtcggcgtctgcgacggcccgatgctcgccaagaaacagtacgccgacctgatacaaccgatcgagaagcggatgcagaacgccaaggattatattaagtccataaagcccgaccttgatgttcatgtggagcccatcgtcgaccctttcggcccatccatcgttgacccaggccttgaggccatcattgtcagcaaggagacgttgccgggagggcacgctgtcaacaggaagagagcagagagagggctcactcagctgcagatcgaggtgatagagctggtgccagaggagtcgacgggggacaagataagttccacggcattcagaaagatggaagccgagagggcgctgcagcaacagaataaacaagaagatacagcagtaggcactccggttggggtgcaaaacatagcggttcagtcacatggagcatagtacatgaaccgaagttctgttgcctgtacctttttttaaaaaagtacatgaaactttgaggtctctacttccatcacatacaaagggacaatgcttctttgcccaaacatggactgatcatcaatacagaaaagttccagtttctt

SEQ ID NO: 35421 - protein, 223 aa, Zea mays subsp. mays
MAMEEGSGAVEKGPAVGTVADASASVIGEGAVKEEAGGRRQPSAGYAAVVIGGTFDRLHQGHHLFLKAAAELARERIVVGVCDGPMLAKKQYADLIQPIEKRMQNAKDYIKSIKPDLDVHVEPIVDPFGPSIVDPGLEAIIVSKETLPGGHAVNRKRAERGLTQLQIEVIELVPEESTGDKISSTAFRKMEAERALQQQNKQEDTAVGTPVGVQNIAVQSHGA

SEQ ID NO: 35422 - protein, 221 aa, Zea mays subsp. mays
MEEGSGAVEKGPAVGTVADASASVIGEGAVKEEAGGRRQPSAGYAAVVIGGTFDRLHQGHHLFLKAAAELARERIVVGVCDGPMLAKKQYADLIQPIEKRMQNAKDYIKSIKPDLDVHVEPIVDPFGPSIVDPGLEAIIVSKETLPGGHAVNRKRAERGLTQLQIEVIELVPEESTGDKISSTAFRKMEAERALQQQNKQEDTAVGTPVGVQNIAVQSHGA

SEQ ID NO: 35423 - protein, 138 aa, Zea mays subsp. mays
MLAKKQYADLIQPIEKRMQNAKDYIKSIKPDLDVHVEPIVDPFGPSIVDPGLEAIIVSKETLPGGHAVNRKRAERGLTQLQIEVIELVPEESTGDKISSTAFRKMEAERALQQQNKQEDTAVGTPVGVQNIAVQSHGA

SEQ ID NO: 35424 - DNA, 1619 bp, Zea mays subsp. mays
gcacgagaccattacctagaacatcctaatcgaaaaagtcctcacccattcattcgtccatcccacctaccatggccaccgcctccggcactgacgccggtgcccagccgcgcgacgaccccagcctcctccccttcgcgtccttctcgctcggcctctccatccgcgcgccggccacccccacactcgcctccgtcccctccaccctccacctccccactcaaatctctacactcgccgtctgcctccacccctccgccgcgcagccctcctcccgccgcaccacccgcctcaattccgccacctcctccgtcatcgccccgctgccctcctcaacgcccggcctctcccgctccttcccttcgggcgcgcccgccgcagcagggcgccgccgcacgctcgtctggttccgcgccgacctccgcctccacgaccatgagccgtttcacgccgcagcgggggcgtcgtcctccctcctccccgttttcgtcttcgatccgcgggacttcggcaagtccccctcggggttcgaccggacgggcccgtaccgcgccaacttcctgctcgattcggtcgccgacctgcgccggagcctccgcgcccgcggtggggacctggtggtgcgcgtgggtatgcccgaagtggtcattcccgagctcgcgcgggcggcgggcgcggaggccgtgtacgctcacggggaggtatcgcgggacgaggtccgcgccgaggagagggtgcaaaaggctgtggagaaggagggtatcaacgtgaagtacttctggggtagcacgctataccacgtggaagaccttcccttccgcctcgaggacatgccgtccaactatggcggcttcagggaggccgtgaaggggttggaggtcagaaaggtgctggaggctcccgaggaggtcaagtgcgtgcccatgaagaatgtgctcgagcccggtgacatccccacgcttgctgagctcgggctcactgcgccaccagccatgtcacaggactcaaaacctgctgttggctctactctcattggtggtgagacagaagctctggagaggttgaagaagtttgctgcagaatgctctatgcagccaaacaaagtagacaaaagcaatacccaagatagcatatatggtgctaatttctcttgcaaaatttctccatggcttgctacaggttgcctctctccacggttcatgtatgaggagttgaagaagcatgctactaaagcaattccttttgggtcaacacccaagaataatgatggcacatctgatgctggaacaaattggttaatgtttgagttgctgtggagagatttcttcaggttcatcacaaagaagtacagctctgtacagaagacatctgaagttgccactggctgcactcccgccccagcgcttgcatgaacttacttagacaagctgattgccagctgcttttttggggtgataaacttatgtgcattttcaatggagtcttttttgccgccaataatgttggtagtcaaagtgaacgccgaatgcgcattcctgcgttttggtttggtcgatgtatttaatgctgtcgacatccctccaaatgactgttgaatgcaaatgatactgtgagcaacc

SEQ ID NO: 35425 - protein, 446 aa, Zea mays subsp. mays
MATASGTDAGAQPRDDPSLLPFASFSLGLSIRAPATPTLASVPSTLHLPTQISTLAVCLHPSAAQPSSRRTTRLNSATSSVIAPLPSSTPGLSRSFPSGAPAAAGRRRTLVWFRADLRLHDHEPFHAAAGASSSLLPVFVFDPRDFGKSPSGFDRTGPYRANFLLDSVADLRRSLRARGGDLVVRVGMPEVVIPELARAAGAEAVYAHGEVSRDEVRAEERVQKAVEKEGINVKYFWGSTLYHVEDLPFRLEDMPSNYGGFREAVKGLEVRKVLEAPEEVKCVPMKNVLEPGDIPTLAELGLTAPPAMSQDSKPAVGSTLIGGETEALERLKKFAAECSMQPNKVDKSNTQDSIYGANFSCKISPWLATGCLSPRFMYEELKKHATKAIPFGSTPKNNDGTSDAGTNWLMFELLWRDFFRFITKKYSSVQKTSEVATGCTPAPALA

SEQ ID NO: 35426 - protein, 259 aa, Zea mays subsp. mays
MPEVVIPELARAAGAEAVYAHGEVSRDEVRAEERVQKAVEKEGINVKYFWGSTLYHVEDLPFRLEDMPSNYGGFREAVKGLEVRKVLEAPEEVKCVPMKNVLEPGDIPTLAELGLTAPPAMSQDSKPAVGSTLIGGETEALERLKKFAAECSMQPNKVDKSNTQDSIYGANFSCKISPWLATGCLSPRFMYEELKKHATKAIPFGSTPKNNDGTSDAGTNWLMFELLWRDFFRFITKKYSSVQKTSEVATGCTPAPALA

SEQ ID NO: 35427 - protein, 256 aa, Zea mays subsp. mays
ARDHYLEHPNRKSPHPFIRPSHLPWPPPPALTPVPSRATTPASSPSRPSRSASPSARRPPPHSPPSPPPSTSPLKSLHSPSASTPPPRSPPPAAPPASIPPPPPSSPRCPPQRPASPAPSLRARPPQQGAAARSSGSAPTSASTTMSRFTPQRGRRPPSSPFSSSIRGTSASPPRGSTGRARTAPTSCSIRSPTCAGASAPAVGTWWCAWVCPKWSFPSSRGRRARRPCTLTGRYRGTRSAPRRGCKRLWRRRVST

SEQ ID NO: 35428 - DNA, 657 bp, Zea mays subsp. mays
cattttccccatcaaaggatcagaaagaaggggtcttgtaagtgttgagttcaagaagaaaaagggacagtatgacatgaaactactagctgttgacataccaatggcatcaggtcctgaccagcggctgttcgtcgtcggtgatgaacaagagtacaaggtgggcgggggcttgatatctgagctgcgagacccgatcgtaaaagctatggctgcagagaaggagtttgattatcttgatgaaagagaggacgaggaggacgagcggagggagcgtgaggaggcggagcaagaggaagcggaagcgttgaggcgcgaggaggaaagattgcgtcagcaggctgaagaacggaggcggcgggaggaggctgagagcctggagaaagcttcgtgacatgatttaactgcatcggttttccaccttgtgcattgttttatacttctctccccctcccgacccggagtgtagcagtcagcgtttccacagcaagagaagattgcttctgagttcggttgagttccaggtggtcgattcggcgtcaccagtctcaagatgttgaggagaaaggaataattttgcatgttccgcaacagaacacttcgcccaagcaatgtaacttagtggttgatcaattgttagaccttttttttttgccg

SEQ ID NO: 35429 - protein, 130 aa, Zea mays subsp. mays
IFPIKGSERRGLVSVEFKKKKGQYDMKLLAVDIPMASGPDQRLFVVGDEQEYKVGGGLISELRDPIVKAMAAEKEFDYLDEREDEEDERREREEAEQEEAEALRREEERLRQQAEERRRREEAESLEKAS

SEQ ID NO: 35430 - protein, 105 aa, Zea mays subsp. mays
MKLLAVDIPMASGPDQRLFVVGDEQEYKVGGGLISELRDPIVKAMAAEKEFDYLDEREDEEDERREREEAEQEEAEALRREEERLRQQAEERRRREEAESLEKAS

SEQ ID NO: 35431 - protein, 96 aa, Zea mays subsp. mays
MASGPDQRLFVVGDEQEYKVGGGLISELRDPIVKAMAAEKEFDYLDEREDEEDERREREEAEQEEAEALRREEERLRQQAEERRRREEAESLEKAS

SEQ ID NO: 35432 - DNA, 1957 bp, Zea mays subsp. mays
  misc_feature (666)..(667): n is a, c, g, or t
  misc_feature (715)..(716): n is a, c, g, or t
atcaaaaaaaggcgggcgagcagagccacgccaaagcgcggggaagcctccaagccgcgggcgatcccgccgaggcgtcgtcgtccaccgcatcctccttgtactcttcgtccctgccgtcagggccgccgcgcgctttatatacagccgacccgcgtgcctgggctcgctgcctgccagcagcaagcaagcgccgaggcggagctcgcgaggcagaggctgacggcgccgatggagtggctggacgagtacgagaagctggtgatccggatgaacacgccccgcgtggtcatcgacaatgccgtctgcccccacggccacgctagtgcaggtggacagcgccaggaagagagggctgctgctggaggccgtgcaggtgctcgccgacctcgacctgtccatcaacaaggcctacatctcctccgacggccgctggttcatggacgtcttccacgtcacagaccgcctcggccgcaagctcaccgacgacagcgtcatcacctacatccagcagtctctcgggacctggaacgagccggcccggccggcggcgctcgagggtctgacggcgctcgagctcacggggcccgaccgcacggggctcctgtccgaggtgttcgccgtgctggccgacctgcagtgcggcgtggtggacgcccgcgcgtnnacgcaccgcggccgcctggcgtgcgtcgccttcctccgcggggagggnnacgccgaccgggtggcgcgcatcctcgcgcgcctcggccacctcgtccgcggtgacggcgaggcaccgggcgccgtggcagccgtgcccgccgccgcggtcgcgcacgtcgaccgccgcctccacgagctcatggccgcggaccacaacaacagcgcgacgccgtacccggccgcggccgcggccgtgtccgtgcagagctgggccgagcgcggctactccgtggtgaccgtgcagtgccgcgaccgccccaagctgctgttcgacgtggtgtgcgcgctccactgcctggactacgtcgtcttccacggcaccgtcgacaccgccgccggcgaccgcgcgcggcaggagttctacatccgcagcgccgacggaagccccatccggtccgaggccgagagggagaggctcgcccagtgcctccaagccgccatagaccggaggtcgctagagggcgtgaggctggagctgtgcacgccggaccggccggggctgctgtccgaggtgacgcggacgttccgcgagaacgggctgctcgtcgcccacgcggaggtgtcgacgaaggggggcctggcctccaacgttttctacgtgaccgacgcggatggcaaggcggcgggccagagcgccatcgacgctgtcagggcgagggtcggcgcggactgcctcgtcgtgggcgaggagccccggccgccgcgcgtgttcccggaggccgggcctggcgaccgtgaccacggcggcggccttgggctggtctacctcggcaacctcgtgaagcggaacctgtacaacctcggcctcatcaagtcgtgctcgtgaagcgtgatgctcggctcggccccaagaaagacacgggcggtttctcaaggagacccacccgccattgacgtactgtgtacgtacaagatcgaggaaccggcgccgacggcatcaactaaacaccgcgacatggagcgccgctcaagcagggtgaaattcgggttgggcatggtgttgtagtcgagaggaaatgtcgtcgtccgtcatcaacaggcaccgacaccatggatggacggacggtcggacactgacgacggctgaggaggggtgattagcaataggaatttgtgtagccatctgccatgtacatagacaaattcgttgttgtcggtaccagtagaagtagcgcgtagccgtgtagtgggtgcattcatcgtatttaacttctgtcatatttacggaacaggcacatcattttttttt

SEQ ID NO: 35433 - protein, 411 aa, Zea mays subsp. mays
  misc_feature (123)..(123): Xaa can be any naturally occurring amino acid
  misc_feature (139)..(140): Xaa can be any naturally occurring amino acid
MPSAPTATLVQVDSARKRGLLLEAVQVLADLDLSINKAYISSDGRWFMDVFHVTDRLGRKLTDDSVITYIQQSLGTWNEPARPAALEGLTALELTGPDRTGLLSEVFAVLADLQCGVVDARAXTHRGRLACVAFLRGEXXADRVARILARLGHLVRGDGEAPGAVAAVPAAAVAHVDRRLHELMAADHNNSATPYPAAAAAVSVQSWAERGYSVVTVQCRDRPKLLFDVVCALHCLDYVVFHGTVDTAAGDRARQEFYIRSADGSPIRSEAERERLAQCLQAAIDRRSLEGVRLELCTPDRPGLLSEVTRTFRENGLLVAHAEVSTKGGLASNVFYVTDADGKAAGQSAIDAVRARVGADCLVVGEEPRPPRVFPEAGPGDRDHGGGLGLVYLGNLVKRNLYNLGLIKSCS

SEQ ID NO: 35434 - protein, 364 aa, Zea mays subsp. mays
  misc_feature (76)..(76): Xaa can be any naturally occurring amino acid
  misc_feature (92)..(93): Xaa can be any naturally occurring amino acid
MDVFHVTDRLGRKLTDDSVITYIQQSLGTWNEPARPAALEGLTALELTGPDRTGLLSEVFAVLADLQCGVVDARAXTHRGRLACVAFLRGEXXADRVARILARLGHLVRGDGEAPGAVAAVPAAAVAHVDRRLHELMAADHNNSATPYPAAAAAVSVQSWAERGYSVVTVQCRDRPKLLFDVVCALHCLDYVVFHGTVDTAAGDRARQEFYIRSADGSPIRSEAERERLAQCLQAAIDRRSLEGVRLELCTPDRPGLLSEVTRTFRENGLLVAHAEVSTKGGLASNVFYVTDADGKAAGQSAIDAVRARVGADCLVVGEEPRPPRVFPEAGPGDRDHGGGLGLVYLGNLVKRNLYNLGLIKSCS

SEQ ID NO: 35435 - protein, 256 aa, Zea mays subsp. mays
  misc_feature (222)..(223): Xaa can be any naturally occurring amino acid
  misc_feature (239)..(239): Xaa can be any naturally occurring amino acid
IKKRRASRATPKRGEASKPRAIPPRRRRPPHPPCTLRPCRQGRRALYIQPTRVPGLAACQQQASAEAELARQRLTAPMEWLDEYEKLVIRMNTPRVVIDNAVCPHGHASAGGQRQEERAAAGGRAGARRPRPVHQQGLHLLRRPLVHGRLPRHRPPRPQAHRRQRHHLHPAVSRDLERAGPAGGARGSDGARAHGARPHGAPVRGVRRAGRPAVRRGGRPRXXAPRPPGVRRLPPRGGXRRPGGAHPRAPRPPRPR

SEQ ID NO: 35436 - DNA, 2306 bp, Zea mays subsp. mays
ctccaaatgcggaggtctcgactcttctctcttcctccatctttatcatcgccccacgtacacacccaattcctcgcaactgggctcccccgcctccacgacactgccccccgtctcaagtccgccgcctccattcttcagctctcctatcctccgcctagaatatcttcatcggtattttaccaacctggatcaatttactcacgatactctgaagcgtatacatatgccatatgggaaatgacttcatagctgtgggttgtcttatggctccttgaatttgcagtagtctgcctgtacctattggctgaagcagagctgacccccactttatcaagagttgctcaacgatggacactggctgcctgtcatctatgaatattactggagctagccagacaagatcttttgcggggcaacttcctcctcagagatgttttgcgagtagtcactatacaagctttgccgtgaaaaaacttgtctcaaggaataaaggaaggagatcacaccgtagacatcctgccttgcaggttgtctgcaaaggattttccaagtcctccactagaaagcacaataaactatttggaagctggacagctctcttcattttttagaaacagcgaacgccccagtaagccgttgcaggtcgtggttgctggtgcaggattggctggtctatcaacagcgaagtatctggcagatgctggacataaacccatattgcttgaggcaagagatgttttgggtggaaaggtagctgcttggaaggatgaagatggagattggtacgagactgggcttcatatcttttttggagcttatcccaacatacagaatctgtttggcgagcttaggattgaggatcgtttacagtggaaagaacactctatgatattcgccatgccaaacaagccaggagaattcagccggtttgatttcccagaaactttgccagcacctataaatgggatatgggccatattgagaaacaatgaaatgcttacctggcccgagaaggtgaagtttgcaatcggacttctgccagcaatggttggtggtcaaccttatgttgaagctcaagatggcttaaccgtttcagaatggatgaaaaagcagggtgttcctgatcgggtgaacgatgaggtttttattgcaatgtccaaggcactcaatttcataaatcctgatgagctatctatgcagtgcattttgattgctttgaaccgatttcttcaggagaagcatggttctaaaatggcattcttggatggtaatccgcctgaaaggctatgcatgcctattgttgatcacattcggtctaggggtggagaggtccgcctgaattctcgtattaaaaagatagagctgaatcctgatggaactgtaaaacacttcgcacttagtgatggaactcagataactggagatgcttatgtttgtgcaacaccagtcgatatcttcaagcttcttgtacctcaagagtggagtgaaattacttatttcaagaaactggagaagttggtgggagttcctgttatcaatgttcatatatggtttgacagaaaactgaacaacacatatgaccaccttcttttcagcaggagttcacttttaagtgtctatgcagacatgtcagtaacctgcaaggaatactatgacccaaaccgttcaatgctggagttggtctttgctcctgcagacgaatggattggtcgaagtgacactgaaatcatcgatgcaactatggaagagctagccaagttatttcctgatgaaattgctgctgatcagagtaaagcaaagattcttaagtatcatattgtgaagacaccgagatcggtttacaaaactgtcccaaactgtgagccttgccggcctctccaaaggtcacctatcgaaggtttctatctagctggtgattacacaaagcagaaatacctggcttccatggaaggtgcagtcctatccgggaagctttgcgcccagtccattgtgcaggattatagcaggctcacactcaggagccagaaaagcctacaatcaggagaagttcccgtcccatcttagttgtagttggctttagctatcgtcatccccactgggtgctatcttatctcctatttcaatgggaacccacccaatggtcatgttggagacaacacctgttatggtcctttgaccatctcgtggtgactgtagttgatgtcatattcggatatatatgtaaaaggatctgcatagcaattgttagacctttgggaaagcaaaagcgataaagagatctcagatagatattgtgttctttc

SEQ ID NO: 35437 - protein, 392 aa, Zea mays subsp. mays
MIFAMPNKPGEFSRFDFPETLPAPINGIWAILRNNEMLTWPEKVKFAIGLLPAMVGGQPYVEAQDGLTVSEWMKKQGVPDRVNDEVFIAMSKALNFINPDELSMQCILIALNRFLQEKHGSKMAFLDGNPPERLCMPIVDHIRSRGGEVRLNSRIKKIELNPDGTVKHFALSDGTQITGDAYVCATPVDIFKLLVPQEWSEITYFKKLEKLVGVPVINVHIWFDRKLNNTYDHLLFSRSSLLSVYADMSVTCKEYYDPNRSMLELVFAPADEWIGRSDTEIIDATMEELAKLFPDEIAADQSKAKILKYHIVKTPRSVYKTVPNCEPCRPLQRSPIEGFYLAGDYTKQKYLASMEGAVLSGKLCAQSIVQDYSRLTLRSQKSLQSGEVPVPS

SEQ ID NO: 35438 - protein, 388 aa, Zea mays subsp. mays
MPNKPGEFSRFDFPETLPAPINGIWAILRNNEMLTWPEKVKFAIGLLPAMVGGQPYVEAQDGLTVSEWMKKQGVPDRVNDEVFIAMSKALNFINPDELSMQCILIALNRFLQEKHGSKMAFLDGNPPERLCMPIVDHIRSRGGEVRLNSRIKKIELNPDGTVKHFALSDGTQITGDAYVCATPVDIFKLLVPQEWSEITYFKKLEKLVGVPVINVHIWFDRKLNNTYDHLLFSRSSLLSVYADMSVTCKEYYDPNRSMLELVFAPADEWIGRSDTEIIDATMEELAKLFPDEIAADQSKAKILKYHIVKTPRSVYKTVPNCEPCRPLQRSPIEGFYLAGDYTKQKYLASMEGAVLSGKLCAQSIVQDYSRLTLRSQKSLQSGEVPVPS

SEQ ID NO: 35439 - protein, 356 aa, Zea mays subsp. mays
MLTWPEKVKFAIGLLPAMVGGQPYVEAQDGLTVSEWMKKQGVPDRVNDEVFIAMSKALNFINPDELSMQCILIALNRFLQEKHGSKMAFLDGNPPERLCMPIVDHIRSRGGEVRLNSRIKKIELNPDGTVKHFALSDGTQITGDAYVCATPVDIFKLLVPQEWSEITYFKKLEKLVGVPVINVHIWFDRKLNNTYDHLLFSRSSLLSVYADMSVTCKEYYDPNRSMLELVFAPADEWIGRSDTEIIDATMEELAKLFPDEIAADQSKAKILKYHIVKTPRSVYKTVPNCEPCRPLQRSPIEGFYLAGDYTKQKYLASMEGAVLSGKLCAQSIVQDYSRLTLRSQKSLQSGEVPVPS

SEQ ID NO: 35440 - DNA, 944 bp, Zea mays subsp. mays
accattacttagaacatcctaatcgaaaaacctctccttctctctccctcccctcactcgcttcctatccagagcagcccctgccagtggccgacccggccatcccgtgtcggccgagatgcgcgtagctccccacgcccgaagcagccaggccccgatgctcaagccggccgccctacaccgtgccatgcgcgcccgaccctgcgcacgccgcgccgcaacccgacgcgccaggccgaccgctgccaggcaaccgcgccgcgcagagccgccattccacgcccaggtgcccgacgcacagcacccgaagccgcctcgacctgagccacgcccaggcgcgccctgagcccgaccgaaggccgacgtcgcgcacaagcaaggaccgacccgcgcagagccgccccgaagcccgcgtccgttcgtcttcgtgttattggagctttactatgaccgtttctccttccccattactccctccctccatcaatggtgtctttaagccatggccaccgtttctcttctctccccagcgccctctccctataaaatccgccgagctcctctcttcttctccctccccgagctccctctctctcacgcgcttctcactctcttgcttaccacgtcgtcgtcggagtccgtgaagcctcgccagagttcgtgctcaccatccgtgttccccgctggagtttgtacctcgctgtccaacgacgaccgcgctcgttcccctgctcgccgaagacgtccccgaaccccgtccaaacctcgtcgttacctgcctgtcgaaccactccctctcgtcgatgttcatcactccctgcgcaagagcgagaactcaaggttgaagacaacctcaacccgttaatgtattttctaaatcatgtttgaattactttattgatcttatgaattattgttgtaatgttgatgagatttggtgatcc

SEQ ID NO: 35441 - protein, 120 aa, Zea mays subsp. mays
MATVSLLSPAPSPYKIRRAPLFFSLPELPLSHALLTLLLTTSSSESVKPRQSSCSPSVFPAGVCTSLSNDDRARSPARRRRPRTPSKPRRYLPVEPLPLVDVHHSLRKSENSRLKTTSTR

SEQ ID NO: 35442 - protein, 75 aa, Zea mays subsp. mays
MRVAPHARSSQAPMLKPAALHRAMRARPCARRAATRRARPTAARQPRRAEPPFHAQVPDAQHPKPPRPEPRPGAP

SEQ ID NO: 35443 - protein, 65 aa, Zea mays subsp. mays
MTVSPSPLLPPSINGVFKPWPPFLFSPQRPLPIKSAELLSSSPSPSSLSLTRFSLSCLPRRRRSP

SEQ ID NO: 35444 - DNA, 693 bp, Zea mays subsp. mays
atcagggtggctagatactccagctctcaagggcaaggagccggagatggtaatggtagcgggtatctgaacggtggtggctctggatccggagttggatctggatccggtgagagtgatggggctggagtccatgcaagcggtgggggcggaggcggggccagttcttggtcgcagccggcgggttctggggctgcggctgggtttggcacagggtacgggtctagttatagctcgcagtcacgttacggctatggcgggtcgactagtgctgggggcagtggtcgcggccgtggtgctggacaaggctcagcagacggtggcggcgggtatggtgccggtggtggcgatggatacggttccagcgtagcgaattccggcaacgtggtctcggccacaccagcgcgtgcagaagctagtgctgacggcaatggcagtggcaggggaggtggctacaatggtgggagtggcggcggcgatggcagcggatctggatttggtgctggacagccttaggctttacacaatacaattctcaagatggaggccagaacacgttgtttagggttcgatttgatgtgatttgtgttacttttcttttatgtacttgtatacccatgactaataaagggctccagcatccgttgttaagacctgagaagattgggtgatcagttgtgtgttttctgttct

SEQ ID NO: 35445 - protein, 171 aa, Zea mays subsp. mays
IRVARYSSSQGQGAGDGNGSGYLNGGGSGSGVGSGSGESDGAGVHASGGGGGGASSWSQPAGSGAAAGFGTGYGSSYSSQSRYGYGGSTSAGGSGRGRGAGQGSADGGGGYGAGGGDGYGSSVANSGNVVSATPARAEASADGNGSGRGGGYNGGSGGGDGSGSGFGAGQP

SEQ ID NO: 35446 - DNA, 590 bp, Zea mays subsp. mays
  misc_feature (106)..(106): n is a, c, g, or t
agaaattccaaggtggaggtggagcatcttcaaacaagaacgacctggcaaaggctccgagcaagctgtcatctgcattctctggaactcaagacaaatgcgcagnctgccagaagaccgtgtatccattggagaagatgacgctggaaggcgagtcgtaccacaagggctgcttcaagtgctcgcacggcggctgcatcctgaccacctcctcctacgccgcgctcaacgggatcctctactgcaagatccatttctcgcagctgttcaaggagaagggcagctacaaccacctcatcgagacggcgcagaccaagaagaacgaggccgcggaggccgcagaggagccatcggtggacgcaggcgccgcggctgaggcggaagcgcccgcggaatcggcgtagaacgaagagtagccgtgtgtgtatctcctaattatacgaactctgcattcagtaagtagttttcacaaatctatatatgttgttgttatgctgcagcttggttttggtcagtctgggattgtatttgtaacacgtgcatgttgaattgcttattttgtattacgaggctctggattcatgaagttt

SEQ ID NO: 35447 - protein, 133 aa, Zea mays subsp. mays
  misc_feature (35)..(35): Xaa can be any naturally occurring amino acid
KFQGGGGASSNKNDLAKAPSKLSSAFSGTQDKCAXCQKTVYPLEKMTLEGESYHKGCFKCSHGGCILTTSSYAALNGILYCKIHFSQLFKEKGSYNHLIETAQTKKNEAAEAAEEPSVDAGAAAEAEAPAESA

SEQ ID NO: 35448 - protein, 124 aa, Zea mays subsp. mays
  misc_feature (35)..(35): Xaa can be any naturally occurring amino acid
EIPRWRWSIFKQERPGKGSEQAVICILWNSRQMRXLPEDRVSIGEDDAGRRVVPQGLLQVLARRLHPDHLLLRRAQRDPLLQDPFLAAVQGEGQLQPPHRDGADQEERGRGGRRGAIGGRRRRG

SEQ ID NO: 35449 - protein, 92 aa, Zea mays subsp. mays
  misc_feature (3)..(3): Xaa can be any naturally occurring amino acid
MRXLPEDRVSIGEDDAGRRVVPQGLLQVLARRLHPDHLLLRRAQRDPLLQDPFLAAVQGEGQLQPPHRDGADQEERGRGGRRGAIGGRRRRG

SEQ ID NO: 35450 - protein, 88 aa, Zea mays subsp. mays
MTLEGESYHKGCFKCSHGGCILTTSSYAALNGILYCKIHFSQLFKEKGSYNHLIETAQTKKNEAAEAAEEPSVDAGAAAEAEAPAESA

SEQ ID NO: 35451 - DNA, 598 bp, Zea mays subsp. mays
actgattcacaacacataaatatcaacacaagacatgattttcgcccgtcctcgacttcctccagcgttgcgcatttacctagagatcttatcatctttgttaaaatatccacaaacgcaacatgcctatcatcacggattacaagctccccaattcggcggacgccttggacctgcccgccgactcaaactcgccatttttcatcgccttcctcgcctctcgcgaccccagtacagggaggccttggtgcccagatgttatagcggcattgccgtacctcgaagctactttctctgctgagggcagtcctcgtgccgctttcattgaagtcggacaacgacctgaatggagagatccccgtaatgtttaccgggctaagtggaatgtaaacaatactcctactttggctcgctacgaacgagttgacggcaaggtgaaggaggttggtcgtttagtggaagccgagattcttgattcaaaacgactcaaaaattttattactagctcatctgcctcattatgagaagtggaacattgattgagtactgtccggctgtcttggggctatgtttgagacgtcaatatatcaagtcagtt

SEQ ID NO: 35452 - protein, 133 aa, Zea mays subsp. mays
MPIITDYKLPNSADALDLPADSNSPFFIAFLASRDPSTGRPWCPDVIAALPYLEATFSAEGSPRAAFIEVGQRPEWRDPRNVYRAKWNVNNTPTLARYERVDGKVKEVGRLVEAEILDSKRLKNFITSSSASL

SEQ ID NO: 35453 - protein, 88 aa, Zea mays subsp. mays
MIFARPRLPPALRIYLEILSSLLKYPQTQHAYHHGLQAPQFGGRLGPARRLKLAIFHRLPRLSRPQYREALVPRCYSGIAVPRSYFLC

SEQ ID NO: 35454 - protein, 87 aa, Zea mays subsp. mays
TDSQHININTRHDFRPSSTSSSVAHLPRDLIIFVKISTNATCLSSRITSSPIRRTPWTCPPTQTRHFSSPSSPLATPVQGGLGAQML

SEQ ID NO: 35455 - DNA, 808 bp, Zea mays subsp. mays
  misc_feature (86)..(86): n is a, c, g, or t
  misc_feature (170)..(170): n is a, c, g, or t
gtggattttgtgatggagatcatgtcacgccttgtgagcaagcaggtccttgattctttttgccttttaattgaagatattagccncggttcttttttacatatttctgaaactggaccctcacttgccatggtagatttggaaatatcccaagttatgggtaggatttntgaagtgtgctatcttgacaaaacctcagtcatatggtgtgttgctgcagattaccagctcctcaacttgagaatgccttgagtaagaacccgacactgaagacgcccttggctgagcatgccgagcagccaaatattcggtcgacacttccaaggtctactttggtggttctgggtcttgctgaagatcaaccacagcaaccagcagtaacacaggtgcagagcagccaaaaccaggctgcggaaaccagtagctctgctgctgatacggctacagaagtaactcaggaatcttctggtgctagctaacatcttttatgccgaaatgggctaatgcttgcaggttgtaagccatctatcattttcatctctggagtgatgttggtgattgatgaaatgggctaacgcttgcaggttgtgtaccatatgtctcttgagggtctaagatgtgtttttctgtgtgatgcgtctcattggacgggtgttagctgctgcatctggacgcctaaatgagaactaagttatttagttgctgggggtaattctaattttcggtggtgcacagggaccattgtaaagtaaagaggttaacattatatatcatccttaaataggaaaagggcaaacagtgtttgttg

SEQ ID NO: 35456 - protein, 91 aa, Zea mays subsp. mays
MVCCCRLPAPQLENALSKNPTLKTPLAEHAEQPNIRSTLPRSTLVVLGLAEDQPQQPAVTQVQSSQNQAAETSSSAADTATEVTQESSGAS

SEQ ID NO: 35457 - protein, 83 aa, Zea mays subsp. mays
  misc_feature (29)..(29): Xaa can be any naturally occurring amino acid
  misc_feature (57)..(57): Xaa can be any naturally occurring amino acid
VDFVMEIMSRLVSKQVLDSFCLLIEDISXGSFLHISETGPSLAMVDLEISQVMGRIXEVCYLDKTSVIWCVAADYQLLNLRMP

SEQ ID NO: 35458 - protein, 79 aa, Zea mays subsp. mays
  misc_feature (25)..(25): Xaa can be any naturally occurring amino acid
  misc_feature (53)..(53): Xaa can be any naturally occurring amino acid
MEIMSRLVSKQVLDSFCLLIEDISXGSFLHISETGPSLAMVDLEISQVMGRIXEVCYLDKTSVIWCVAADYQLLNLRMP

SEQ ID NO: 35459 - DNA, 509 bp, Zea mays subsp. mays
  misc_feature (86)..(86): n is a, c, g, or t
ggcccagcgtgagatgttggaagatgaggatggcgagaaaacaaaggaaaatgatagagggaagcaaccaatgaaaggccaatctntagtggatgctgcttaccgaaaggcaaaatcattgaaggcagccagcaaacgggcccctggtgcaaggaaaggaaagaaagagaagaatgaaaggcaacattctgagaaggctccgaacaggcatgaagagatgcgtgacctgttccaaaatgatatgagtgaatggaaacagggacgctcctcaaagaaaaataacaaatttgcgcccaaaaaatcaaggaactcttttaagagcaaagcaaggtacaagcggaagtagaagactcggccatctccgggtttatattacattcccttgtttcaattttgactgactgatcctgaagaaatatctgggatccagatgtttgcagttaattcaagtttgctttaaacatattctcatatcatgtattgaaactcaccgttttctggggtctctt

SEQ ID NO: 35460 - protein, 114 aa, Zea mays subsp. mays
  misc_feature (29)..(29): Xaa can be any naturally occurring amino acid
AQREMLEDEDGEKTKENDRGKQPMKGQSXVDAAYRKAKSLKAASKRAPGARKGKKEKNERQHSEKAPNRHEEMRDLFQNDMSEWKQGRSSKKNNKFAPKKSRNSFKSKARYKRK

SEQ ID NO: 35461 - protein, 110 aa, Zea mays subsp. mays
  misc_feature (25)..(25): Xaa can be any naturally occurring amino acid
MLEDEDGEKTKENDRGKQPMKGQSXVDAAYRKAKSLKAASKRAPGARKGKKEKNERQHSEKAPNRHEEMRDLFQNDMSEWKQGRSSKKNNKFAPKKSRNSFKSKARYKRK

SEQ ID NO: 35462 - protein, 91 aa, Zea mays subsp. mays
  misc_feature (6)..(6): Xaa can be any naturally occurring amino acid
MKGQSXVDAAYRKAKSLKAASKRAPGARKGKKEKNERQHSEKAPNRHEEMRDLFQNDMSEWKQGRSSKKNNKFAPKKSRNSFKSKARYKRK

SEQ ID NO: 35463 - DNA, 665 bp, Zea mays subsp. mays
  misc_feature (142)..(142): n is a, c, g, or t
  misc_feature (234)..(234): n is a, c, g, or t
caatgatcgcagccggattacttcgatcattgaggttgttaggggatgcatccgtgtcctttgagaaaaattgtgtcaggggaattcaagcaaaccacaagagaatttcacaacttttgcatgagtctctgatgttagtganatctttgaaccctaaaattggctatgacaatgctgcagctgttgctaagaaagcccacaaagaaggaaccacgttgaaggaagctgcattanaccttggagtattaacggagcaagaattccatgagcttgtcgtcccggagaaaatgattggtccttctgattgataaccccatgttcactatgtttctttgaagcatcaggttgccacatccgcgagttctggtggccctgtgttccaagttaatgactctagcgcacccataaataaagcaaataatttttcatatggtcattaggtcctcaccgtaccgcactagagaaatgatttttgcatggcggatggtatctgagaaaacagttgtattcttgttcaaatagggagcagtgcactttgattcatgaggcgccttccattatcttggcatcagtcaaccttttcttgccaagtagctagtgctatgtaacaagtgacatggcaaccatgtatagaaattatttgcatgggtttgtgttcttgccag

SEQ ID NO: 35464 - protein, 101 aa, Zea mays subsp. mays
  misc_feature (47)..(47): Xaa can be any naturally occurring amino acid
  misc_feature (78)..(78): Xaa can be any naturally occurring amino acid
MIAAGLLRSLRLLGDASVSFEKNCVRGIQANHKRISQLLHESLMLVXSLNPKIGYDNAAAVAKKAHKEGTTLKEAALXLGVLTEQEFHELVVPEKMIGPSD

SEQ ID NO: 35465 - protein, 58 aa, Zea mays subsp. mays
  misc_feature (4)..(4): Xaa can be any naturally occurring amino acid
  misc_feature (35)..(35): Xaa can be any naturally occurring amino acid
MLVXSLNPKIGYDNAAAVAKKAHKEGTTLKEAALXLGVLTEQEFHELVVPEKMIGPSD

SEQ ID NO: 35466 - DNA, 3133 bp, Zea mays subsp. mays
gagacggaagccaagcctccaagggggccgtcgcagaactcgcgccaccgcccgccatggcttcgtcatctaaggcctccgactcctcctcccaacgatccaagcggtcggatcaagggacgggcagggaagccgctcccgcctctgttgtcccgatccacgggaacctgacgcagttgatacgccaaatcaaatcgaggcgcctcttgtacatcaaggagaaattggaggctaacaggaagacgctgcagaggcactcctgctcgctgttcgacgtggcagcggcggcggaggtggcgtcgaggggcagcgatggcggcaacgctttgtcgcagcgagcggcggagggacagttcaggctcgctgggtcagacctggcacacgggataggggagagggacgtggtgtacatgcaggaggagaacctggcgtccgggacgctcgtgctctcgagctcgggcgctgccgcgcagcggacagtcgtgcggttcgtgaagctgccgttggttgagaggatccctccgtacaccacttggatcttcctggacaaaaatcaaagaatggctgatgatcagtcagttgttggtaggagaagaatttactatgatccagtcggaaacgaggctctgatctgcagtgacagcgatgaagaaattccagaaccagaggaagagaaacactttttcacagagggagaagatcaattgatatggagagctactcaagagcatgggttaaaccgagaggttgttaatgtcctctgccagtttattgattcaactccatcagaaattgaggaaagatctgaagtcctatttgagaaaaatgagaaaaactctggatcttcagataagatagagaggcaactttctcttgacaaaactatggatgccgttctggattcttttgataatctcttctgccgcagatgcttggtttttgattgtcgcctccatggttgctcacagaatttggtattcccaactgagaagcaaccctacagctttgagcctgatgaaaacaagaagccatgtggtcgtcagtgctaccttcgatggagaggaggatttcaagagattcatgatgttggtcttagtggctgtgcaacatataatatggaatcaggaactgtctcacacaaagttgatgttagtattatgtctgaatcagaagattcaaaccgagagaaaggcaacattaggtccatgacactagttggaaccagtggatcaaaaataatttcttctgttagtgctgaagaaagcactactccgccttcagcagatacctctgaaacagagaatgcatcctctgatatgcctcccagtagtttaaggaaatacaagatttcaaaacgtggacctaggtacagggagcgttctcctggcaaaaggcagaaggtttttacttctgacatttcttttgcaagcaatatactgaataaactttcgattccggagattcgcgacacaagactagagtctagagaacctggaggtgataaactacaaattcttgacgagtccactaagaaaacttcaagcaaagatatctgtggagaaagcccaattactactactgaaaatatgggaatagagagtaaaaaagtatcttcaacaaagaatttcttggagcacactctttcatgttggagtgccttagagcgagatctatacttgaagggcatagagatatttggaaagaacagctgtctcattgccagaaatttactatctggtatgaagacctgcatggaagtggccaactacatgtataacaatggtgcagcaatggcgaagagacctctcttgaataaatccatctcaggcgactttgcagaaactgaacaagactacatggagcaagacatggttgccagaacaagaatctatcgtcggaggggccgcaatcgaaagctgaaatatacttggaagtctgcagggcatccaactgttagaaaaagaattggtgatgggaagcaatggtacacacaatataacccatgcgtgtgccagcaaatgtgtggtaaagattgcccctgtgtggaaaatggaacttgctgtgaaaagtactgtgggtgttcgaagagctgcaaaaacaagtttagaggctgtcattgtgcaaaaagtcaatgcagaagcagacagtgcccctgttttgcagccagtcgtgaatgtgatccagatgtttgtaggaattgttgggtgagctgtggagatggttcactaggtgagccacctgccagaggtgatggttatcagtgtggaaatatgaagctccttttgaaacaacaacaaaggattttgttaggaagatctgatgttgcaggttggggtgcattcatcaagaatcctgtaaataaaaatgattatcttggagaatatactggtgaattgatctctcacaaggaagcagacaaacgtggcaaaatttatgaccgggcaaactcatcatttctgtttgatttaaatgaccagtatgtgttggatgcttatcgcaagggggacaaattaaagtttgcaaatcactcatctaaccccaactgctatgcaaaggtgatgctggtggctggcgaccatcgggttggtatctatgcgaaggagcatattgaggctagtgaggaactcttctatgattatcgttatgggcctgaccaggctccagcttgggctaggagacccgaagggtcaaagaaggacgaagcatccgtctctcaccatcgagcacacaaagttgctcgatagctgaagagcagctccggatgatacaatatgcagtaaattatatatttaatacatgatttagtcctagttcattatacgaggacttcgttggtagataagcatattgtatattcattagtgaataaactcccatacatcaagttggggaataagtgcatataaatattttttaccttaggtcggaaggtgacaaactgacaaccttgttaggttgagtaaagttagtgcttacaggttttcaaactggtgtggctattgctagagtatcaaatagctgagatggctacaactatagccttatttgtatttttttttggcaagagggatggaatttatttgccaaatgtacacattgttgctggaagtatttaatgattcaggtgttcttc

SEQ ID NO: 35467 - protein, 913 aa, Zea mays subsp. mays
DGSQASKGAVAELAPPPAMASSSKASDSSSQRSKRSDQGTGREAAPASVVPIHGNLTQLIRQIKSRRLLYIKEKLEANRKTLQRHSCSLFDVAAAAEVASRGSDGGNALSQRAAEGQFRLAGSDLAHGIGERDVVYMQEENLASGTLVLSSSGAAAQRTVVRFVKLPLVERIPPYTTWIFLDKNQRMADDQSVVGRRRIYYDPVGNEALICSDSDEEIPEPEEEKHFFTEGEDQLIWRATQEHGLNREVVNVLCQFIDSTPSEIEERSEVLFEKNEKNSGSSDKIERQLSLDKTMDAVLDSFDNLFCRRCLVFDCRLHGCSQNLVFPTEKQPYSFEPDENKKPCGRQCYLRWRGGFQEIHDVGLSGCATYNMESGTVSHKVDVSIMSESEDSNREKGNIRSMTLVGTSGSKIISSVSAEESTTPPSADTSETENASSDMPPSSLRKYKISKRGPRYRERSPGKRQKVFTSDISFASNILNKLSIPEIRDTRLESREPGGDKLQILDESTKKTSSKDICGESPITTTENMGIESKKVSSTKNFLEHTLSCWSALERDLYLKGIEIFGKNSCLIARNLLSGMKTCMEVANYMYNNGAAMAKRPLLNKSISGDFAETEQDYMEQDMVARTRIYRRRGRNRKLKYTWKSAGHPTVRKRIGDGKQWYTQYNPCVCQQMCGKDCPCVENGTCCEKYCGCSKSCKNKFRGCHCAKSQCRSRQCPCFAASRECDPDVCRNCWVSCGDGSLGEPPARGDGYQCGNMKLLLKQQQRILLGRSDVAGWGAFIKNPVNKNDYLGEYTGELISHKEADKRGKIYDRANSSFLFDLNDQYVLDAYRKGDKLKFANHSSNPNCYAKVMLVAGDHRVGIYAKEHIEASEELFYDYRYGPDQAPAWARRPEGSKKDEASVSHHRAHKVAR

SEQ ID NO: 35468 - protein, 895 aa, Zea mays subsp. mays
MASSSKASDSSSQRSKRSDQGTGREAAPASVVPIHGNLTQLIRQIKSRRLLYIKEKLEANRKTLQRHSCSLFDVAAAAEVASRGSDGGNALSQRAAEGQFRLAGSDLAHGIGERDVVYMQEENLASGTLVLSSSGAAAQRTVVRFVKLPLVERIPPYTTWIFLDKNQRMADDQSVVGRRRIYYDPVGNEALICSDSDEEIPEPEEEKHFFTEGEDQLIWRATQEHGLNREVVNVLCQFIDSTPSEIEERSEVLFEKNEKNSGSSDKIERQLSLDKTMDAVLDSFDNLFCRRCLVFDCRLHGCSQNLVFPTEKQPYSFEPDENKKPCGRQCYLRWRGGFQEIHDVGLSGCATYNMESGTVSHKVDVSIMSESEDSNREKGNIRSMTLVGTSGSKIISSVSAEESTTPPSADTSETENASSDMPPSSLRKYKISKRGPRYRERSPGKRQKVFTSDISFASNILNKLSIPEIRDTRLESREPGGDKLQILDESTKKTSSKDICGESPITTTENMGIESKKVSSTKNFLEHTLSCWSALERDLYLKGIEIFGKNSCLIARNLLSGMKTCMEVANYMYNNGAAMAKRPLLNKSISGDFAETEQDYMEQDMVARTRIYRRRGRNRKLKYTWKSAGHPTVRKRIGDGKQWYTQYNPCVCQQMCGKDCPCVENGTCCEKYCGCSKSCKNKFRGCHCAKSQCRSRQCPCFAASRECDPDVCRNCWVSCGDGSLGEPPARGDGYQCGNMKLLLKQQQRILLGRSDVAGWGAFIKNPVNKNDYLGEYTGELISHKEADKRGKIYDRANSSFLFDLNDQYVLDAYRKGDKLKFANHSSNPNCYAKVMLVAGDHRVGIYAKEHIEASEELFYDYRYGPDQAPAWARRPEGSKKDEASVSHHRAHKVAR

SEQ ID NO: 35469 - protein, 777 aa, Zea mays subsp. mays
MQEENLASGTLVLSSSGAAAQRTVVRFVKLPLVERIPPYTTWIFLDKNQRMADDQSVVGRRRIYYDPVGNEALICSDSDEEIPEPEEEKHFFTEGEDQLIWRATQEHGLNREVVNVLCQFIDSTPSEIEERSEVLFEKNEKNSGSSDKIERQLSLDKTMDAVLDSFDNLFCRRCLVFDCRLHGCSQNLVFPTEKQPYSFEPDENKKPCGRQCYLRWRGGFQEIHDVGLSGCATYNMESGTVSHKVDVSIMSESEDSNREKGNIRSMTLVGTSGSKIISSVSAEESTTPPSADTSETENASSDMPPSSLRKYKISKRGPRYRERSPGKRQKVFTSDISFASNILNKLSIPEIRDTRLESREPGGDKLQILDESTKKTSSKDICGESPITTTENMGIESKKVSSTKNFLEHTLSCWSALERDLYLKGIEIFGKNSCLIARNLLSGMKTCMEVANYMYNNGAAMAKRPLLNKSISGDFAETEQDYMEQDMVARTRIYRRRGRNRKLKYTWKSAGHPTVRKRIGDGKQWYTQYNPCVCQQMCGKDCPCVENGTCCEKYCGCSKSCKNKFRGCHCAKSQCRSRQCPCFAASRECDPDVCRNCWVSCGDGSLGEPPARGDGYQCGNMKLLLKQQQRILLGRSDVAGWGAFIKNPVNKNDYLGEYTGELISHKEADKRGKIYDRANSSFLFDLNDQYVLDAYRKGDKLKFANHSSNPNCYAKVMLVAGDHRVGIYAKEHIEASEELFYDYRYGPDQAPAWARRPEGSKKDEASVSHHRAHKVAR

SEQ ID NO: 35470 - DNA, 873 bp, Zea mays subsp. mays
tacgccaagcccgcaattaaccctcactaaagggaacaaaagctggagctccaccgcggtggcggccgctctagaactagtggatcccccgggctgcaggaattcgcacgagaccattacctagaacatcctaatgaaaaaacaggatgggaagggggttatggctgaaaggcgtttagtttattcatgcttcttattatcagtcaagttaaaaaccctatgtttcaatgctctttgatttaagcaacagtatgtatagttgttctacattttccagatggcgatataagtattgatgatgttcaagacataccatttcttgctgtagcttatcccgctcctgggtggtacttctgctctcttcttttagccttattatcatctttccagcctaccaaaaaaaaacgtattaaagtatgttctccatttagggctagtttgggaacacagttttcccttgggaaaatggtgttaccaaactagcccttaatgaaattataatcctgatgcttgttcaagtaatggaaaatatcccatggtgttcagcttacctcttccaattttgattcgagattgttgagctttaatttcagattctgaacatcttctgttacctggtacatatgtacaaggagaagtcaacacaatgctgtacaaaaaaggaaaacaacaaaatatatccccatgcaaattgggtaggccagagatgaaacccaacaagagcaacaagaacaggagctttatgtatatgttgacttgaaggctgtgattctgtgaaagaattaagtcagaactgtattatggaagacacatactacacaattgtccaattaaattttctctggccaagatgagggccacaatttaaagtcc

SEQ ID NO: 35471 - protein, 40 aa, Zea mays subsp. mays
TPSPQLTLTKGNKSWSSTAVAAALELVDPPGCRNSHETIT

SEQ ID NO: 35472 - protein, 37 aa, Zea mays subsp. mays
MLYKKGKQQNISPCKLGRPEMKPNKSNKNRSFMYMLT

SEQ ID NO: 35473 - protein, 34 aa, Zea mays subsp. mays
MKKQDGKGVMAERRLVYSCFLLSVKLKTLCFNAL

SEQ ID NO: 35474 - DNA, 1244 bp, Zea mays subsp. mays
  misc_feature (165)..(165): n is a, c, g, or t
  misc_feature (198)..(198): n is a, c, g, or t
gcacgagaccattacctagaacatcctaatcgaaaaacaaaagcacttttgttttttttaaccccccgctagcaaaaattgttccccttccttcctcactccttctctctcatccaccacctcgacgctttgcgccgctaagcgatggcgatggtcatgactgangccgacgccgccaccgccactgccaccgccgangccgccaccgccaccgccaccgccaccgccgacgccgccaccgccaccgtcgacgccgactccgtcaccgccaccgccgcagagaagccgaagcacgccgagaagccggactacgccccctacaacggcgcttccaccgcagatggcggcacgggcgcccgcgtccgccgcggcggcggcgtggtggattcggtggtggcgcggtggcggcgggaggacatgctcgacaagagccccctcgcgctgcatgccgcggccgcggtcttcgccttcgtcgctctcgtgcttgtcgcgtccaaccagcacggcgactggatgcagttcgaccggtaccaggagtacaagtacctgctttccatcgcgtcgctggcgctactctactcgctggcgcaggcggcgcggcacgcgcaccggatgcgcggcggcgtcgaccccatctcctcagcatctgggaggcttcttgatttcgttggtgatcaggtagttgcgtacttgctgatgtctgcgctgtcggctgctgccccgatcacgaaccgcatgagatctgcagttgtcaataacttcacagatgcaaccgctgcagcaatcagcatgaccttctttgcatttgcagctcttgccttgtcggcagtggtttctggttactctccaaacaaacatacatgtgaatcatcgtcgtagaagtaaaacccattaggccttgtttggttgcacaaggatcgaatgggattgaggggaattaaatccattcttgtttaattttgactagaaagagatttaatctgctccgatccccttcaatcccttacaaaccgaagaagcccttaggtggaatattcattatggattgcttagccaaagaagagaaacctctgatgcttctcttcaacttgaaggtcatctgttatgtgttacggtgattgttgttgcttgcagtagcttccatgtgtgtacatagaattataggattcctgaatattattgttttcctttctaagatattcctgttataatcagaagtagagctgtatgcttatttcagggct

SEQ ID NO: 35475 - protein, 244 aa, Zea mays subsp. mays
  misc_feature (7)..(7): Xaa can be any naturally occurring amino acid
  misc_feature (18)..(18): Xaa can be any naturally occurring amino acid
MAMVMTXADAATATATAXAATATATATADAATATVDADSVTATAAEKPKHAEKPDYAPYNGASTADGGTGARVRRGGGVVDSVVARWRREDMLDKSPLALHAAAAVFAFVALVLVASNQHGDWMQFDRYQEYKYLLSIASLALLYSLAQAARHAHRMRGGVDPISSASGRLLDFVGDQVVAYLLMSALSAAAPITNRMRSAVVNNFTDATAAAISMTFFAFAALALSAVVSGYSPNKHTCESSS

SEQ ID NO: 35476 - protein, 242 aa, Zea mays subsp. mays
  misc_feature (5)..(5): Xaa can be any naturally occurring amino acid
  misc_feature (16)..(16): Xaa can be any naturally occurring amino acid
MVMTXADAATATATAXAATATATATADAATATVDADSVTATAAEKPKHAEKPDYAPYNGASTADGGTGARVRRGGGVVDSVVARWRREDMLDKSPLALHAAAAVFAFVALVLVASNQHGDWMQFDRYQEYKYLLSIASLALLYSLAQAARHAHRMRGGVDPISSASGRLLDFVGDQVVAYLLMSALSAAAPITNRMRSAVVNNFTDATAAAISMTFFAFAALALSAVVSGYSPNKHTCESSS

SEQ ID NO: 35477 - protein, 240 aa, Zea mays subsp. mays
  misc_feature (3)..(3): Xaa can be any naturally occurring amino acid
  misc_feature (14)..(14): Xaa can be any naturally occurring amino acid
MTXADAATATATAXAATATATATADAATATVDADSVTATAAEKPKHAEKPDYAPYNGASTADGGTGARVRRGGGVVDSVVARWRREDMLDKSPLALHAAAAVFAFVALVLVASNQHGDWMQFDRYQEYKYLLSIASLALLYSLAQAARHAHRMRGGVDPISSASGRLLDFVGDQVVAYLLMSALSAAAPITNRMRSAVVNNFTDATAAAISMTFFAFAALALSAVVSGYSPNKHTCESSS

SEQ ID NO: 35478 - DNA, 1116 bp, Zea mays subsp. mays
  misc_feature (740)..(740): n is a, c, g, or t
  misc_feature (743)..(743): n is a, c, g, or t
  misc_feature (823)..(823): n is a, c, g, or t
  misc_feature (901)..(902): n is a, c, g, or t
tagaacatcctaatcgaaaaagaccagagtttgttctcacaccacatgcaaagatcgcccacgccatcttcccaatggagctccagttccatccccagcagcaccacagctaccaacaacaacaacaaccaccaccgccagccacgaaggaacccaaacccaagccaagaacgagaaccaagtgcggcggcggcggcggcggcagcagcaagttcgtgggcgtccggcagaggccgtcggggaggtgggtggcggagatcaaggacacgacgcagaaggtccgggtgtggctgggcacgttcgataccgccgaggccgccgcgcgcgcctacgacgaggccgcctgcctcctccgcggcgccaacacgcgcaccaacttcgccgccgcgccgccgcccggattcgccgctggccgcccggatccgcggcatcctcgaccacaacaacaacaacggccggacgccgccgaagaagaccttaccgcaccgccccaccgccgcccgcttcttccccgcagccgcggccagcaccgctagcacctgcagcagcacggccagcccgaccagcagcagtcctagctccagcatcagcttcgccaccagcacccacgcccgcgctcccattcccaccctcccggatcctcggagtcagagcgcgaccgaggaagcttattacgcgccgtactcggccaccggcggcggcgaagagttccagctagccgcgaccacgcaccagtacgnacnacagtcatgggcgctcaacgccgccagcagccccctaacaccaccaccacctccggacgcacgcgacgtgggtagcatgnacgctcgccgcttggcggtcgcggcggagacaggcagagacaggatgatcaagctggagaagaagagcagctctgcgnngctgtcgctgtcgccccacggcgtcatcgacaggggtccggacaaggatctagcgtttgacgtggggaatgatgcgtctggtggtaatggtggtggggcccggtgtcagtgcgcgcggtgccccatgcctgccgcggctgcagcttgttgtgtcttgtgttggttgagttcctgttctttctgtctatctattctcacgcatggcagtttgggt

SEQ ID NO: 35479 - protein, 357 aa, Zea mays subsp. mays
  misc_feature (232)..(233): Xaa can be any naturally occurring amino acid
  misc_feature (260)..(260): Xaa can be any naturally occurring amino acid
  misc_feature (286)..(286): Xaa can be any naturally occurring amino acid
MQRSPTPSSQWSSSSIPSSTTATNNNNNHHRQPRRNPNPSQEREPSAAAAAAAAASSWASGRGRRGGGWRRSRTRRRRSGCGWARSIPPRPPRAPTTRPPASSAAPTRAPTSPPRRRPDSPLAARIRGILDHNNNNGRTPPKKTLPHRPTAARFFPAAAASTASTCSSTASPTSSSPSSSISFATSTHARAPIPTLPDPRSQSATEEAYYAPYSATGGGEEFQLAATTHQYXXQSWALNAASSPLTPPPPPDARDVGSMXARRLAVAAETGRDRMIKLEKKSSSAXLSLSPHGVIDRGPDKDLAFDVGNDASGGNGGGARCQCARCPMPAAAAACCVLCWLSSCSFCLSILTHGSLG

SEQ ID NO: 35480 - DNA, 1355 bp, Zea mays subsp. mays
  misc_feature (1056)..(1056): n is a, c, g, or t
aaaatcaggcagatcgcagtcgcagcaccgaagatggtgagcaggcgcactctcctcgtcatgatggcgacggtagtggttctgcatcggagtcggactctctgcgctgctgcctcggcggctgcagcgccgccggcgacgacgaagcaggcgcggaccccggccctgttcgtgttcggggactccatcgtggacccgggcaacaacaacgccctcaccaccacggtgcgctgcaacttcccgccctacggccaggacttccccggccacaacgccaccggcaggttcagcaacggcagggtgcccagcgacatcgtcgccagccggctgggcatcaaggagcacctgccggcgtacctcggcacggagctcagcgacttcgacctcctcaccggcgtcagcttcgcgtccggcggctgcggcttcgaccccctcaccgccgagctcgtgtccgtgctcaccatggacaaccagctggacctgttcaaggagtacaaggagaagctggagcgcgtcgccagcggcgcccaccgggccgccgacatcgtgtccaggagcctgtacatggtggtcacgggcaccgacgacctcgccaacacctacttcaccacgccgttccgccgcgactacgacctcgagtcctacatcgagttcgtcgtgcagtgcgcctccgacttcatcaagaagctgtacggtctgggcgcgcggcgcatcaacatcgccggcgcgccgcccatcgggtgcgtgccgtcgcagcggaccaacgccggcgggctggagcgggagtgcgtgccgctgtacaaccaggcggccgtcgtgttcaacgcggcgctggagaaggagatcaagcggctcaacggcagcgacgcgctcccggcctccgtgctccagtacatcgacctctacacgccgctgctcgacatgattcagcgccctgacgcctacggattcaacgtcacgaaccgggggtgctgcggcacgggggtgttcgaggtgacgctgacgtgcaaccggtacacggcggaaccctgcagggaccccagcaagttcctcttntgggacacctaccacctcacggagaggggctacgacctcctcatggcgcagatcataaaccgatacggggtctgagatggatgccatgacagcgcagcgctggagatctcggcgctatgacagcgcggtccatgctttcagaggcttttgctgaacttgatcttgtagctgaactacagctccagaaatcaccggtccaatatcatatcccagtttgtgatgggtacatgtcagcggggcacaattgcttgcttgtattgcataaatgaaaactgaatcaggacaggcagtgacagttg

SEQ ID NO: 35481 - protein, 376 aa, Zea mays subsp. mays
  misc_feature (352)..(352): Xaa can be any naturally occurring amino acid
KIRQIAVAAPKMVSRRTLLVMMATVVVLHRSRTLCAAASAAAAPPATTKQARTPALFVFGDSIVDPGNNNALTTTVRCNFPPYGQDFPGHNATGRFSNGRVPSDIVASRLGIKEHLPAYLGTELSDFDLLTGVSFASGGCGFDPLTAELVSVLTMDNQLDLFKEYKEKLERVASGAHRAADIVSRSLYMVVTGTDDLANTYFTTPFRRDYDLESYIEFVVQCASDFIKKLYGLGARRINIAGAPPIGCVPSQRTNAGGLERECVPLYNQAAVVFNAALEKEIKRLNGSDALPASVLQYIDLYTPLLDMIQRPDAYGFNVTNRGCCGTGVFEVTLTCNRYTAEPCRDPSKFLXWDTYHLTERGYDLLMAQIINRYGV

SEQ ID NO: 35482 - protein, 365 aa, Zea mays subsp. mays
  misc_feature (341)..(341): Xaa can be any naturally occurring amino acid
MVSRRTLLVMMATVVVLHRSRTLCAAASAAAAPPATTKQARTPALFVFGDSIVDPGNNNALTTTVRCNFPPYGQDFPGHNATGRFSNGRVPSDIVASRLGIKEHLPAYLGTELSDFDLLTGVSFASGGCGFDPLTAELVSVLTMDNQLDLFKEYKEKLERVASGAHRAADIVSRSLYMVVTGTDDLANTYFTTPFRRDYDLESYIEFVVQCASDFIKKLYGLGARRINIAGAPPIGCVPSQRTNAGGLERECVPLYNQAAVVFNAALEKEIKRLNGSDALPASVLQYIDLYTPLLDMIQRPDAYGFNVTNRGCCGTGVFEVTLTCNRYTAEPCRDPSKFLXWDTYHLTERGYDLLMAQIINRYGV

SEQ ID NO: 35483 - protein, 356 aa, Zea mays subsp. mays
  misc_feature (332)..(332): Xaa can be any naturally occurring amino acid
MMATVVVLHRSRTLCAAASAAAAPPATTKQARTPALFVFGDSIVDPGNNNALTTTVRCNFPPYGQDFPGHNATGRFSNGRVPSDIVASRLGIKEHLPAYLGTELSDFDLLTGVSFASGGCGFDPLTAELVSVLTMDNQLDLFKEYKEKLERVASGAHRAADIVSRSLYMVVTGTDDLANTYFTTPFRRDYDLESYIEFVVQCASDFIKKLYGLGARRINIAGAPPIGCVPSQRTNAGGLERECVPLYNQAAVVFNAALEKEIKRLNGSDALPASVLQYIDLYTPLLDMIQRPDAYGFNVTNRGCCGTGVFEVTLTCNRYTAEPCRDPSKFLXWDTYHLTERGYDLLMAQIINRYGV

SEQ ID NO: 35484 - DNA, 1393 bp, Zea mays subsp. mays
aaaacctcgcgcgcggcggagggagaaggaaggatggcgtcggagccggtggcgcgggcggtggcggaggaggtggcgcgctggggcgcgatgcgccagaccggggtcagcctgcgctacatgatggagttcggggcgcgccccacggagcggaccctccttctcgccgcgcagttcctgcacaaggagctccccatccgcatcgcgcgacgggcgctcgacctcgactcgctccccttcggcctctccaccaagcccgccatcctcaaggtgaaagattggtatgtggagtcattccgtaaaatccggtcctttccagaggtgaggaaccagaaagatgagctcgccttcacccagatgatcaaaatgatcagggttcgacacaccaatgtggtgcctgcgattgcattgggagtgcagcagctgaagaaggacttgggcggtccaaaggcgttcccccctggaatccatgagatccatcagtttcttgaccgcttctacatgtcaaggattgggatccggatgctgatagggcttataaacacaaaaatgtcacccatgacagttgctcgaattgctagtgaagatgcacgtgctatttgcatgcgagagtatggatcatctcctgatgtcgacatatatggtgatccaggttttacatttccatatgttacaccacatctacatctcatgattttcgagctggtgaagaactcccttcgtgcggtacaggaacggtatatggattctgataagcttgcacctccagttcgaatcatagttgctgatggagcagaggatgtaactattaagattagtgatgaaggtggtggaataccaaggagtgggctctcaaggatttttacgtatctctatagtacagcagaaaaccctcctgatctggatggacataatgaaggagtaactatggctggatatggttatgggatccctattagtcgcctttatgctcgatatttcggtggggacttgcagatcatctctatggaaggatatggaactgatgcttacctccacctttcacggctgggagattcggaggaacccttgccgtaatttattcaaaagaaccattcctgtaattaggatattgcttctgtgctggtatgcaagtatagttctgaaggccagccacctgttcagctgttggtgtccctacttgttgtctttattgttcattcatcatctcaatggaatgtgatcgtaattcataatcgttttatgactgatttgtactgtcattataattgtcgaacctccaaaaaaaaagttgccgtcgagcatccgaggtatttattagtttgagtgagtaatgggattcaccataacactgtaagcctgttactccaatgcctctaaagcatgtttttcc

SEQ ID NO: 35485 - protein, 358 aa, Zea mays subsp. mays
KTSRAAEGEGRMASEPVARAVAEEVARWGAMRQTGVSLRYMMEFGARPTERTLLLAAQFLHKELPIRIARRALDLDSLPFGLSTKPAILKVKDWYVESFRKIRSFPEVRNQKDELAFTQMIKMIRVRHTNVVPAIALGVQQLKKDLGGPKAFPPGIHEIHQFLDRFYMSRIGIRMLIGLINTKMSPMTVARIASEDARAICMREYGSSPDVDIYGDPGFTFPYVTPHLHLMIFELVKNSLRAVQERYMDSDKLAPPVRIIVADGAEDVTIKISDEGGGIPRSGLSRIFTYLYSTAENPPDLDGHNEGVTMAGYGYGIPISRLYARYFGGDLQIISMEGYGTDAYLHLSRLGDSEEPLP

SEQ ID NO: 35486 - protein, 347 aa, Zea mays subsp. mays
MASEPVARAVAEEVARWGAMRQTGVSLRYMMEFGARPTERTLLLAAQFLHKELPIRIARRALDLDSLPFGLSTKPAILKVKDWYVESFRKIRSFPEVRNQKDELAFTQMIKMIRVRHTNVVPAIALGVQQLKKDLGGPKAFPPGIHEIHQFLDRFYMSRIGIRMLIGLINTKMSPMTVARIASEDARAICMREYGSSPDVDIYGDPGFTFPYVTPHLHLMIFELVKNSLRAVQERYMDSDKLAPPVRIIVADGAEDVTIKISDEGGGIPRSGLSRIFTYLYSTAENPPDLDGHNEGVTMAGYGYGIPISRLYARYFGGDLQIISMEGYGTDAYLHLSRLGDSEEPLP

SEQ ID NO: 35487 - protein, 328 aa, Zea mays subsp. mays
MRQTGVSLRYMMEFGARPTERTLLLAAQFLHKELPIRIARRALDLDSLPFGLSTKPAILKVKDWYVESFRKIRSFPEVRNQKDELAFTQMIKMIRVRHTNVVPAIALGVQQLKKDLGGPKAFPPGIHEIHQFLDRFYMSRIGIRMLIGLINTKMSPMTVARIASEDARAICMREYGSSPDVDIYGDPGFTFPYVTPHLHLMIFELVKNSLRAVQERYMDSDKLAPPVRIIVADGAEDVTIKISDEGGGIPRSGLSRIFTYLYSTAENPPDLDGHNEGVTMAGYGYGIPISRLYARYFGGDLQIISMEGYGTDAYLHLSRLGDSEEPLP

SEQ ID NO: 35488 - DNA, 1220 bp, Zea mays subsp. mays
actgcacagcactcccccagttcagtccccacaccgagctgtgcccatcgcgcacacacacacacacacacacactctctctcccaccgttcacggtccagtccagagagctcaagagctcctgcagccatggcggttcccctgcttctcctcctcctgctgtccgtgttcacagcctcagatgcggcgttctgcgtgtgcaagccgggcatgtccgaccagatgatgcagtcggccatcgactacgcctgcagcaagggggccgactgcgcctccaccaccaagggcgcgccgtgctacggcaacggcaacaaggtggccgtctgctcctacatctgcaacagctactaccagagccgcagcggcatgggcgccacctgcgacttcaacggcgtcgccaccctcaccggcaccgaccccagctccgggacctgcaagttcgcctccgggcccagcagcgtaggcaccggcggcggcgctggtatgggcaccggcggagcaggcgctggcgtcggcggtggcacgggcgccggcgccggcactggagcaggcacgggcgcgggcatgggtgccggcgctggaaccggagcaggcacgggcatgggcgccgggacggggaccagcaccggagctggcgccggcgccgggatcacgacccccggggccctgagcccgccgttcggcggcacgggcgcctacggcccggcaggagcaggcagcaccgactacaacgacgctgcggcgccgcgcgtctccaggctgcacgtggtggccgccctcggcctcggcctcgccgccgccgccgcacctctcctccgctaggaggtgtaagtgggagggagggggcgggcacgacacgcgcgtggatcccgctgtctggcgtgcgtgcgtgcctgcgcctgcgctgggttttgatcgatcagccgtcgtcagcgtagcgtggcgtggtttagtagcagcacggggtttactgttattcaactgaccctcttgtccttccccgtgctagtggtggtggctgccatgtgccatgtggtttggtgctctgtactagtggggtagtagagatcctagggattcttttggtagttccggacatacgtgtcgtcgacgtgttcttcagtcgtttttttctctctatgttttgttccttgtgcctccgttgtgttaggctgtgtttttactagaactatgctagtgtctggtggcggccgctttcc

SEQ ID NO: 35489 - protein, 311 aa, Zea mays subsp. mays
CTALPQFSPHTELCPSRTHTHTHTLSLPPFTVQSRELKSSCSHGGSPASPPPAVRVHSLRCGVLRVQAGHVRPDDAVGHRLRLQQGGRLRLHHQGRAVLRQRQQGGRLLLHLQQLLPEPQRHGRHLRLQRRRHPHRHRPQLRDLQVRLRAQQRRHRRRRWYGHRRSRRWRRRWHGRRRRHWSRHGRGHGCRRWNRSRHGHGRRDGDQHRSWRRRRDHDPRGPEPAVRRHGRLRPGRSRQHRLQRRCGAARLQAARGGRPRPRPRRRRRTSPPLGGVSGREGAGTTRAWIPLSGVRACLRLRWVLIDQPSSA

SEQ ID NO: 35490 - protein, 273 aa, Zea mays subsp. mays
TAQHSPSSVPTPSCAHRAHTHTHTHSLSHRSRSSPESSRAPAAMAVPLLLLLLLSVFTASDAAFCVCKPGMSDQMMQSAIDYACSKGADCASTTKGAPCYGNGNKVAVCSYICNSYYQSRSGMGATCDFNGVATLTGTDPSSGTCKFASGPSSVGTGGGAGMGTGGAGAGVGGGTGAGAGTGAGTGAGMGAGAGTGAGTGMGAGTGTSTGAGAGAGITTPGALSPPFGGTGAYGPAGAGSTDYNDAAAPRVSRLHVVAALGLGLAAAAAPLLR

SEQ ID NO: 35491 - protein, 230 aa, Zea mays subsp. mays
MAVPLLLLLLLSVFTASDAAFCVCKPGMSDQMMQSAIDYACSKGADCASTTKGAPCYGNGNKVAVCSYICNSYYQSRSGMGATCDFNGVATLTGTDPSSGTCKFASGPSSVGTGGGAGMGTGGAGAGVGGGTGAGAGTGAGTGAGMGAGAGTGAGTGMGAGTGTSTGAGAGAGITTPGALSPPFGGTGAYGPAGAGSTDYNDAAAPRVSRLHVVAALGLGLAAAAAPLLR

SEQ ID NO: 35492 - DNA, 1471 bp, Zea mays subsp. mays
accaccgcagccgcagcacaatcgcctcgccttcccttccccaccagcccccgtctctctctctctctttctctctctcgtagccgcgtccacctcgcagcagcaagcaagcgcgaccaaatggcgcctctaggagacggcggagctgctgccgcggcggcgtccaacaacctggtggtgtcgttcggcgagatgctgatcgacttcgtccccgacgtggccgggctgtcgctggccgagtcgggcggcttcgtcaaggcccccggcggcgcgcccgccaacgtcgcctgcgccatcgccaagctcggcggctcctccgccttcgtcggcaagttcggcgacgacgagttcgggcacatgctggtgaacatcctgaagcagaacaacgtgaactcggaggggtgcctgttcgacaagcacgcgcggacggcgctggccttcgtgacgctcaagcacgacggggagcgcgagttcatgttctacaggaacccgagcgcggacatgctgctgacggaggcggagctggacctgggcctggtgcggcgcgccagggtgttccactacggctccatctcgctcatctccgagccgtgccgctcggcgcacatggccgccatgcgcgcagccaaggccgcgggcgtgctctgctcctacgaccccaacgtgcgcctcccgctctggccgtcgcccgacgccgcacgcgagggcatcctcagcatctggaaggaggccgacttcatcaaggtcagcgacgacgaggtggccttcctcacgcgcggggacgccaacgacgagaagaacgtgctgtccctgtggtttgacgggctcaagctgctcgtcgtcaccgacggggacaagggatgcaggtacttcaccaaggacttcaagggcagcgtgtccggcttcaaggtcgacaccgtcgacaccaccggcgccggcgacgccttcgtcggctccctcctcgtcaacgtcgccaaggacgactccatcttccacaacgaggagaagctccgcgaggctctcaagttctccaacgcctgcggcgccatctgcaccaccaagaagggcgccatcccggcgctgcccacggtcgccaccgcccaggacctcatcgccaaggccaactagatcatggccgcacgcccgccgttccaccacgtcactgtcccccgccgccccgcccctcgtcgtcgacgtcctcggtttcggttcattaggtagatcgagtcttagcgtccgtctctgcgcctctacgctgagacggtttgtttgggttaattaagttagctttcgtggagatttcgccccggggcatcaataaaatgttggcatgcgtggtgggatgctatcctttatttttattttatttttagcttggatcagttggggttttgaacattgctagtgtcgtgtgattgggaaggctaatgtgatgccttccatgcagagttttcaatgaatgccttggtgc

SEQ ID NO: 35493 - protein, 375 aa, Zea mays subsp. mays
TTAAAAQSPRLPFPTSPRLSLSLSLSRSRVHLAAASKRDQMAPLGDGGAAAAAASNNLVVSFGEMLIDFVPDVAGLSLAESGGFVKAPGGAPANVACAIAKLGGSSAFVGKFGDDEFGHMLVNILKQNNVNSEGCLFDKHARTALAFVTLKHDGEREFMFYRNPSADMLLTEAELDLGLVRRARVFHYGSISLISEPCRSAHMAAMRAAKAAGVLCSYDPNVRLPLWPSPDAAREGILSIWKEADFIKVSDDEVAFLTRGDANDEKNVLSLWFDGLKLLVVTDGDKGCRYFTKDFKGSVSGFKVDTVDTTGAGDAFVGSLLVNVAKDDSIFHNEEKLREALKFSNACGAICTTKKGAIPALPTVATAQDLIAKAN

SEQ ID NO: 35494 - protein, 335 aa, Zea mays subsp. mays
MAPLGDGGAAAAAASNNLVVSFGEMLIDFVPDVAGLSLAESGGFVKAPGGAPANVACAIAKLGGSSAFVGKFGDDEFGHMLVNILKQNNVNSEGCLFDKHARTALAFVTLKHDGEREFMFYRNPSADMLLTEAELDLGLVRRARVFHYGSISLISEPCRSAHMAAMRAAKAAGVLCSYDPNVRLPLWPSPDAAREGILSIWKEADFIKVSDDEVAFLTRGDANDEKNVLSLWFDGLKLLVVTDGDKGCRYFTKDFKGSVSGFKVDTVDTTGAGDAFVGSLLVNVAKDDSIFHNEEKLREALKFSNACGAICTTKKGAIPALPTVATAQDLIAKAN

SEQ ID NO: 35495 - protein, 311 aa, Zea mays subsp. mays
MLIDFVPDVAGLSLAESGGFVKAPGGAPANVACAIAKLGGSSAFVGKFGDDEFGHMLVNILKQNNVNSEGCLFDKHARTALAFVTLKHDGEREFMFYRNPSADMLLTEAELDLGLVRRARVFHYGSISLISEPCRSAHMAAMRAAKAAGVLCSYDPNVRLPLWPSPDAAREGILSIWKEADFIKVSDDEVAFLTRGDANDEKNVLSLWFDGLKLLVVTDGDKGCRYFTKDFKGSVSGFKVDTVDTTGAGDAFVGSLLVNVAKDDSIFHNEEKLREALKFSNACGAICTTKKGAIPALPTVATAQDLIAKAN

SEQ ID NO: 35496 - DNA, 742 bp, Zea mays subsp. mays
taatcgaaaaactatatacgtatatagacgtggtcaggatgacgtcgtcctccgtcttcttcctcctgctcgcttgcttcgccacatgcgccggcgccgccacgttcacggtacgaaacaactgcgggttcacggtgtggccagcaggcatcccggtcggcggcggcacgcagctgaacccgggctcgacgtggactgtcaacgtgcaggccgggaccagcggaggcaggatctggggccgcaccggctgctccttcagcggcggccggggccgctgcgcgacgggcgactgcggaggcgcctactcctgcagcctgtccgggcagcccccggcgacgctggcggagttcaccatcggcggcggcggcaaccacgactactacgatatctcggtgatcgacggctacaacctgcccatggacttctcgtgcagcactggcgccgccctgcggtgcagggactccggctgccccgacgcgtaccaccagcccaatgaccctaagacccgttcgtgcaacggcaatagcaactaccaggtcgtcttctgcccctgatgaacatgcatgcagcttgccatgagcccatgcatgcatgagagcgtattaattgttcgtcaactcacatgcacgtacctactagtgaagttgataaataagacgatcgatatctgactcgtccaatgcagcatgtgtgtatggtgtgatccttatactttcctacatatatggaactttttaaaggg

SEQ ID NO: 35497 - protein, 183 aa, Zea mays subsp. mays
IEKLYTYIDVVRMTSSSVFFLLLACFATCAGAATFTVRNNCGFTVWPAGIPVGGGTQLNPGSTWTVNVQAGTSGGRIWGRTGCSFSGGRGRCATGDCGGAYSCSLSGQPPATLAEFTIGGGGNHDYYDISVIDGYNLPMDFSCSTGAALRCRDSGCPDAYHQPNDPKTRSCNGNSNYQVVFCP

SEQ ID NO: 35498 - protein, 171 aa, Zea mays subsp. mays
MTSSSVFFLLLACFATCAGAATFTVRNNCGFTVWPAGIPVGGGTQLNPGSTWTVNVQAGTSGGRIWGRTGCSFSGGRGRCATGDCGGAYSCSLSGQPPATLAEFTIGGGGNHDYYDISVIDGYNLPMDFSCSTGAALRCRDSGCPDAYHQPNDPKTRSCNGNSNYQVVFCP

SEQ ID NO: 35499 - protein, 164 aa, Zea mays subsp. mays
NRKTIYVYRRGQDDVVLRLLPPARLLRHMRRRRHVHGTKQLRVHGVASRHPGRRRHAAEPGLDVDCQRAGRDQRRQDLGPHRLLLQRRPGPLRDGRLRRRLLLQPVRAAPGDAGGVHHRRRRQPRLLRYLGDRRLQPAHGLLVQHWRRPAVQGLRLPRRVPPAQ

SEQ ID NO: 35500 - DNA, 1370 bp, Zea mays subsp. mays
gagaccattacctagaacatcctaatcgaaaaactccaagtttcattccaaaccctcccccctctctcgacgcctcagctcctcccccttctctctcaactcctgctagctctctctcacacacactagccagccagcaagcaagctataggctcctcgcttccaagcgagaattccggcggcgctcctcaattttcacactccctaaccaaatcaggcgcacacctatacgcggccataccctcctccgccgatcccttctatatacgacgacgaggagatacacaccagccgcagccggcttctcgtcgtgcaccccaggagagatcgggagaatggagctgttcccagcgcacccggacttgcagctgcatatcagccctcccccagccacgaaaccaacggagctagggttctggaagagggctctagacaccaccccgactgcaactacaacggccgcggcggcggcggcggcggcggccaccacggccccctccctcgccttcgcgtcctcggcgccgacagccgtggggtaccacgcatcggcaggcgcgcaccaccaccatcaggtgccgacgacgagctcccactcccaactggtgggcctcccgttcttgcaccacacccagcccatcctcctcccggagggcggcggcggcggcctccgccgggacctggcctccgcgaggcccatccggggcatccccgtgtacaacgcctcgcagccgctcctccccttcctgcagagccacccgcagcaccaccaccaccacccgcattgccacgacgcgatcgtcggcgcggccgggccgaggttgtcccccaaggccgcgctccggctcgcggggaagcggggcgcgcgcgcgccccggatgcggtggacgacgtcgctgcacgcgcggttcgtccacgccgtcgagctgctcgggggccacgagagagctacgcccaagtcagttcttgagctaatggacgtgaaggatctgaccttggcccatgtcaagtcgcacttgcaggtgaggggggaacaatcgagcagctgtatagttagcatgacatgaattatatctgtccttgtactgtgtgtgtgtgtagtcggtttgcattatattgttcttgcacggccttgttctatatatatgctagctactcctacgtatgaatcctctagctcgttaacataaacacctgcttaactcttctttgtagtggtatttctttcttgtatcctaaacaaaagagcaagactagagtagtagctatatagacctcaatatgcaaagagagagagaaatgcagtgcgttttgtacgtactctacacacactctcatttcttgcacgataaagttgacctttaattttgtcc

SEQ ID NO: 35501 - protein, 353 aa, Zea mays subsp. mays
DHYLEHPNRKTPSFIPNPPPSLDASAPPPSLSTPASSLSHTLASQQASYRLLASKREFRRRSSIFTLPNQIRRTPIRGHTLLRRSLLYTTTRRYTPAAAGFSSCTPGEIGRMELFPAHPDLQLHISPPPATKPTELGFWKRALDTTPTATTTAAAAAAAAATTAPSLAFASSAPTAVGYHASAGAHHHHQVPTTSSHSQLVGLPFLHHTQPILLPEGGGGGLRRDLASARPIRGIPVYNASQPLLPFLQSHPQHHHHHPHCHDAIVGAAGPRLSPKAALRLAGKRGARAPRMRWTTSLHARFVHAVELLGGHERATPKSVLELMDVKDLTLAHVKSHLQVRGEQSSSCIVSMT

SEQ ID NO: 35502 - protein, 242 aa, Zea mays subsp. mays
MELFPAHPDLQLHISPPPATKPTELGFWKRALDTTPTATTTAAAAAAAAATTAPSLAFASSAPTAVGYHASAGAHHHHQVPTTSSHSQLVGLPFLHHTQPILLPEGGGGGLRRDLASARPIRGIPVYNASQPLLPFLQSHPQHHHHHPHCHDAIVGAAGPRLSPKAALRLAGKRGARAPRMRWTTSLHARFVHAVELLGGHERATPKSVLELMDVKDLTLAHVKSHLQVRGEQSSSCIVSMT

SEQ ID NO: 35503 - DNA, 1423 bp, Zea mays subsp. mays
  misc_feature (513)..(513): n is a, c, g, or t
aggaaggtattgaacctattgttcatctttgcgttcgtcgtttgcgtgaagaactttgtgacgaccatcggcctagcgtggcaacgacgcagcttcagagcgcccggcgaggcccggccatggcttggcatgcgcaggcacgcgcacgcgcgcacaggccaacccggccatggcactccggccccggcagcgggcgcaggcgcggcttcctggcggatggaccccgcgggcgcgtccagccacgacggcgcgggtgtgacccgaccacgggctcgggcgccggccatggcggcgcgggctcgtaccggccgcgagcggtgcaggacacggcgagccccggcgctgcccaggcaggggcaagcgggcccctcggccgcctaccggcgcgggcgcggccgtcctcagcctcggctcggtcggccctggtgcacggccggcctcagcctcgtccccggcgcgggtggcacggcgagccccgacgtgggcgcggcggcacggctagtcggcggcggntggatcgctccccccatggcacggctgcgagcgttgctcggccacctggcgcgggtgcgagcgctgctggcgctccggcgcaagggcgggctctccggcttctcggctcgggcgcaaacggtggcggcccggcagcgggcgcgaccggcctaagcctcggccactgcgcgggcgcagaggcgccctcggccggccccgacgtgggccctgctcgccctgggcggcacgaccagatctggctaggcgcgggcgcgtgcttctaggcagaggcagccgggcggcacttggcgtgctccttggtggtgtctccctgccggtgcgggcagtgcctcgacgcgagcacaagcgctgcccaaccacagcctactgcaacgcacatagtccatatgcgaggcgatcttggtgcgagcgcaacctcaagcaccactgaagcggagcgtaccgccgaagaagccgcgcgaacggatcgtgatgagcagtagtggcgagaaagctgctggtgccgcacctccgcggtaggcggcggcggcgtgagcatccatggaacggcttccgcgtccaacctgtttgcacaaatgtgagcagttcccagagcgctctccctccttgtcgtacgccctgcattccctgttgaagcatttttggttgctttgctttggtggtgtcaaacgagatggcttaagcagaagaatcttggcacaactaagcagacttcgtacgataatctgtagttttttttaggcaaaacaactatgtgtttcattttttccctacagtttctagtacaagatcttttgattgttgagttactgttttaattattgttagtgcgtctaaatttaaatatttagactactaatgatatatgtaactgtacatagttgtctattttcaattttgaaaaatgctg

SEQ ID NO: 35504 - protein, 257 aa, Zea mays subsp. mays
  misc_feature (171)..(171): Xaa can be any naturally occurring amino acid
EGIEPIVHLCVRRLREELCDDHRPSVATTQLQSARRGPAMAWHAQARARAHRPTRPWHSGPGSGRRRGFLADGPRGRVQPRRRGCDPTTGSGAGHGGAGSYRPRAVQDTASPGAAQAGASGPLGRLPARARPSSASARSALVHGRPQPRPRRGWHGEPRRGRGGTASRRRXDRSPHGTAASVARPPGAGASAAGAPAQGRALRLLGSGANGGGPAAGATGLSLGHCAGAEAPSAGPDVGPARPGRHDQIWLGAGACF

SEQ ID NO: 35505 - protein, 221 aa, Zea mays subsp. mays
  misc_feature (171)..(171): Xaa can be any naturally occurring amino acid
RKVLNLLFIFAFVVCVKNFVTTIGLAWQRRSFRAPGEARPWLGMRRHAHARTGQPGHGTPAPAAGAGAASWRMDPAGASSHDGAGVTRPRARAPAMAARARTGRERCRTRRAPALPRQGQAGPSAAYRRGRGRPQPRLGRPWCTAGLSLVPGAGGTASPDVGAAARLVGGXWIAPPMARLRALLGHLARVRALLALRRKGGLSGFSARAQTVAARQRARPA

SEQ ID NO: 35506 - protein, 218 aa, Zea mays subsp. mays
  misc_feature (132)..(132): Xaa can be any naturally occurring amino acid
MAWHAQARARAHRPTRPWHSGPGSGRRRGFLADGPRGRVQPRRRGCDPTTGSGAGHGGAGSYRPRAVQDTASPGAAQAGASGPLGRLPARARPSSASARSALVHGRPQPRPRRGWHGEPRRGRGGTASRRRXDRSPHGTAASVARPPGAGASAAGAPAQGRALRLLGSGANGGGPAAGATGLSLGHCAGAEAPSAGPDVGPARPGRHDQIWLGAGACF

SEQ ID NO: 35507 - DNA, 1272 bp, Zea mays subsp. mays
atccatcagtgtggactgtcgaaccgggggatgggttgggacgttgggtcctggtccacgtgaccacgtctagcagtagcaggctctcgaaactcacgttcccgtgtcgctcaactggcacaggactggaccccgtcccgtacggcatcgcaccccgcagccgcaggccgcatcttcctcgcgtgctctgccctctgtgcctgcccattcgttgatcccatcggcttccccttcctcttccccgatccccttcctcccccgatcccatccaattccacttccacaccccgggcctcgccgccgacgccgacgccgacgccgccggccatgtccaagtacggcaccattcccacctcctcctccgcgggcggagggcccgtgcccctcggcggcgcctccccgctcgatttcatctcccgcgccaaggctcggggcgcctcggcgctggcgacgcgccggccctggcgcgagctcgtggacgtccacgccgtcggcctgcccccgagcctcggcgacgcgtacctccgcgtgcgcgccaacctcgcccacttcgccatgaactacgccatcgtcgtcctcgtcgtcgtcttcctctccctcctctggcaccccgtctccctcatcgtcttcctcgtctgcatgctcgcctggctcgtcctctacttcctccgcgacgagcccctcgtcctcttcggccgcgtcgtcgccgacggctacgtccttgccgtgctcgccgtcgtcacgctcgtcctgctgctcctcaccgacgccactgccaacatcctctcctcgctgctcatcggcctcgtcctcgtcctcgtccacgccgcgctgcacaaggcggaggacaacgccgccgacgaggccgaccgctggtacgcgccggtgtcacagcagccgtcgcactgaggatctgaatgtggccattcggcgccttggctgtgatcctattctgtactgtttccgagttcctccagctgcgcaagctgggccatccccatctcatctgcgatgaaaaccctgtccttgttgattgtgattcacttgctgccggttccatgggaagttttggatccagcgatgacgcagggctgttaaacttgttctccacgcccagcccatttctgtgatacgtttaaagcgtctcgttcacgtgtatcaaatccggactgaagtctagtgtacattttgagttggagaaatgtgatgccagggacctgcattcagattttatcgacgccatgcatgtaggcaagcgatgctgatatttct

SEQ ID NO: 35508 - protein, 193 aa, Zea mays subsp. mays
MSKYGTIPTSSSAGGGPVPLGGASPLDFISRAKARGASALATRRPWRELVDVHAVGLPPSLGDAYLRVRANLAHFAMNYAIVVLVVVFLSLLWHPVSLIVFLVCMLAWLVLYFLRDEPLVLFGRVVADGYVLAVLAVVTLVLLLLTDATANILSSLLIGLVLVLVHAALHKAEDNAADEADRWYAPVSQQPSH

SEQ ID NO: 35509 - protein, 117 aa, Zea mays subsp. mays
MNYAIVVLVVVFLSLLWHPVSLIVFLVCMLAWLVLYFLRDEPLVLFGRVVADGYVLAVLAVVTLVLLLLTDATANILSSLLIGLVLVLVHAALHKAEDNAADEADRWYAPVSQQPSH

SEQ ID NO: 35510 - DNA, 751 bp, Zea mays subsp. mays
tcgctgcgactccgcctcatcgccaccctctcttcacaccccacaggccaagccagccgcaccgcgccgcaccgcattttggacatggcgtcgtcctcctgcctcgcctcgccgtctggcgccacgctctgccgcccgcggcggccgaggtgccgcgtggcgtgctcggcggccgacgccggcgggagcaccgggccggcgtgggccaagggcgcgggccgcctcgcgtgcggcgtgctggcggcttggtccgtcgcgtccgcgtccaatccggtcattgccgcgagccagagattgcctccactctcaacggagccaaaccgatgcgagcgcgcattcgtggggaacacaattggccaggcaaacggggtgtacgacaagccccttgatctccggttctgtgattacacgaacgagaaaaccaatctaaagggcaagtctttagctgcagcgctgatgtccgaggcaaagttcgacggcgctgacatgtctgaagttgtcatgtccaaagcttatgctgttggtgcaagtttcaaaggaaccgacttcacaaatgcagtgatagaccgcgtcaattttgagaaggccgatctcacaggggcgatcttcaagaacacggtcttgtcaggatcgaccttcgatgatgcaaagatggacgatgtcgtgtttgaggacacgatcatcggctacattgaccttcagaagctatgcacgaacaccagtatcagcccagatgcgagattggagctgg

SEQ ID NO: 35511 - protein, 250 aa, Zea mays subsp. mays
SLRLRLIATLSSHPTGQASRTAPHRILDMASSSCLASPSGATLCRPRRPRCRVACSAADAGGSTGPAWAKGAGRLACGVLAAWSVASASNPVIAASQRLPPLSTEPNRCERAFVGNTIGQANGVYDKPLDLRFCDYTNEKTNLKGKSLAAALMSEAKFDGADMSEVVMSKAYAVGASFKGTDFTNAVIDRVNFEKADLTGAIFKNTVLSGSTFDDAKMDDVVFEDTIIGYIDLQKLCTNTSISPDARLEL

SEQ ID NO: 35512 - protein, 222 aa, Zea mays subsp. mays
MASSSCLASPSGATLCRPRRPRCRVACSAADAGGSTGPAWAKGAGRLACGVLAAWSVASASNPVIAASQRLPPLSTEPNRCERAFVGNTIGQANGVYDKPLDLRFCDYTNEKTNLKGKSLAAALMSEAKFDGADMSEVVMSKAYAVGASFKGTDFTNAVIDRVNFEKADLTGAIFKNTVLSGSTFDDAKMDDVVFEDTIIGYIDLQKLCTNTSISPDARLEL

SEQ ID NO: 35513 - protein, 142 aa, Zea mays subsp. mays
RCDSASSPPSLHTPQAKPAAPRRTAFWTWRRPPASPRRLAPRSAARGGRGAAWRARRPTPAGAPGRRGPRARAASRAACWRLGPSRPRPIRSLPRARDCLHSQRSQTDASAHSWGTQLARQTGCTTSPLISGSVITRTRKPI

SEQ ID NO: 35514 - DNA, 1217 bp, Zea mays subsp. mays
gcacgagaccattacctagaacatcctaatcgaaaagattcccccaatcccgcacccgcacacccaactcgcaatccctagcactagcaccgccgcggcggcaggcaggcagggggggggggggggtgggggtgccggaggccgctcgtagcacggaaggtctccggatcgatccatggagcgcgcgaggagggcttcgcacgccggctcttggtacaccaacgatgccaggaagctggaagaggaactcaatggttggctgggggcagccggtctaaccaagtctcctgatgttagggcagtaattgcaccccacgctggttattcatactcgggccgatgtgcagcttatgcttttgggcaacatcgatccaactaacatttctcgcgtgtttctgcttggcccttctcatcactactacactccaaaatgtgctttaaccagggcttctgtctactgtaccccaattggggatttgccagtagaccaggaagtcatcgaggaactcagtgctactggaaagtttgaatttatggaccttaatgtggatgaagctgaacatagcatggaaatgcatttgccctaccttgctaaagtatttcaaggacataatgtgaaagtcgtccctatccttgttggtgcacttagctcccaaaacgaagccttgtatgggcagctgctctccaaatatgtggatgacccaaaaaacttcttttccgtgtcgtcagacttctgccattggggatccaggtttagctacacttactacgaaaagaagcacggtgccatccataaatctatcgaggccttggaccgtatgggcatggagatcatagagactggcgatcccgtagcgttcaaagaatacctgcaagagtacgagaacaccatatgcggacgccaccccatcagcgtcttccttcacatgttgaaacattgctcgacaaaaattaagataggctttgtccgctacgagcagtccagtcagtgcaagaacatgagggatagcagcgtgagctatgcatccgcagcagcgaaggttgctggtgcatccggggaagaagataaacaagactgagcgagctacggctctgcttgatgtactatatataagccgccaaaccttggtgcggaacgtgtgactggtttcccataaaaaaaagaacatgtgatttggtaaaacattttcttcttcagtaaaaataaataaatatgc

SEQ ID NO: 35515 - protein, 242 aa, Zea mays subsp. mays
MLLGNIDPTNISRVFLLGPSHHYYTPKCALTRASVYCTPIGDLPVDQEVIEELSATGKFEFMDLNVDEAEHSMEMHLPYLAKVFQGHNVKVVPILVGALSSQNEALYGQLLSKYVDDPKNFFSVSSDFCHWGSRFSYTYYEKKHGAIHKSIEALDRMGMEIIETGDPVAFKEYLQEYENTICGRHPISVFLHMLKHCSTKIKIGFVRYEQSSQCKNMRDSSVSYASAAAKVAGASGEEDKQD

SEQ ID NO: 35516 - protein, 181 aa, Zea mays subsp. mays
MDLNVDEAEHSMEMHLPYLAKVFQGHNVKVVPILVGALSSQNEALYGQLLSKYVDDPKNFFSVSSDFCHWGSRFSYTYYEKKHGAIHKSIEALDRMGMEIIETGDPVAFKEYLQEYENTICGRHPISVFLHMLKHCSTKIKIGFVRYEQSSQCKNMRDSSVSYASAAAKVAGASGEEDKQD

SEQ ID NO: 35517 - protein, 170 aa, Zea mays subsp. mays
MEMHLPYLAKVFQGHNVKVVPILVGALSSQNEALYGQLLSKYVDDPKNFFSVSSDFCHWGSRFSYTYYEKKHGAIHKSIEALDRMGMEIIETGDPVAFKEYLQEYENTICGRHPISVFLHMLKHCSTKIKIGFVRYEQSSQCKNMRDSSVSYASAAAKVAGASGEEDKQD

SEQ ID NO: 35518 - DNA, 836 bp, Zea mays subsp. mays
cctagaacatcctaatcgaaaaagtcccaactcccaactcgcactcgcccaacctcgaatgccaagctagcaagagaggcctcgatcgcagaacccagcggcaaagcaagcacgcccgtgtctacaggcagctctttccatatggcgcccaaggcggcggagcaggagcgcgcggcggcggagcaggggcaggagcagccgaggctccgcggcgtgcggaagcggccgtggggcaggtacgcggcggagatccgggaccccgtgaggaaggcgcgcgtgtggctcggcaccttcgacacgcccgagcaggccgctcgtgcctacgacgccgccgcgcgcaggctccgcgggccgcgcgccaccaccaactaccccggcgacgtcgtccgagaagcgccgtgcacggccccggctctggctgcgagcgcgagcggcagcaccgagtcgtcgtcgtcgtcgtcgtcaagggacgacggccacccgccaccgccgctgcctacggcgccgtcgtcgctcggcctgggcctcgggctcttcccggcgacggtggccacccagccgtgcctgttcctggacccggcgccggtggagagggaggaaggggagcgggagcggagctgctgctcccggtcgccgccgtcggtctggcgggcctcgggttcgacttcgacctcaacctgcctccgcccgccgagatggtcatgtagcgttggagatagtaattctagcaaaaagggattgtgtagtagtagtgtagtactagctagccagtttgcctgtgcactagccactagccaatttgcgacttcgcaatgcaaatcaagaaatcgacggcc

SEQ ID NO: 35519 - protein, 231 aa, Zea mays subsp. mays
MAPKAAEQERAAAEQGQEQPRLRGVRKRPWGRYAAEIRDPVRKARVWLGTFDTPEQAARAYDAAARRLRGPRATTNYPGDVVREAPCTAPALAASASGSTESSSSSSSRDDGHPPPPLPTAPSSLGLGLGLFPATVATQPCLFLDPAPVEREEGERERSCCSRSPPSVWRASGSTSTSTCLRPPRWSCSVGDSNSSKKGLCSSSVVLASQFACALATSQFATSQCKSRNRR

SEQ ID NO: 35520 - DNA, 824 bp, Zea mays subsp. mays
actgttgttctgttccgtgattgcggaatttgcttcaccacaccttcatcagagagccgagacgacacgctcgggacccagcaaggcaagaagaacacgagagagatagcaggcaccaggcagggatcaatcatccgtccatggagaacctaaaggagcggggacacgacgcggcgggcgccaacgcctggatgacggtgccggcgttcggggactgggacacgaagaacggcgcgctgccggactactccatggacttctccaagatccgcgagatgcgcaagcagaacaagaaggagctctcccgcgccagcctcggcggcgacgacgacctcctcgcccacgcccaggcccaggccctgaagccgcaggccagtaacgccccgcccaagctcggccgcccccgccccggccccgccgacgaccactccccaacgggagggaagaagttcctgagctacttccggtgttgtatcaaggcctgaagaggtgctgctctagtgcctgcagtccctgtgtttttttttcgcagcagaacacttgtgagcaatcaggcatcggttttgttaagtactccctccgtttctttttatttgtcgctagatagtgtaaaattgcactattcagcgacaaataaaaagaaacggagggagtactccgtgtccaaaaacgtgtaatatatttgtccttatggatcagtcgttgggcctgtatgaagaacagaccagcttatggggtaagcaacgttctttttgtacacacaaatcaccatcgatttgtccttgatacgatcaaggggcatggttcgaatgaattggttttgt

SEQ ID NO: 35521 - protein, 114 aa, Zea mays subsp. mays
MENLKERGHDAAGANAWMTVPAFGDWDTKNGALPDYSMDFSKIREMRKQNKKELSRASLGGDDDLLAHAQAQALKPQASNAPPKLGRPRPGPADDHSPTGGKKFLSYFRCCIKA

SEQ ID NO: 35522 - protein, 97 aa, Zea mays subsp. mays
MTVPAFGDWDTKNGALPDYSMDFSKIREMRKQNKKELSRASLGGDDDLLAHAQAQALKPQASNAPPKLGRPRPGPADDHSPTGGKKFLSYFRCCIKA

SEQ ID NO: 35523 - protein, 77 aa, Zea mays subsp. mays
MDFSKIREMRKQNKKELSRASLGGDDDLLAHAQAQALKPQASNAPPKLGRPRPGPADDHSPTGGKKFLSYFRCCIKA

SEQ ID NO: 35524 - DNA, 1227 bp, Zea mays subsp. mays
aacatcaaagaagaaccggaagaaggagaaagaagtggcagagagtgttcctgtaaagcctaaaaaggaaaataggcttttggttctgccttttgaattatctgttatgggtattttattgctcatcgtattaggtggtttctatgtggtccattgtgtatgggcggcagctgaagcgtactccgcgccttcaattgtgttgacatctcgttcacgagatgggttgcatgtttttgatgatttccgtgaagcttacgcatggctgagccataacacagatgttgatgacaaggttgcttcctggtgggactatggttaccaaacaactgcaatggccaacagaactgtgattgtagacaataacacctggaacaacactcatatagcaacagttggtacagcaatgtcgtccccagaaaaagcagcttgggaaatcttcaattctttagatgtcaaatatgtgcttgttgtctttggaggacttgttggataccctagcgatgatatcaataagttcctttggatggtacgaataggaggtggtgtgttccctcacattaaggagccagattatcttgcaatgttatctgcagagggatggtcaatatcgcgttgatgctcaagccactccaactatgctgaattgcctcatgtacaagctttgttactacaggtttgtggagactgatggaaaaggctttgacagagtaagaggatatgaaataggaaagaagcatttcaagctaacacattttgaggaggtatttacaacccaccattggatggtccgcatatataaactgaaaccccagaagaacagggttcgaggcaagctgaagaagttgaaggccagtgccaaaaactagtcccacacttgcggcagggcgaaagaacccgtggcaataggtgaagttaccaatagtgccatttacctgatactttgttggtagatcaagtgcgctaggttggtgaaccagaaaactacagaactagattagagatctggactattgtattggaccctcgttatatgttctcccaaccggccgggtgctgatgaaatttttgatagaccagaggagtttatcaatcccatgggtttgagattggatggcggcgataattttctagtgacaggggttgtttaagactacctgttacttgctgttttgtgtaacctacaatttttcttacaaggtacttctctactggggtgatagtgagtgc

SEQ ID NO: 35525 - protein, 204 aa, Zea mays subsp. mays
TSKKNRKKEKEVAESVPVKPKKENRLLVLPFELSVMGILLLIVLGGFYVVHCVWAAAEAYSAPSIVLTSRSRDGLHVFDDFREAYAWLSHNTDVDDKVASWWDYGYQTTAMANRTVIVDNNTWNNTHIATVGTAMSSPEKAAWEIFNSLDVKYVLVVFGGLVGYPSDDINKFLWMVRIGGGVFPHIKEPDYLAMLSAEGWSISR

SEQ ID NO: 35526 - protein, 169 aa, Zea mays subsp. mays
MGILLLIVLGGFYVVHCVWAAAEAYSAPSIVLTSRSRDGLHVFDDFREAYAWLSHNTDVDDKVASWWDYGYQTTAMANRTVIVDNNTWNNTHIATVGTAMSSPEKAAWEIFNSLDVKYVLVVFGGLVGYPSDDINKFLWMVRIGGGVFPHIKEPDYLAMLSAEGWSISR

SEQ ID NO: 35527 - DNA, 1838 bp, Zea mays subsp. mays
gcacgagaccattacctagaacatcctaatcgaaaaaaaaataaagccgaggcagagcatcgaccgttgcacgcagccctaccccaaccacagagagaatcggaaaagcagggatcgcagccggaaagcgaaaagcttaaaagaggcggcgcatcacgttgggcgcctctctttgctcccccatttttttccccttcttggcttgatcgatggcagcgcagcagcaggtcgcctccgtgctgcagagcttcccgttcagggcggccgtgctcacgctctgcgtcgcgctgctgccgctcctccccacgcaggcgccggacgtcggggccgggggacccggccaggagttcctcgccaaagtgtgggagctgctgcacctgctgttcgtcggcatcgccgtctcgtacggcctcttcagccgcaggaacagcgccgacgatggacgcgccggggccgtcgcagtcgcagctgaaacagagaagcacgctgccgcggggccggaacctgccaaggccgacgcgaggtacgcgtggcggatgttcagggactcgatcccgccgttcgatgacgatgacgaagacgacgtgctggtgccggacagccctcccggcggcggcgggggtggtagggcgcgctcgtggagagcgccgcaccggcccgttgagcccgttgtcgtcgtgtccaccggtggcggcggggatcggatcgggcaggccgcggacgcgcaggcgccgctgtctctgcccgtccggacgctgaaagcgcagcaggaacaggacgccagcgcgggggctgtcgagacgccgcgtgcgcggcggcgtcggagctctcaggacttggcggccggctgcgcccgcgacgagaccgtgctcgcttcgccgatcccgtggcggtcgcggtccgggaagctcgacgcgcgccgacccgcgtcgccgagctccacggcgtcacccaggaggctgtccccggcgtcgtccttgtccggggagacgctggccaaggccagcgaggaggagtactacgccaaggccaagcggagcagcccgtacaggtcatcttccatctcctcaccgccgcctccgcctccacctccgcctccgttccttgtccacggttaccacccggcgaccgagcgccgtgcggcggcagcgaaaagctttaaggaggagctgcagcaccacagcatgagaggccaaggagaagatcactactcgccgaagacgagcagcatcagcatctccgcttacaacagcagcaactcctccccagcgaagccaagaagctcttttgacggcggcttctcctcgtcggtttcggttggcaagtcagtgagaacgttcagggcaagggaggcagcagtttttcaagaccaaaaccaagaactccccgacggcgccggtgatgatcgtgacgtgctggatgtgcacgggtcagaggagccgtacggctacagagcttatcagtccattcacaggttccagtacgagagatcagggagcgaccctatcctaggcggtgtggtagtctcctcggatgagaccgagagcagtgacgacgacgacgatagcggcggcggcgggtattcgacgagggagtcgacgccggaggtggacgaaaacgaggtggacaagaaggcggaggagttcatcgccaggttcagggagcagatcaggcggcagagaatcgagtccattaagaagtccgcggggtcgcgcggcgtcaagcaccacggcaagtagatcgccggccggctggtatgttttgggtcgtttggttcacataacgggctaaatcatgtgtttttaagttcaacactacaaatggatattggtctattc

SEQ ID NO: 35528 - protein, 509 aa, Zea mays subsp. mays
MAAQQQVASVLQSFPFRAAVLTLCVALLPLLPTQAPDVGAGGPGQEFLAKVWELLHLLFVGIAVSYGLFSRRNSADDGRAGAVAVAAETEKHAAAGPEPAKADARYAWRMFRDSIPPFDDDDEDDVLVPDSPPGGGGGGRARSWRAPHRPVEPVVVVSTGGGGDRIGQAADAQAPLSLPVRTLKAQQEQDASAGAVETPRARRRRSSQDLAAGCARDETVLASPIPWRSRSGKLDARRPASPSSTASPRRLSPASSLSGETLAKASEEEYYAKAKRSSPYRSSSISSPPPPPPPPPPFLVHGYHPATERRAAAAKSFKEELQHHSMRGQGEDHYSPKTSSISISAYNSSNSSPAKPRSSFDGGFSSSVSVGKSVRTFRAREAAVFQDQNQELPDGAGDDRDVLDVHGSEEPYGYRAYQSIHRFQYERSGSDPILGGVVVSSDETESSDDDDDSGGGGYSTRESTPEVDENEVDKKAEEFIARFREQIRRQRIESIKKSAGSRGVKHHGK

SEQ ID NO: 35529 - protein, 400 aa, Zea mays subsp. mays
MFRDSIPPFDDDDEDDVLVPDSPPGGGGGGRARSWRAPHRPVEPVVVVSTGGGGDRIGQAADAQAPLSLPVRTLKAQQEQDASAGAVETPRARRRRSSQDLAAGCARDETVLASPIPWRSRSGKLDARRPASPSSTASPRRLSPASSLSGETLAKASEEEYYAKAKRSSPYRSSSISSPPPPPPPPPPFLVHGYHPATERRAAAAKSFKEELQHHSMRGQGEDHYSPKTSSISISAYNSSNSSPAKPRSSFDGGFSSSVSVGKSVRTFRAREAAVFQDQNQELPDGAGDDRDVLDVHGSEEPYGYRAYQSIHRFQYERSGSDPILGGVVVSSDETESSDDDDDSGGGGYSTRESTPEVDENEVDKKAEEFIARFREQIRRQRIESIKKSAGSRGVKHHGK

SEQ ID NO: 35530 - DNA, 1600 bp, Zea mays subsp. mays
gtcgtcggtaatatctcgagccatccggcaccaaatcttcctccacgccgccggctgcccggcgcccacaggatacagtccagagaaatgccggccaccgccgcccagccaggtgcaacccctcggtccgcaatccgcttcctccgcctccgcagcacccaaacctcaaacctcgccatccccacgcgcactgctgcgcccccgcacgcgcgcctccgctgccacctttcccgctccagtgattccactccaccctcaccccccaccacccccgaccccgaccccgaccccgaccctgaccctgaatccgaatccgaatccgaagataccctacgcttcgccttcgcgtgtggtggcgcgggcgccggtggtcgcgtttactccgccatcgcgctcgccgacgagcttcacgcctcgctgccgtcctctcgttccctcattatcggtgcgcccgccccgtccttagagtcctcagctgccgccgcggcctcgtacccgttcgcccccgtcccactgcactgcctcccgcgcgggatcctcgccgcggcgctgcacctccgccgattccgcccgcacgtccttgttgctacaggaggcgctcccgcgctacaggcctgcctcgcggcgctcatgctccgcctccccttcgtgatccaggaccaggacgcctctccggctcccgccacacgcctactcgctcccttcgcccgccgcattttcctcgccttcaatgctcccgtgcggctcctccccaaacgcaggtgcgcggtctacgggaaccccatccgcatgtccatcctcaagtgcagagcatccaagactgaggccttggcgcgcttcttcccgagagcggggttattgggcgaacacgaggcccaggtcgtgctcgtgcttgggggagcggaggggtcgccggagatcaatgtggcggtgctcaacgtctactacgagttgctgaggaggaataaggatcggtacattatatggcagacggggacggagactttctgcgagatggagagcctcgtcaaaggccatcgccggctttttcttaccccgttcttgcatgaactggaaatggcatatgctgcctgtgatgttgtaatttctcgagctggtgccatgacgtgcaccgagatattggccactgggaaaccatcaattctgataccattgccaacaattctggaccatcaccaaacgagaaatgcatatatcatggctgatatcatgggagcaatggtcatcactgaagatgaacttgattctagcagtctcacatctgcagttgatgaaatttttggtgatgaaaaattgatggcagacatgtctcagaaggcactaactgcagcccgaccaaatgcttcagctgatataatccgccacatatgttcattgattggttcaacctacccatcatgaaactggttttagacattgcaaagagttcatgtcatgaacacattttgtattgtttttttttgagcaaccgcatcatgtcatgtttttcttgaggtggaaactgatgtttaattccatcatgacagtgcagtttgcgcctgcttccaggtagcgttcaattggctattcttcacatccg

SEQ ID NO: 35531 - protein, 473 aa, Zea mays subsp. mays
VVGNISSHPAPNLPPRRRLPGAHRIQSREMPATAAQPGATPRSAIRFLRLRSTQTSNLAIPTRTAAPPHARLRCHLSRSSDSTPPSPPTTPDPDPDPDPDPESESESEDTLRFAFACGGAGAGGRVYSAIALADELHASLPSSRSLIIGAPAPSLESSAAAAASYPFAPVPLHCLPRGILAAALHLRRFRPHVLVATGGAPALQACLAALMLRLPFVIQDQDASPAPATRLLAPFARRIFLAFNAPVRLLPKRRCAVYGNPIRMSILKCRASKTEALARFFPRAGLLGEHEAQVVLVLGGAEGSPEINVAVLNVYYELLRRNKDRYIIWQTGTETFCEMESLVKGHRRLFLTPFLHELEMAYAACDVVISRAGAMTCTEILATGKPSILIPLPTILDHHQTRNAYIMADIMGAMVITEDELDSSSLTSAVDEIFGDEKLMADMSQKALTAARPNASADIIRHICSLIGSTYPS

SEQ ID NO: 35532 - protein, 444 aa, Zea mays subsp. mays
MPATAAQPGATPRSAIRFLRLRSTQTSNLAIPTRTAAPPHARLRCHLSRSSDSTPPSPPTTPDPDPDPDPDPESESESEDTLRFAFACGGAGAGGRVYSAIALADELHASLPSSRSLIIGAPAPSLESSAAAAASYPFAPVPLHCLPRGILAAALHLRRFRPHVLVATGGAPALQACLAALMLRLPFVIQDQDASPAPATRLLAPFARRIFLAFNAPVRLLPKRRCAVYGNPIRMSILKCRASKTEALARFFPRAGLLGEHEAQVVLVLGGAEGSPEINVAVLNVYYELLRRNKDRYIIWQTGTETFCEMESLVKGHRRLFLTPFLHELEMAYAACDVVISRAGAMTCTEILATGKPSILIPLPTILDHHQTRNAYIMADIMGAMVITEDELDSSSLTSAVDEIFGDEKLMADMSQKALTAARPNASADIIRHICSLIGSTYPS

SEQ ID NO: 35533 - protein, 263 aa, Zea mays subsp. mays
MLRLPFVIQDQDASPAPATRLLAPFARRIFLAFNAPVRLLPKRRCAVYGNPIRMSILKCRASKTEALARFFPRAGLLGEHEAQVVLVLGGAEGSPEINVAVLNVYYELLRRNKDRYIIWQTGTETFCEMESLVKGHRRLFLTPFLHELEMAYAACDVVISRAGAMTCTEILATGKPSILIPLPTILDHHQTRNAYIMADIMGAMVITEDELDSSSLTSAVDEIFGDEKLMADMSQKALTAARPNASADIIRHICSLIGSTYPS

SEQ ID NO: 35534 - DNA, 1016 bp, Zea mays subsp. mays
cataggttgctaggctcggccgtgtagagcagcaagagcacgccgcgccaagcaacaaagagggaccccgcttccatggaggtggtgggcggcgtgtcgctgaggccgtcgccagcgccggcgcgtatccggactaccctgccacccgtcgacgtaggcggacgcttccttctccgccgggtcgcggggcgccagccggcgaggcgcgcgctggtcgtggaggcccggggcggcaggggctggtcggagcggcagatgcagcagcagcgccgcgcgccgctgctgccgaaaatcgaggacgacggcaacccgcgattcgtcatcttcatccgcaccgccaatgtctacttctggtacccgctcaacatcatcacgggcggtacgacggcgaagatcatgctcgccgccaaggacaacttcctcggcaagtacatctacaaggacacgctcgccaggaacctcgccgccgtcatttacaaagacgaggacgtgatcatagacacagcgaaagagcagtaccgtgtgctcaagaccgaaaatcagtttcggtatggctacaaagttgtggagaaagggaacataaggtctgctctgacgacaagcaatgtgatcgaacttccaaagaaggacgagctcaaaaccgtggttgacaaggtgaaggacttctttggcgacgtgactgccggcgccaaagaatcctttgcgcagataacagggtctgctgtcagcaaggaggaagaggaagcagagagcaaagagaagttccgctccaagagacgaaagaagcagcggaagtcgaaggagggcctcaagacggagaaatgattcagtcagtcacacaagtaaagcaccggctgtagtttcgctatcgatgtccgagaactgttctgtaatttctccagcttccttttttttgtttgttttgtaaaaagacgtcgtgtaacttcattgcgactaacgtgtgctatgccttctcagtaaatctcacaaaatgtgaaggtactccctacgttctc

SEQ ID NO: 35535 - protein, 249 aa, Zea mays subsp. mays
MEVVGGVSLRPSPAPARIRTTLPPVDVGGRFLLRRVAGRQPARRALVVEARGGRGWSERQMQQQRRAPLLPKIEDDGNPRFVIFIRTANVYFWYPLNIITGGTTAKIMLAAKDNFLGKYIYKDTLARNLAAVIYKDEDVIIDTAKEQYRVLKTENQFRYGYKVVEKGNIRSALTTSNVIELPKKDELKTVVDKVKDFFGDVTAGAKESFAQITGSAVSKEEEEAESKEKFRSKRRKKQRKSKEGLKTEK

SEQ ID NO: 35536 - protein, 189 aa, Zea mays subsp. mays
MQQQRRAPLLPKIEDDGNPRFVIFIRTANVYFWYPLNIITGGTTAKIMLAAKDNFLGKYIYKDTLARNLAAVIYKDEDVIIDTAKEQYRVLKTENQFRYGYKVVEKGNIRSALTTSNVIELPKKDELKTVVDKVKDFFGDVTAGAKESFAQITGSAVSKEEEEAESKEKFRSKRRKKQRKSKEGLKTEK

SEQ ID NO: 35537 - protein, 142 aa, Zea mays subsp. mays
MLAAKDNFLGKYIYKDTLARNLAAVIYKDEDVIIDTAKEQYRVLKTENQFRYGYKVVEKGNIRSALTTSNVIELPKKDELKTVVDKVKDFFGDVTAGAKESFAQITGSAVSKEEEEAESKEKFRSKRRKKQRKSKEGLKTEK

SEQ ID NO: 35538 - DNA, 1545 bp, Zea mays subsp. mays
gcctcctccagtcctgctcgctccccacctctcatggcggcgccggcggccacccgcctccactccccgttcctcctgcttccttccccaccgcacccccacccttcacttcgcctccgcttcctcctgccgtccccgccgccgctccgcctccgccgccacttcccgctgctggctgccgccgccgtatccgccgcagccggcgccggcggtggcggggaggaggtcgccgctaggaaggacgacaaggccaggcagctgcagaagcgggtcctcgtgggcgtcgccatcggggtgggcgccggcggcatcgtggtcgccggcggccgggtgttcgccgccgccgtcgcggccgccgttcttgccggctcccgggagtacttcgagctcgtccgcagcactgtagccggaggcgggaccccgccgccgcgctacgtgtcccgcgtctgttccgccatctgcgctctcatgcccatccttacgctgtactatggacgcatggatgttactgtggcgttttctgcattcgtcattgcaatagcattgccttttacaaagaggaaaccctcgttttgctcagctaactagttcagttttcgggttattttactgcggttatctaccttctttctgggttaagcttcgatccggactagctgcccctgccttaaatacaagcatagcatacaattggccaattcttcttggtggacaagctcactggacagttggacttgtagcaaccttgatggctattagtagcatcattgctgctgatacatctgctttcctttgtggaagggcatttggtcgtacccctttgactaacataagccctaagaagaccttggagggtgctttagctggcctagctggctgcgtactgaccactgtgctgctgtcgactgccttacgctggccaaggtcgcttttgagtgccacagcttatggaatcctgatcttcctgggttcgttattcggggatcttgttgaatctctgatcaagcgcgacgctggtgtgaaggactccggatcgctcattcctggtcatggtgggattcttgaccgagttgacagctacgttttcacgggggcactttgctactcttttgtcagagtggctctacccctgtacggggtctgattagagcaccggccttcttgttgttttgcctttctccttccatcagcaatgcggtcagtcaccatacattttaacatgcaacgatgagtatttgctgggatgccctagatcagttcttcatctcaagacaacgtggtcttccctccaagcgaatttggtggccactagctcgtcatcgacattgcttcttgctttgggtttgagatggcctttccagctcaaccagtttcttgcaagccttgtaactctgtgtgtacatagtttattttttcatatagagagagagtaaaaaggaaaggctaattattcatcacaaaagctgttaacagtgcattgaggcagcttatgtcaatatgtaccaaactacacttgttttaataattcaaggcaccaaattcccc

SEQ ID NO: 35539 - protein, 195 aa, Zea mays subsp. mays
ASSSPARSPPLMAAPAATRLHSPFLLLPSPPHPHPSLRLRFLLPSPPPLRLRRHFPLLAAAAVSAAAGAGGGGEEVAARKDDKARQLQKRVLVGVAIGVGAGGIVVAGGRVFAAAVAAAVLAGSREYFELVRSTVAGGGTPPPRYVSRVCSAICALMPILTLYYGRMDVTVAFSAFVIAIALPFTKRKPSFCSAN

SEQ ID NO: 35540 - protein, 184 aa, Zea mays subsp. mays
MAAPAATRLHSPFLLLPSPPHPHPSLRLRFLLPSPPPLRLRRHFPLLAAAAVSAAAGAGGGGEEVAARKDDKARQLQKRVLVGVAIGVGAGGIVVAGGRVFAAAVAAAVLAGSREYFELVRSTVAGGGTPPPRYVSRVCSAICALMPILTLYYGRMDVTVAFSAFVIAIALPFTKRKPSFCSAN

SEQ ID NO: 35541 - protein, 134 aa, Zea mays subsp. mays
PPPVLLAPHLSWRRRRPPASTPRSSCFLPHRTPTLHFASASSCRPRRRSASAATSRCWLPPPYPPQPAPAVAGRRSPLGRTTRPGSCRSGSSWASPSGWAPAASWSPAAGCSPPPSRPPFLPAPGSTSSSSAAL

SEQ ID NO: 35542 - DNA, 1781 bp, Zea mays subsp. mays
gaaaactcagcaaccgtgctcggttcctcctccctcgaaacggctcccacccccgcgccgcgataagaaaacccaccaaaccctaaccctagcagcggtgccacaaccgcccgcgttcccggccggagaggaagccgagccagcaaggatgccgcccgggtcggcgacgcaatttcggtacacgcagacgccgtccaaggtgctgcatcttcggaacatgccatgggagtgcaccgaggaggagctcgtcgacctctgcaaaccctttggccgggtcgtaaacaccatgtgcaacgtcggcgctaaccgcaaccaggcattcgtcgagtttgcagatcaaaaccaggcaatttcaatggtgtcctattatgcttcatcttcagaacctgctcaagttcgtggtaaaactgtatatatccaatattcaaacaggcaagaaattactaacaataaaggcactggggattcttctggcaatgttctacttgtcacttttgaaggtgttcagcctaatgatgttaccatagaagttattcatttggttttttcggcatttgggtttgttcacaagatagctacttttgagaaagcagctggtttccaggcacttatccagtatactgatgccccaactgctcttgaagctaaaaactcattggatggaagaagcatcccaaaatatttacttccagaacatatcggtgcctgccacatgcgcataaccttttctgcgcataaggatttgaatatcaaatttcagtcgcatcgcagcagggattacaccaatccttaccttcctgtgaaccaaacagcaattgaggggattgtgcagcccacggtgggccctgatgggaaggtaaaggagcctgagagcaatgtacttttagcatcaattgagaacatgcaatatgctgtgacggtggatgttctgcacactgtgttttctgcttttggagctgttcaaaaaattgcaatgtttgagaagaatggtggaatgcaggctctaatccaatatccagatataactaccgcagccgttgctaaacaagctttggagggacactgcatatatgatggtggttactgtaagcttcatctgtcatactctcgtcatactgatctcaatgtaaaggcacatgatgagagaagcagggactacactctttcagaccctaacgtgcagctgcaagctgctgcacaaacgccagttctaaggtctccgggagtggcatggcagaacactgcatcagtaccagctgctcctttttatgcaagcacagcgacttcaactcctattggagttggacaggtggctgcttggaatcctaacatgcaggcagggagttttgcatctgcatcgactgcataccccaaccaaccattaatggccaactccatgcctcactatcctgctattggatcgagttccggtgccccaccagtatcatttcaggcttcgcagcagatgacacagtatagcatgccccctggtgctccgccgcacgcaccaccagctggccaatcaatttacttcccgaagtaagcggttttggttcaatattatcagagagcaatcaggcattgttacctgcgacaattgtggtccgcaaatgcaatcttgcgaattttgcaagtgcgctgtagtacttgtaacttgcgagcgcccttcgcaagaatgcatcagcgtttgctgtgtctgtaaaactgtcaaaaatagtgtttacctattagcctgcatggtatattgttggtgatatatgttggagtagttttgatgcccc

SEQ ID NO: 35543 - protein, 513 aa, Zea mays subsp. mays
KTQQPCSVPPPSKRLPPPRRDKKTHQTLTLAAVPQPPAFPAGEEAEPARMPPGSATQFRYTQTPSKVLHLRNMPWECTEEELVDLCKPFGRVVNTMCNVGANRNQAFVEFADQNQAISMVSYYASSSEPAQVRGKTVYIQYSNRQEITNNKGTGDSSGNVLLVTFEGVQPNDVTIEVIHLVFSAFGFVHKIATFEKAAGFQALIQYTDAPTALEAKNSLDGRSIPKYLLPEHIGACHMRITFSAHKDLNIKFQSHRSRDYTNPYLPVNQTAIEGIVQPTVGPDGKVKEPESNVLLASIENMQYAVTVDVLHTVFSAFGAVQKIAMFEKNGGMQALIQYPDITTAAVAKQALEGHCIYDGGYCKLHLSYSRHTDLNVKAHDERSRDYTLSDPNVQLQAAAQTPVLRSPGVAWQNTASVPAAPFYASTATSTPIGVGQVAAWNPNMQAGSFASASTAYPNQPLMANSMPHYPAIGSSSGAPPVSFQASQQMTQYSMPPGAPPHAPPAGQSIYFPK

SEQ ID NO: 35544 - protein, 464 aa, Zea mays subsp. mays
MPPGSATQFRYTQTPSKVLHLRNMPWECTEEELVDLCKPFGRVVNTMCNVGANRNQAFVEFADQNQAISMVSYYASSSEPAQVRGKTVYIQYSNRQEITNNKGTGDSSGNVLLVTFEGVQPNDVTIEVIHLVFSAFGFVHKIATFEKAAGFQALIQYTDAPTALEAKNSLDGRSIPKYLLPEHIGACHMRITFSAHKDLNIKFQSHRSRDYTNPYLPVNQTAIEGIVQPTVGPDGKVKEPESNVLLASIENMQYAVTVDVLHTVFSAFGAVQKIAMFEKNGGMQALIQYPDITTAAVAKQALEGHCIYDGGYCKLHLSYSRHTDLNVKAHDERSRDYTLSDPNVQLQAAAQTPVLRSPGVAWQNTASVPAAPFYASTATSTPIGVGQVAAWNPNMQAGSFASASTAYPNQPLMANSMPHYPAIGSSSGAPPVSFQASQQMTQYSMPPGAPPHAPPAGQSIYFPK

SEQ ID NO: 35545 - protein, 441 aa, Zea mays subsp. mays
MPWECTEEELVDLCKPFGRVVNTMCNVGANRNQAFVEFADQNQAISMVSYYASSSEPAQVRGKTVYIQYSNRQEITNNKGTGDSSGNVLLVTFEGVQPNDVTIEVIHLVFSAFGFVHKIATFEKAAGFQALIQYTDAPTALEAKNSLDGRSIPKYLLPEHIGACHMRITFSAHKDLNIKFQSHRSRDYTNPYLPVNQTAIEGIVQPTVGPDGKVKEPESNVLLASIENMQYAVTVDVLHTVFSAFGAVQKIAMFEKNGGMQALIQYPDITTAAVAKQALEGHCIYDGGYCKLHLSYSRHTDLNVKAHDERSRDYTLSDPNVQLQAAAQTPVLRSPGVAWQNTASVPAAPFYASTATSTPIGVGQVAAWNPNMQAGSFASASTAYPNQPLMANSMPHYPAIGSSSGAPPVSFQASQQMTQYSMPPGAPPHAPPAGQSIYFPK

SEQ ID NO: 35546 - DNA, 1971 bp, Zea mays subsp. mays
aagagacagagagggggagtggtccgaggtcaataggatataactccaggactcctctccatcagaatcagagacgagtcgagtgagggggcagaggccacaaaacagagagtacccaaacgatcgatctgtgcatctccccgtccgtcccgcaaccatctaattcagaagcagacatcaatggcgagcaacggctgcaacggcaacggcaacggcaacggcaacggcaaggcggctccggcgggtgtggtggtaccggagatcaagttcaccaagctcttcatcaacggcgagttcgtcgacgccgcctccggcaagacattcgataccagggacccacggaccggcgacgtgctggcccacgtagcagaggcagacaaagctgatgtggacctggcggtgaagtccgcccgggacgccttcgagcacggcaagtggccccgcatgtcaggctacgagcgcgggcggatcatgagcaagctggcggacctggtggagcagcacacggaggagctggcggcgctggacggtgccgacgccgggaagctgctgctgctgggcaagatcatcgacatccccgcggccacgcagatgctgcgctactacgccggcgccgccgacaagatccacggcgacgtcctgcgcgtctccggcaggtaccagggctacacgctcaaggagcctatcggcgtcgtgggcgtcatcatcccctggaacttccccaccatgatgttcttcctcaaggtcagcccggcgctcgccgcgggctgcaccgtcgtcgtcaagcccgccgagcagacgccgctttccgcgctctactacgcgcacctcgcaaagatggccggcgtccccgacggagtgatcaacgtcgtccccgggttcggccccaccgccggcgccgcgctcgcctcccacatggacgtcgacagcgtggccttcaccggctccacagaggtgggtcgcctcatcatggagtcggccgcgcggagcaacctcaagacggtctcgctggagctcggcggcaagtcgccgctcatcatcttcgacgacgccgacgtcgacatggccgttaacctgtcgaggcttgccgtcttcttcaacaagggagaggtttgcgtggcgggatcgcgcgtgtacgtgcaggaagggatctatgacgagttcgtcaagaaggccgtggaggccgcgcggagctggaaggttggagacccgttcgatgtcaccagcaacatgggccctcaggttgacaaggaccagtttgagagggtcctaaagtacattgagcatggcaagagcgagggagcgactctgctcaccggcggcaagcctgccgccgacaaagggtactacattgagcccaccatctttgtcgatgtcactgaggacatgaagatcgcgcaggaagagatcttcggccccgtcatgtccctcatgaagttcaagacggttgatgaggtgatcgagaaggccaactgcaccaggtacgggctcgccgccgggatcgtgaccaagagcctggacgtcgccaaccgggtgtcccggtcggtgcgcgccggcaccgtgtgggtgaactgctacttcgccttcgacccggacgcgcccttcggcgggtacaagatgagcggcttcggccgggaccaggggctggcagccatggacaagtacctgcaggtcaagagcgtcatcaccgcgctcccggactcgccatggtactgagttgagccagggaccgatggaaccccatcgatctcttcttgtgcagtgtacatgcgtcatgcgtgcgtgctcacacagctgggttgctgctttgtgcttgtgttcgtctctggtttgtggctcatgtgtgttagtctgcaccctatccttctgtacgtagctgccggacatgcaaatagtatgttaagtacaccatataaactcttgttttataaattcaagtttagcttggagccttcactcccttcagccttg

SEQ ID NO: 35547 - protein, 511 aa, Zea mays subsp. mays
MASNGCNGNGNGNGNGKAAPAGVVVPEIKFTKLFINGEFVDAASGKTFDTRDPRTGDVLAHVAEADKADVDLAVKSARDAFEHGKWPRMSGYERGRIMSKLADLVEQHTEELAALDGADAGKLLLLGKIIDIPAATQMLRYYAGAADKIHGDVLRVSGRYQGYTLKEPIGVVGVIIPWNFPTMMFFLKVSPALAAGCTVVVKPAEQTPLSALYYAHLAKMAGVPDGVINVVPGFGPTAGAALASHMDVDSVAFTGSTEVGRLIMESAARSNLKTVSLELGGKSPLIIFDDADVDMAVNLSRLAVFFNKGEVCVAGSRVYVQEGIYDEFVKKAVEAARSWKVGDPFDVTSNMGPQVDKDQFERVLKYIEHGKSEGATLLTGGKPAADKGYYIEPTIFVDVTEDMKIAQEEIFGPVMSLMKFKTVDEVIEKANCTRYGLAAGIVTKSLDVANRVSRSVRAGTVWVNCYFAFDPDAPFGGYKMSGFGRDQGLAAMDKYLQVKSVITALPDSPWY

SEQ ID NO: 35548 - protein, 423 aa, Zea mays subsp. mays
MSGYERGRIMSKLADLVEQHTEELAALDGADAGKLLLLGKIIDIPAATQMLRYYAGAADKIHGDVLRVSGRYQGYTLKEPIGVVGVIIPWNFPTMMFFLKVSPALAAGCTVVVKPAEQTPLSALYYAHLAKMAGVPDGVINVVPGFGPTAGAALASHMDVDSVAFTGSTEVGRLIMESAARSNLKTVSLELGGKSPLIIFDDADVDMAVNLSRLAVFFNKGEVCVAGSRVYVQEGIYDEFVKKAVEAARSWKVGDPFDVTSNMGPQVDKDQFERVLKYIEHGKSEGATLLTGGKPAADKGYYIEPTIFVDVTEDMKIAQEEIFGPVMSLMKFKTVDEVIEKANCTRYGLAAGIVTKSLDVANRVSRSVRAGTVWVNCYFAFDPDAPFGGYKMSGFGRDQGLAAMDKYLQVKSVITALPDSPWY

SEQ ID NO: 35549 - protein, 414 aa, Zea mays subsp. mays
MSKLADLVEQHTEELAALDGADAGKLLLLGKIIDIPAATQMLRYYAGAADKIHGDVLRVSGRYQGYTLKEPIGVVGVIIPWNFPTMMFFLKVSPALAAGCTVVVKPAEQTPLSALYYAHLAKMAGVPDGVINVVPGFGPTAGAALASHMDVDSVAFTGSTEVGRLIMESAARSNLKTVSLELGGKSPLIIFDDADVDMAVNLSRLAVFFNKGEVCVAGSRVYVQEGIYDEFVKKAVEAARSWKVGDPFDVTSNMGPQVDKDQFERVLKYIEHGKSEGATLLTGGKPAADKGYYIEPTIFVDVTEDMKIAQEEIFGPVMSLMKFKTVDEVIEKANCTRYGLAAGIVTKSLDVANRVSRSVRAGTVWVNCYFAFDPDAPFGGYKMSGFGRDQGLAAMDKYLQVKSVITALPDSPWY

SEQ ID NO: 35550 - DNA, 1400 bp, Zea mays subsp. mays
  misc_feature (648)..(649): n is a, c, g, or t
  misc_feature (696)..(696): n is a, c, g, or t
gcacgagaccattacctagaacatcctaatcgaaaagaaagactattcccctcaaccctccaaaagaagagaggactgttgaaacttggatgccatggcatacgtccacacgccaccgtaccagtcgagatcaagacggcaataatagacaagaacaaggtgcgtggcagtgcactcgacgatattaatggagctgctttgcacgggcggcagacagccgtagacagagcagtgacggtcgtcgtacacagatcacgatgctgctcccacactcttcgtcagcctctgcaactgctaccactcgtgggctagcactagcagcagcagcagcagcaccgccgcgtccgaccgctcgcccccggcgcgcgcgcctcctgcctccacgcgcgcgggccgagacgcatgcgacgggcgttggcgccgaccgcgcggccgaggcgcttctccaaagcgggctgcgccgtgagtcgctgccgcggcacgtcgcggtggtgatggacgggaactcgcggtgggcgcgcgagcgggggctgacgcccgcggacggccacaaggccggcggccgcaacctggagcgggtcgttgcgctgtcgcgcgcctggggcatccgcgcgctcaccgccttcgtctgctcccgcgagaacttgnnccgccccaaggccgaggtcgactacatgatgggcttgtccgagtggntgataggcgacaacatcgacaagctctcgaggcaggggatccggctgcaggtgatcggcgacgccgcgaagatgccagcctctctgcggagcgcagcggcgcaggccgacgaggccacgaggcacaactcgcagctgcacgtgatgctggccatctgctacagcgggcgatgggacatggtccaggcgtgccgggagctggcccgggaggcgcaggcgaaccggctcagtccggacgacatcgacgagtcggtcatcgccggcaagctcgcgacgagcgccgccggcgagttctcctgtcccgacctggtcatcagaaccagcggcgagatgaggctcagcaacttcttgctgtggcagtcggcgtactcggagttgttcttcaccggcaagatgtggcctgactttggggaggctgagtacctggaagcgttgcgctccttccagggcagagaccgccgcttcggccaatcaaaattactctaacagtctaactcgatggagccacgaagtggagcgccagtatatgtgaagagttatggattgttcggttagctttcattccatttagattaaataagattgaatgaatttaaatcttaagtaagttaaactttttttaaaatttttttaatcccatcaaataaatgagtaacaggattaatggaacaaagtcttaattggaatttgtcctgttttttaaac

SEQ ID NO: 35551 - protein, 307 aa, Zea mays subsp. mays
  misc_feature (131)..(131): Xaa can be any naturally occurring amino acid
  misc_feature (147)..(147): Xaa can be any naturally occurring amino acid
MLLPHSSSASATATTRGLALAAAAAAPPRPTARPRRARLLPPRARAETHATGVGADRAAEALLQSGLRRESLPRHVAVVMDGNSRWARERGLTPADGHKAGGRNLERVVALSRAWGIRALTAFVCSRENLXRPKAEVDYMMGLSEWXIGDNIDKLSRQGIRLQVIGDAAKMPASLRSAAAQADEATRHNSQLHVMLAICYSGRWDMVQACRELAREAQANRLSPDDIDESVIAGKLATSAAGEFSCPDLVIRTSGEMRLSNFLLWQSAYSELFFTGKMWPDFGEAEYLEALRSFQGRDRRFGQSKLL

SEQ ID NO: 35552 - protein, 228 aa, Zea mays subsp. mays
  misc_feature (52)..(52): Xaa can be any naturally occurring amino acid
  misc_feature (68)..(68): Xaa can be any naturally occurring amino acid
MDGNSRWARERGLTPADGHKAGGRNLERVVALSRAWGIRALTAFVCSRENLXRPKAEVDYMMGLSEWXIGDNIDKLSRQGIRLQVIGDAAKMPASLRSAAAQADEATRHNSQLHVMLAICYSGRWDMVQACRELAREAQANRLSPDDIDESVIAGKLATSAAGEFSCPDLVIRTSGEMRLSNFLLWQSAYSELFFTGKMWPDFGEAEYLEALRSFQGRDRRFGQSKLL

SEQ ID NO: 35553 - protein, 168 aa, Zea mays subsp. mays
  misc_feature (8)..(8): Xaa can be any naturally occurring amino acid
MMGLSEWXIGDNIDKLSRQGIRLQVIGDAAKMPASLRSAAAQADEATRHNSQLHVMLAICYSGRWDMVQACRELAREAQANRLSPDDIDESVIAGKLATSAAGEFSCPDLVIRTSGEMRLSNFLLWQSAYSELFFTGKMWPDFGEAEYLEALRSFQGRDRRFGQSKLL

SEQ ID NO: 35554 - DNA, 1483 bp, Zea mays subsp. mays
gcacgagaccattacctagaacatcctaatcgaaaaacccccttctccacccgcaaaatcccaatacaaatactcgcccagcaaatagatagccagagggacggcggagggaagccaagaaaaccacgccaacgaccaaagcagctgtcgataacacggcgtgctacacctgcctgcacaaccctcagcagggccgcaggcgagagagagagagataggaagagagacagcgcgaagcggcagcggtagccagcaaaggcggctagagctgttgcccatgcaaggcgagtaccggtcttccagcgaggagtcggcggccgctgcagcagccgcagccatggctcctctggcggccgccgcggccgcagcagtgaagatggaggcggagcaggcggcgatggcgagcgcggctgcgccgcagctggggtcggcgcaccagcaccagcaccagcagatgcagccgcggcggcagtaccgcggcgtgcgcatgcgcaagtggggcaagtgggtggcggagatccgggagccgcacaagcgcacgcgcatctggctggggtcctacgccacggccgtggcggcggcgcgcgcctacgacacggccgtgttctacctgcgcggccggtcggcgcggctcaacttccccgacgagatcccgtcgctggcgccgtcggagggcgagggcgagggcgacggcggggagcccgcgcgcgaccccgccgacggcggcggcacgctgtccgccgcgtccatccggaagaaggccatcgaggtggggtcccgcgtggacgcgctgcagaccggcatgatggtgccgccgccgcaccaccgcgagcgccagaggcaccaccaccaccaccaccaccacctgccgcagctgcggatgcacgccgccgccgcggaggcggcgggctgtggcggagcaccggcaggaggtgaagcagtcgccgcagcggccggcgtggagcgggcgcgtcaagaacccggatctaaatcgggcgcccagccccgagagctccgacgccgagtgacatgagaagcgagcgagcagcagcagcagcagccaccgcaaaggctcaacgacgacgacgtccgttgttgcgacggcgcccagcgcagcatgccgctgtcgtcttcgttcgtatccacgtacgtacgacggcccagctgacccgcttgcctacccgtccgttctgtgcgactggatggtcggtcggcgggcgtcgcggcgagggctttcggtacgtcgtggataagcacgaggggagggcgggcaggcgggaacggaggcggaggcggcggccccaagtggcggtctttccaaatgtcaaaaaggacagctgtaacagtgataagaaaaacaagtcatcatcctcgtctctccaccccccctatctctctctctctctatcctctcgcgcagtagcttgttctcgttccgagtagataagcagcaacgattagtactccactactatgatttttc

SEQ ID NO: 35555 - protein, 251 aa, Zea mays subsp. mays
MQGEYRSSSEESAAAAAAAAMAPLAAAAAAAVKMEAEQAAMASAAAPQLGSAHQHQHQQMQPRRQYRGVRMRKWGKWVAEIREPHKRTRIWLGSYATAVAAARAYDTAVFYLRGRSARLNFPDEIPSLAPSEGEGEGDGGEPARDPADGGGTLSAASIRKKAIEVGSRVDALQTGMMVPPPHHRERQRHHHHHHHHLPQLRMHAAAAEAAGCGGAPAGGEAVAAAAGVERARQEPGSKSGAQPRELRRRVT

SEQ ID NO: 35556 - protein, 231 aa, Zea mays subsp. mays
MAPLAAAAAAAVKMEAEQAAMASAAAPQLGSAHQHQHQQMQPRRQYRGVRMRKWGKWVAEIREPHKRTRIWLGSYATAVAAARAYDTAVFYLRGRSARLNFPDEIPSLAPSEGEGEGDGGEPARDPADGGGTLSAASIRKKAIEVGSRVDALQTGMMVPPPHHRERQRHHHHHHHHLPQLRMHAAAAEAAGCGGAPAGGEAVAAAAGVERARQEPGSKSGAQPRELRRRVT

SEQ ID NO: 35557 - protein, 218 aa, Zea mays subsp. mays
MEAEQAAMASAAAPQLGSAHQHQHQQMQPRRQYRGVRMRKWGKWVAEIREPHKRTRIWLGSYATAVAAARAYDTAVFYLRGRSARLNFPDEIPSLAPSEGEGEGDGGEPARDPADGGGTLSAASIRKKAIEVGSRVDALQTGMMVPPPHHRERQRHHHHHHHHLPQLRMHAAAAEAAGCGGAPAGGEAVAAAAGVERARQEPGSKSGAQPRELRRRVT

SEQ ID NO: 35558 - DNA, 1368 bp, Zea mays subsp. mays
atcagtagtaaccactcctcgtcgtctctctcgcggtctcgcctcctgcagctagcgctcgccagaaagggaaaccgcatctgctccagcctcccgtcccgtctcggcgccgccgcctgatcgaccagagcccagcgcggggcgtcgaggccgtccggggcgggtccggcgctcagatctgaggcgagtagcaagcgaagaacatgcagatgcaggtcggaggaggcgcggccgacagcccgggcgctgcggcggcggcgggcgcggaggcgccgcgcccgagccgctacgagtcgcagaagcggcgggactggcacacgttcgggcagtacctgcgcaaccaccggccgccgctggagctggcgcggtgcagcggcgcgcacgtgctcgagttcctgcgctacctcgaccagttcggcaagaccaaggtccacgcgccggggtgccccttcttcggccacccgtcgccgcccgcgccgtgcccgtgcccgctgcggcaggcctggggcagcctcgacgcgctcatcggccgcctgcgcgccgccttcgaggagcacgggggccggcccgaggccaaccccttcggcgcccgcgccgtgcgcctctacctccgcgaggtccgcgacagccaggccaaggcccgcggcatcgcctacgagaagaagcgccggaagcggccgtccgcctcgtcccagtcgtcgccgcaggccgcgacgaccccgtcgttgcaggcccctcccgtctccacgccggccctctcggacgcggcggccgagagggccgacgtgcgggcgcacgtccccgacgccgggcacgggcaccagcaccagcaccacttcttcatgccacacccgcagttcctgcacgggttccgactgctgccaggcaaccccgaagcggtggctggcaatggtaatggcgatggcagcagcagcagcgctagcgtcgctgccggcagtggggacgagatagcgctggcgatggcggcggcggcggaggcgcacgcggcggggtgcatgctgccgctgtcggtgttcaactaggcaggcgtatagccgagcgaggtagggcttaaacaatagattaatccgggtgcttatctagtgttaagatcgatctcattgtcgcgatggagatgaaccgatcaacacacacgtacgtgctgctgttcttcaggatttcctattcctattctcatatctccccccttttggttacatgatgctcatgcatttcctgctgcgctgctgggaaatggtactagtagctgtgcttggtactgtagggtttgcagaatcctgcttgttttgtgtatgcagtgcaatgatgatggagatataatataatggaatgcttaatttccaggtc

SEQ ID NO: 35559 - protein, 279 aa, Zea mays subsp. mays
MQMQVGGGAADSPGAAAAAGAEAPRPSRYESQKRRDWHTFGQYLRNHRPPLELARCSGAHVLEFLRYLDQFGKTKVHAPGCPFFGHPSPPAPCPCPLRQAWGSLDALIGRLRAAFEEHGGRPEANPFGARAVRLYLREVRDSQAKARGIAYEKKRRKRPSASSQSSPQAATTPSLQAPPVSTPALSDAAAERADVRAHVPDAGHGHQHQHHFFMPHPQFLHGFRLLPGNPEAVAGNGNGDGSSSSASVAAGSGDEIALAMAAAAEAHAAGCMLPLSVFN

SEQ ID NO: 35560 - protein, 277 aa, Zea mays subsp. mays
MQVGGGAADSPGAAAAAGAEAPRPSRYESQKRRDWHTFGQYLRNHRPPLELARCSGAHVLEFLRYLDQFGKTKVHAPGCPFFGHPSPPAPCPCPLRQAWGSLDALIGRLRAAFEEHGGRPEANPFGARAVRLYLREVRDSQAKARGIAYEKKRRKRPSASSQSSPQAATTPSLQAPPVSTPALSDAAAERADVRAHVPDAGHGHQHQHHFFMPHPQFLHGFRLLPGNPEAVAGNGNGDGSSSSASVAAGSGDEIALAMAAAAEAHAAGCMLPLSVFN

SEQ ID NO: 35561 - DNA, 952 bp, Zea mays subsp. mays
tagaacatcctaatcgaaaaaagcgcaaggcaggcaagctcctctctcaagtctcggcacctccaactacgcagcaaccaaccatgagcaccagcgatgccgccgcgaccgtgatccccatcgacgacgtgccccgccagcacggcaaggccccggccgtggacacggtcacggcggcgcctcctcctctcgctgcagcagcaccccccgctgcgacgacggcgcctcggaagacgcgggtcccgttcttccggcgcgccgaccgcggcagccggtgcgtggcgctccttgacttggtgctgagggtggcggccttcgggcccgccctcgccgccgccatcgccacgggcacctccgacgagacgctctccgtcttcacccagttcttccagttccacgcccgattcgacgacttcccggcgctcctgttcttcatggtggccaacgcgatcgcggcggggtacctggtgctgtccctccccttctccgccgtcgtcgtcctccgcccccaggccatcggcttgcgccacctcctgctcatctgcgacctgatcatagcggcgctgctgacggccgcggcggcggcggcggcggcgatcgtggacctggcgcactcggggaaccagcgcgctaactgggtgcccatctgcatgcagttccacggcttctgccagcgcaccagcggcgccgtcgtggcatccttcctcgccgtgctcgtcctcctgtttctcgtcatcttggccgccttcaccatcaggaaacgctgctgaactggatagtatgtgatgttgctgtttttgcgtcgtgcaattaataatgcaatgtggtttcagtttgtggttactcgtgtgtaattgtaaagcgtggagtggaattgcctttgtattattcgtggacacctgcttgcggaattttaaattgggcttaacttctcggcctggtttcatgtccg

SEQ ID NO: 35562 - protein, 255 aa, Zea mays subsp. mays
EHPNRKKRKAGKLLSQVSAPPTTQQPTMSTSDAAATVIPIDDVPRQHGKAPAVDTVTAAPPPLAAAAPPAATTAPRKTRVPFFRRADRGSRCVALLDLVLRVAAFGPALAAAIATGTSDETLSVFTQFFQFHARFDDFPALLFFMVANAIAAGYLVLSLPFSAVVVLRPQAIGLRHLLLICDLIIAALLTAAAAAAAAIVDLAHSGNQRANWVPICMQFHGFCQRTSGAVVASFLAVLVLLFLVILAAFTIRKRC

SEQ ID NO: 35563 - protein, 228 aa, Zea mays subsp. mays
MSTSDAAATVIPIDDVPRQHGKAPAVDTVTAAPPPLAAAAPPAATTAPRKTRVPFFRRADRGSRCVALLDLVLRVAAFGPALAAAIATGTSDETLSVFTQFFQFHARFDDFPALLFFMVANAIAAGYLVLSLPFSAVVVLRPQAIGLRHLLLICDLIIAALLTAAAAAAAAIVDLAHSGNQRANWVPICMQFHGFCQRTSGAVVASFLAVLVLLFLVILAAFTIRKRC

SEQ ID NO: 35564 - DNA, 1033 bp, Zea mays subsp. mays
  misc_feature (303)..(303): n is a, c, g, or t
  misc_feature (733)..(733): n is a, c, g, or t
accagcccaccaaacccatactacataccatacgcgcaccaccagcagcctcgccgagatctgcctgctaccttcttctccatctatggcgccgccgacattgccccgcgcccttacagtcctcctcctcgtcgtcctcttcgccgccacggcgcggtcccaggaggagacgtccgagctcgagccccccgcatccgcgcctctacccgccgccgactcgcattcgccaatctcacacccacctaccgcctccgcagacgcgccctcaccgcgcaagaccgcgcccgtcgcagccccctcctncgacgcgcccgccgccgccgacgacgaccaagcgtacaccaagccgccctcgccggcaccggcaccagcaccagccgccgctgacgacgagcacaggggcgacgaagacgaccaagcgcacaccaactccccctcgccggcaccggcagccgacggccgagcgtacagcaagtccccctcgccggcgcccgccgccgagcagatcaaggccgccagcgccagcgccaccgccaacgaccagggcgtggtggacgcggacgcggccgcgcgcccccgcggggaagagatgaacggcggcggcaaggccggcgtggcgctcggcgccgtggccgccgccgccgtcctcggcctcggcgccttcgtctggcggaagcgccgcgccaacatccgccgcgccaggtacgccgactacgccgcgcgcctggagctngtctgatccgcttggctggcgtcccccctccccacgctagctccacggatcggatcggatcggatcggatcaggagatgcttccactgcaccgctaggaaggagagtagctaggccgagcctctgctcatattatcgcttcattcattctttcgtgaccacgacaaggaataacaacaatccacgcgtacgtatattcgtatccattcattcatacggagatggagatgggccatttttgtaaacatcgtgtacactataattaattatgtatttggagagtgctctattgttactagtt

SEQ ID NO: 35565 - protein, 245 aa, Zea mays subsp. mays
  misc_feature (101)..(101): Xaa can be any naturally occurring amino acid
  misc_feature (244)..(244): Xaa can be any naturally occurring amino acid
PAHQTHTTYHTRTTSSLAEICLLPSSPSMAPPTLPRALTVLLLVVLFAATARSQEETSELEPPASAPLPAADSHSPISHPPTASADAPSPRKTAPVAAPSXDAPAAADDDQAYTKPPSPAPAPAPAAADDEHRGDEDDQAHTNSPSPAPAADGRAYSKSPSPAPAAEQIKAASASATANDQGVVDADAAARPRGEEMNGGGKAGVALGAVAAAAVLGLGAFVWRKRRANIRRARYADYAARLEXV

SEQ ID NO: 35566 - protein, 217 aa, Zea mays subsp. mays
  misc_feature (73)..(73): Xaa can be any naturally occurring amino acid
  misc_feature (216)..(216): Xaa can be any naturally occurring amino acid
MAPPTLPRALTVLLLVVLFAATARSQEETSELEPPASAPLPAADSHSPISHPPTASADAPSPRKTAPVAAPSXDAPAAADDDQAYTKPPSPAPAPAPAAADDEHRGDEDDQAHTNSPSPAPAADGRAYSKSPSPAPAAEQIKAASASATANDQGVVDADAAARPRGEEMNGGGKAGVALGAVAAAAVLGLGAFVWRKRRANIRRARYADYAARLEXV

SEQ ID NO: 35567 - protein, 196 aa, Zea mays subsp. mays
  misc_feature (101)..(101): Xaa can be any naturally occurring amino acid
QPTKPILHTIRAPPAASPRSACYLLLHLWRRRHCPAPLQSSSSSSSSPPRRGPRRRRPSSSPPHPRLYPPPTRIRQSHTHLPPPQTRPHRARPRPSQPPPXTRPPPPTTTKRTPSRPRRHRHQHQPPLTTSTGATKTTKRTPTPPRRHRQPTAERTASPPRRRPPPSRSRPPAPAPPPTTRAWWTRTRPRAPAGKR

SEQ ID NO: 35568 - DNA, 1081 bp, Zea mays subsp. mays
gcacgagaccattacctagaacatcctaatcaaaacttttttgtcgcctccgtgcgtgccccgggggccttgatcgcgcgcaccggtcagctcagcccgtctgattcgcgtgctgccagccctccgccgatcgtgaaacacaaccgtcggtggtttgcttgcttgatcgctgatcctcgcggacgctcacggtcatggcgcctcagcctttgcgcgctccgaggctgagcgcccccgctggccacgcggcgtgcaggtgctcggccgcgccgctattcgggaagcgggcgccccccgtcgtcgcgttcccccgcgcccgtagcggcggcgccgtcgcctcgtgctcggccgtgcaggagtcgtccacctccaccactggtacgggtcttgctaccctaattgcggggtgggtgggatctcttctgaataagttctctcgagacgtagatcggcatgttagcaagaagaaggatgccgcggacggggccaaggaggccacagcggaggcggcgaagccggccgcggccgccaagccaaagaaggccgcggcgctgccgctgccggagatgatgcagcaggagatcatcccaccgctgaaggatgccttggaggcggaggacgacgtgtcccaggtgcagctcgccttccaaaacaacacgctggagggatccttcataaagaacgacgtcccttattatttttgggccttctttccaaaaggagacctcacaggaccgaagggctttgcgctatcgtcctacagcaacgaagtgagcaccatcgagccgttcctgatcgatgagaagaggataacggccaagtacgtggtgttctgggtctacaagaggctggctgggcaaggcatccttccggtctggaaggaagaggagggggaggaggaggccgcgaagtagtaggttgcgcaggcgcatacgcatacacatacacacacacagggtgctgccgtgaacatacacatgtaacgctgtaaagttcatctgctagtaaaagttcatctgctgtgaacatacacatgtaacacagatacttcagtttcagcagttaaaaacctaccgtcgtt

SEQ ID NO: 35569 - protein, 239 aa, Zea mays subsp. mays
MAPQPLRAPRLSAPAGHAACRCSAAPLFGKRAPPVVAFPRARSGGAVASCSAVQESSTSTTGTGLATLIAGWVGSLLNKFSRDVDRHVSKKKDAADGAKEATAEAAKPAAAAKPKKAAALPLPEMMQQEIIPPLKDALEAEDDVSQVQLAFQNNTLEGSFIKNDVPYYFWAFFPKGDLTGPKGFALSSYSNEVSTIEPFLIDEKRITAKYVVFWVYKRLAGQGILPVWKEEEGEEEAAK

SEQ ID NO: 35570 - DNA, 1893 bp, Zea mays subsp. mays
aactaaaataactcgtcgttctcgtaggcagcgcgccagcgccgccgtctactctcctttcttgccgcgcggcgccgccgtctactctcgctcaccggaatgccgtcccagcctcagccgagctccatcggcggaacctcccagaccccggcgccgttccagaccgcgcccgtcttcaccggcggaagcccccggaccctggcgacgctctccgctcagtccgtcccccgcgtcacgcggagaagcattgcgctcgtcgattggtgtttggagagggtggagggcgaggagggcaagatccgcgtcgctggaaccacctacaccccgcaaacgagcccgcaaacgaggagagaagcatcgtcctcaaagggaagcaggaaagtggcaggccgagtgttcagatcatctgctattgttaggcgccatgatcacttcagaattatgtccgaggatggttacctcatacggataggctgtctcttgaatattcccaaaacacgtaacaatggattttctgaagaggtgtgtgaatgctttgagtttggctttccaattcaatggcacaggcttgttaatccaaagatggtgcccgataataaacatgcactgtcaccatcagaaacaactgctagtgcaccaagtcattcagttggatattacatggagaagttcttaagtgacagtttttccaattctaacagatattctttcacagagaatgattcttacacatctgtagtgtgtactggcagcagaaatggacttactacccaaaccctttcaaacttaccagatgataatgcaggaaacataactgtatcttggggattatatggcctcgggatggacatgtctgagaaaccttggacaccacctgcagaagcgtgtaataatagacaagaaagtgatcaacatgaaagtatgcaaatagatgcatgtaaacaagagttagttaatcgctccatgagttctgtttcagttaagcaaagtataagttccatcagccccaactcaaaagtagacggcaacagaattgtaccatccaaaattatgtcagttgtgaatgaaagttacaggagcacagtaggttgtggtcaggctgaggaagacgttggtattcagcaagagaaaaagcacagctgttcaagtgagcatggaatggttactctttctattaactgtacatcctctcaactaggtgcaccaggaattccaaaatttgggaaagattcagtgaacctttggactacagatgcattagaactatcaactgaagggatgactccaaagattggagctgacagtactgacaggagattacgaagtggcaaaattcttggaatgccaagtggtggactaatgaatagaggccacaagctgaaaaagatcaagcaggaagcatccagtaaacagatggttaatcaaggggctacatgcactgtggatctgacttctcatgaaaatgatttttcagcagctgagattgtcgttgaagaaaagctggaatcacatagttcatgccttaaaggacgaggaggaccagcgaaggggaagaggaagagggagagatggtaggattcagcgtgtcttttttcaagccggatgtgaaccgtgtttcagtttgtttctcggcttgagtagctaacttatgtagatgggtcgtgtgtgccagttccatgagcagatggtgccactaagggtgtgtttggtttgaggtcaaagtaggatgagtcaggggcgacatcgttccctcgactttttgggatcacgtcgccacaaaaaactactccggggtttttctcgctcatgcgtgattctcatccaaacactgttgaaactgtggtcactctattccattcctccatttacatccaaccaaatacactctaattt

SEQ ID NO: 35571 - protein, 491 aa, Zea mays subsp. mays
MPSQPQPSSIGGTSQTPAPFQTAPVFTGGSPRTLATLSAQSVPRVTRRSIALVDWCLERVEGEEGKIRVAGTTYTPQTSPQTRREASSSKGSRKVAGRVFRSSAIVRRHDHFRIMSEDGYLIRIGCLLNIPKTRNNGFSEEVCECFEFGFPIQWHRLVNPKMVPDNKHALSPSETTASAPSHSVGYYMEKFLSDSFSNSNRYSFTENDSYTSVVCTGSRNGLTTQTLSNLPDDNAGNITVSWGLYGLGMDMSEKPWTPPAEACNNRQESDQHESMQIDACKQELVNRSMSSVSVKQSISSISPNSKVDGNRIVPSKIMSVVNESYRSTVGCGQAEEDVGIQQEKKHSCSSEHGMVTLSINCTSSQLGAPGIPKFGKDSVNLWTTDALELSTEGMTPKIGADSTDRRLRSGKILGMPSGGLMNRGHKLKKIKQEASSKQMVNQGATCTVDLTSHENDFSAAEIVVEEKLESHSSCLKGRGGPAKGKRKRERW

SEQ ID NO: 35572 - protein, 377 aa, Zea mays subsp. mays
MSEDGYLIRIGCLLNIPKTRNNGFSEEVCECFEFGFPIQWHRLVNPKMVPDNKHALSPSETTASAPSHSVGYYMEKFLSDSFSNSNRYSFTENDSYTSVVCTGSRNGLTTQTLSNLPDDNAGNITVSWGLYGLGMDMSEKPWTPPAEACNNRQESDQHESMQIDACKQELVNRSMSSVSVKQSISSISPNSKVDGNRIVPSKIMSVVNESYRSTVGCGQAEEDVGIQQEKKHSCSSEHGMVTLSINCTSSQLGAPGIPKFGKDSVNLWTTDALELSTEGMTPKIGADSTDRRLRSGKILGMPSGGLMNRGHKLKKIKQEASSKQMVNQGATCTVDLTSHENDFSAAEIVVEEKLESHSSCLKGRGGPAKGKRKRERW

SEQ ID NO: 35573 - protein, 330 aa, Zea mays subsp. mays
MVPDNKHALSPSETTASAPSHSVGYYMEKFLSDSFSNSNRYSFTENDSYTSVVCTGSRNGLTTQTLSNLPDDNAGNITVSWGLYGLGMDMSEKPWTPPAEACNNRQESDQHESMQIDACKQELVNRSMSSVSVKQSISSISPNSKVDGNRIVPSKIMSVVNESYRSTVGCGQAEEDVGIQQEKKHSCSSEHGMVTLSINCTSSQLGAPGIPKFGKDSVNLWTTDALELSTEGMTPKIGADSTDRRLRSGKILGMPSGGLMNRGHKLKKIKQEASSKQMVNQGATCTVDLTSHENDFSAAEIVVEEKLESHSSCLKGRGGPAKGKRKRERW

SEQ ID NO: 35574 - DNA, 1593 bp, Zea mays subsp. mays
acccgcaccgctctgaaaaccattcccaggcaggcccgacctcctgcccttgtacaacgcacgcacggtccccgtcccaatggcccagactctgtccgccgcctcggagctggccaccctgaagcgcccgttcggcaacgacgggttcggcgatggcagcaacaacggcagcgcgaccggcgagaagcccaaggcgcggcggcgggaggcggacccggcggcggcgatggccgcggcgcggcacgagttcggcgagcacggcggcgtgaacatgtccatcgaggcgtcggcgacgttcacggtgatggagccggacacgatgcggcggctgttcgcgggcgagctgggccccgaccgcggagacatgtacatctacagccggcacttcaacccgacggtgctggcgctggggcggcagatggcggcgctggagggcacggaggcgggctactgcacggcgtccgggatgtccgccatctcgtccgtgctgatgcagctggtgggcgccggcggccacgtggtggcgtcgcggtgcctgtacggcgggacacacgcgctgctggcccggttcctgccgcgcgcctccggggtgcgcgccaccttcgtggacgccgacgacgaggccgccgtgcgcgccgcggtggtccccggcgagacgcgggtggtgtacgtggagaccatgtccaacccgacgctggccgtcgccgacatccccatgctggcgcgggtggcgcacgaggccggcgccaagctcgtggtggacaacaccttcacccccgtggtggtgtcgcccgcgcgcctcggcgccgacgtcgtcgtccacagcgtctccaagttcatcagcggcggcgccgacatcatcgccggcgcgatctgcgggccggcgagcctggtgaacgcgatgatggacctgcaggagggggcgctgatgctgctgggccccacgatgaacgccaaggtggcgttcgagctgtcggagcggctgccgcacctgccgctgcggatgcaggagcactcgcgccgcgcgctggcgttcgccgagcggatgcaggggctgggcctgcgcgtgctgtacccgggcctcccgggccacccgcaccacgcgcgcctggccgccatgggcaacccgggctacggctgcggcggcatgctgtgcctcgacatgggcaccgaggagcgcgccaaccgcctcatgcaccacctccagaacaccacccagttcggcctcatggccgtcagcctcggctactacgagacgctcatgtcctgctccggcagcagcaccagcagcgagatgccgcccgaggaccgcgcgcgcgcgggcatctccccgggcctcgtccgcatgtccgtcggctacaacggcacgctggagcagcgctgggcgcagttcgagcgcgcgctcgcgctcatgcagacgccgacgcccacgcaccatctcaaggccgccgccgccgaccgcgacggccccgaagccgccaacaaccaccgcaagcactgacgcgcttgcgcttccgagcgtgcatggcctgtgtggacttgtgtgtgtcgtgttcgtgtatatactactagtgccattcaagcaagaatatt

SEQ ID NO: 35575 - protein, 523 aa, Zea mays subsp. mays
TRTALKTIPRQARPPALVQRTHGPRPNGPDSVRRLGAGHPEAPVRQRRVRRWQQQRQRDRREAQGAAAGGGPGGGDGRGAARVRRARRREHVHRGVGDVHGDGAGHDAAAVRGRAGPRPRRHVHLQPALQPDGAGAGAADGGAGGHGGGLLHGVRDVRHLVRADAAGGRRRPRGGVAVPVRRDTRAAGPVPAARLRGARHLRGRRRRGRRARRGGPRRDAGGVRGDHVQPDAGRRRHPHAGAGGARGRRQARGGQHLHPRGGVARAPRRRRRRPQRLQVHQRRRRHHRRRDLRAGEPGERDDGPAGGGADAAGPHDERQGGVRAVGAAAAPAAADAGALAPRAGVRRADAGAGPARAVPGPPGPPAPRAPGRHGQPGLRLRRHAVPRHGHRGARQPPHAPPPEHHPVRPHGRQPRLLRDAHVLLRQQHQQRDAARGPRARGHLPGPRPHVRRLQRHAGAALGAVRARARAHADADAHAPSQGRRRRPRRPRSRQQPPQALTRLRFRACMACVDLCVSCSCIYY

SEQ ID NO: 35576 - protein, 473 aa, Zea mays subsp. mays
MAQTLSAASELATLKRPFGNDGFGDGSNNGSATGEKPKARRREADPAAAMAAARHEFGEHGGVNMSIEASATFTVMEPDTMRRLFAGELGPDRGDMYIYSRHFNPTVLALGRQMAALEGTEAGYCTASGMSAISSVLMQLVGAGGHVVASRCLYGGTHALLARFLPRASGVRATFVDADDEAAVRAAVVPGETRVVYVETMSNPTLAVADIPMLARVAHEAGAKLVVDNTFTPVVVSPARLGADVVVHSVSKFISGGADIIAGAICGPASLVNAMMDLQEGALMLLGPTMNAKVAFELSERLPHLPLRMQEHSRRALAFAERMQGLGLRVLYPGLPGHPHHARLAAMGNPGYGCGGMLCLDMGTEERANRLMHHLQNTTQFGLMAVSLGYYETLMSCSGSSTSSEMPPEDRARAGISPGLVRMSVGYNGTLEQRWAQFERALALMQTPTPTHHLKAAAADRDGPEAANNHRKH

SEQ ID NO: 35577 - protein, 424 aa, Zea mays subsp. mays
MAAARHEFGEHGGVNMSIEASATFTVMEPDTMRRLFAGELGPDRGDMYIYSRHFNPTVLALGRQMAALEGTEAGYCTASGMSAISSVLMQLVGAGGHVVASRCLYGGTHALLARFLPRASGVRATFVDADDEAAVRAAVVPGETRVVYVETMSNPTLAVADIPMLARVAHEAGAKLVVDNTFTPVVVSPARLGADVVVHSVSKFISGGADIIAGAICGPASLVNAMMDLQEGALMLLGPTMNAKVAFELSERLPHLPLRMQEHSRRALAFAERMQGLGLRVLYPGLPGHPHHARLAAMGNPGYGCGGMLCLDMGTEERANRLMHHLQNTTQFGLMAVSLGYYETLMSCSGSSTSSEMPPEDRARAGISPGLVRMSVGYNGTLEQRWAQFERALALMQTPTPTHHLKAAAADRDGPEAANNHRKH

SEQ ID NO: 35578 - DNA, 555 bp, Zea mays subsp. mays
  misc_feature (422)..(422): n is a, c, g, or t
cactcgagccagccagccagccagcaagccgcttgggcgccatctctctctctcttcgtaccctcgaagagagatccggcgcggcccaataaacacccggcttactacagactcgcagatggccggcctcaggatgaagttcgtcgccgtcgccgccatggccgccgcgctcgtggcgtccgccgcagccgccgaggcccccgccccggctcccgcgtccgacgccgcggccgccgtacccctcgccgcggcctccctcgccgccgccgccttcggctacctcttctgctagatccgcgctggatacgtggttcctgctccaaaatatgattcgtctggtctggcgcgcgtgagtccagctcgtgtgtcgtgcgtgtctctgtgtgaggtgtcggcgggcgtgtgtgtatgtatggagtcgnccgcggcggcggcggaggaggaggtgtgcgcgtggtgggtggtacgtgcttcgacgcgccactgtttgtcgcggcgatcatgtactaccctgctgcgttttctggttatcaatgagatgatttatttgattct

SEQ ID NO: 35579 - protein, 109 aa, Zea mays subsp. mays
HSSQPASQQAAWAPSLSLFVPSKRDPARPNKHPAYYRLADGRPQDEVRRRRRHGRRARGVRRSRRGPRPGSRVRRRGRRTPRRGLPRRRRLRLPLLLDPRWIRGSCSKI

SEQ ID NO: 35580 - protein, 96 aa, Zea mays subsp. mays
TRASQPASKPLGRHLSLSSYPRREIRRGPINTRLTTDSQMAGLRMKFVAVAAMAAALVASAAAAEAPAPAPASDAAAAVPLAAASLAAAAFGYLFC

SEQ ID NO: 35581 - protein, 57 aa, Zea mays subsp. mays
MAGLRMKFVAVAAMAAALVASAAAAEAPAPAPASDAAAAVPLAAASLAAAAFGYLFC

SEQ ID NO: 35582 - DNA, 985 bp, Zea mays subsp. mays
aagtcggaaactgtctttcccattcatgatctaggagccttcgccgtcgagagctgaggcgaagcaacatagaagacgaggggggagtgcgactcctcgtgacttgtgagggagagaagccatggcggagatggagccgagcatcgggaaccatatggcggaagaccaaccgactccggccgcctccactgccgaggaggccgctatggatgcagataccagcggcgagcggcgtagcgctgccgcgttggtgggcctgctccgcgggttcctcgccgtgcaacagcgccgggccgaggcctactccacgctacgaagggggttttctgagtatatggcttatggaggtgaattggcctatcaacaactgtgtggcaatattacagcggagttcaatgattgctcaaaacaagtccttgaaataatttccctgctctcaatgccagaatttagtcgcagcgatcttgccgatttactgaagggtgttcaagcacatgagaaagagaagttgcatttgacagcgaagattcaggtgctgaagaaagccggcaggccttcagagcgcctggtgaaccacgcggactgcaggtcgcgcagcatggcccagcacgtgtgcgtgcacgtcaaggagatcacggaggccgccggcaccgaggacgccgaggcggatgcggagtatgacgcggccctcaaggaggccatacacggcgtgcaggttgccgtgagcagcataaacgaacacatggaggaggtgcgctacgagattgacggactcgaggcagagacgatcggtagcaagtggagcgaagtcgaggaagcgttccctggtaccctgtctataaaatagatagatgagatgagatgttgagcgtggaagactgaagaagaatcacgaacagagagattcgatgtgaatttttgggtactgttcagttcagggtacccgtgttattatacgtcctccaatccaaaatttagttctttc

SEQ ID NO: 35583 - protein, 241 aa, Zea mays subsp. mays
MAEMEPSIGNHMAEDQPTPAASTAEEAAMDADTSGERRSAAALVGLLRGFLAVQQRRAEAYSTLRRGFSEYMAYGGELAYQQLCGNITAEFNDCSKQVLEIISLLSMPEFSRSDLADLLKGVQAHEKEKLHLTAKIQVLKKAGRPSERLVNHADCRSRSMAQHVCVHVKEITEAAGTEDAEADAEYDAALKEAIHGVQVAVSSINEHMEEVRYEIDGLEAETIGSKWSEVEEAFPGTLSIK

SEQ ID NO: 35584 - protein, 238 aa, Zea mays subsp. mays
MEPSIGNHMAEDQPTPAASTAEEAAMDADTSGERRSAAALVGLLRGFLAVQQRRAEAYSTLRRGFSEYMAYGGELAYQQLCGNITAEFNDCSKQVLEIISLLSMPEFSRSDLADLLKGVQAHEKEKLHLTAKIQVLKKAGRPSERLVNHADCRSRSMAQHVCVHVKEITEAAGTEDAEADAEYDAALKEAIHGVQVAVSSINEHMEEVRYEIDGLEAETIGSKWSEVEEAFPGTLSIK

SEQ ID NO: 35585 - protein, 230 aa, Zea mays subsp. mays
MAEDQPTPAASTAEEAAMDADTSGERRSAAALVGLLRGFLAVQQRRAEAYSTLRRGFSEYMAYGGELAYQQLCGNITAEFNDCSKQVLEIISLLSMPEFSRSDLADLLKGVQAHEKEKLHLTAKIQVLKKAGRPSERLVNHADCRSRSMAQHVCVHVKEITEAAGTEDAEADAEYDAALKEAIHGVQVAVSSINEHMEEVRYEIDGLEAETIGSKWSEVEEAFPGTLSIK

SEQ ID NO: 35586 - DNA, 2015 bp, Zea mays subsp. mays
aaaaaaggtggtgcgatcttgttgggcacactccgcctccgcgcgcgggaagagagagagagagagagagagagagagagagagagagagagagagaaggacggagggtggcagggccgccgcgccggtgagccgacccccagccatggcattgccggctccccccgtccgcctggcgctgctgctgctcgtcgcgctgccattctgcgccgcgcatcccgggccgggggccttcaacgctcctcgccacttccagacgcccgcgctccactctgatggatttggcttggtggcaagaaggtcggttgctgaagctcctgctgacatcaacgtcactaccaatagctcctttgtgctggcggcagataggacatatcgaagggaccctttgaatggcttcaggaaatacccgggcggctggaatatcagtgaagtgcactatttcgcttccgtcggatatacagccattccgctgttcgccattgctctcgtgtggtttgtgatctttttcctggttatgcttgggatttgctgccgtcattgctgttgcccgcatcacacctacaagtattcacgaacagcatatgctctatcattgatacttctaatactgttcacatgtgctgcaattgctggatgtgctatgttatacgatggccagggaaaattccacaagagcacaacgactactctgaagtttgttgttagccaggcaaattatactgttgacaaccttaggaacctatctgatagtttgtctgctgcaaagaaggtcgacatagcacagtcctttttgctgcctcctaatgtgcagaacgagatcaatgaaattcaaggaaagctgaactcatcagctactgatcttgctattaaaacaacagataatgccgcgaagatcaaaaaggtgctaaacagagtgcggcttgctttagttgtcattgcggctgtgatgcttcttctggcatttgttggcttcttgttatccatctttggtctggaattccttgtctctgtcttggttattattggatggatattggttactggaacgtttatcctgtgtggtgtatttcttcttctgcacaatgtcgtttcagatacttgcgttgcaatggaagagtgggttgctcatccgacagaacacacagccctggacgaggttatcccctgcgtggagcctgccacggcgaacgaatccctgtacagaagcaggcaggtgacgttcgagctggtgaacgtggtgaaccaggtgatcaccaacgtgtcgaacatgaacttccccccgcagctgacgcctttgtactacaaccagtcggggccactgatgcctctgctctgcaaccccttcacccctgatctgagggaccgcaactgcagcagaggagaggttaccttggacaacgcaacccaggtctggaagaggtacgagtgccagagcaccaccgtctcaggaggagccgagatctgcgcgacgatggggcgcgtcacccccagcatctacgggcagatgaccgcgggcgtgacggtgagccaggggctgtaccagtacgggcctttcctcatccagctgcaggactgcaccttcgtgcgcgacaccttcacgaccatcaaccagggctactgcccggggttggagcgctacagcaagtgggtgtacgtgggcctggtgatggtctcgtcggcggtgatgctgtcgctcatcttctgggtgatctacgccagggagcggcggcaccgcgtgtacagcaagcagcaccagccgtacccggtggaggacaagccggcggcgacggtcccgggcgcttgaattgatatggcccgttccagtgctgctgtgcatactccgcgctagttgggttttacgtggtggtgtaggtggatgatgtaccctggattgttgttcgtttgcttggtgttgctgtatgtttgctgattttaagttgttgtgcattctcgtactgacggtagctgtatgaattgattgtgttgggattggttattattaggtgttcttc

SEQ ID NO: 35587 - protein, 601 aa, Zea mays subsp. mays
KKVVRSCWAHSASARGKRERERERERERERERRTEGGRAAAPVSRPPAMALPAPPVRLALLLLVALPFCAAHPGPGAFNAPRHFQTPALHSDGFGLVARRSVAEAPADINVTTNSSFVLAADRTYRRDPLNGFRKYPGGWNISEVHYFASVGYTAIPLFAIALVWFVIFFLVMLGICCRHCCCPHHTYKYSRTAYALSLILLILFTCAAIAGCAMLYDGQGKFHKSTTTTLKFVVSQANYTVDNLRNLSDSLSAAKKVDIAQSFLLPPNVQNEINEIQGKLNSSATDLAIKTTDNAAKIKKVLNRVRLALVVIAAVMLLLAFVGFLLSIFGLEFLVSVLVIIGWILVTGTFILCGVFLLLHNVVSDTCVAMEEWVAHPTEHTALDEVIPCVEPATANESLYRSRQVTFELVNVVNQVITNVSNMNFPPQLTPLYYNQSGPLMPLLCNPFTPDLRDRNCSRGEVTLDNATQVWKRYECQSTTVSGGAEICATMGRVTPSIYGQMTAGVTVSQGLYQYGPFLIQLQDCTFVRDTFTTINQGYCPGLERYSKWVYVGLVMVSSAVMLSLIFWVIYARERRHRVYSKQHQPYPVEDKPAATVPGA

SEQ ID NO: 35588 - protein, 553 aa, Zea mays subsp. mays
MALPAPPVRLALLLLVALPFCAAHPGPGAFNAPRHFQTPALHSDGFGLVARRSVAEAPADINVTTNSSFVLAADRTYRRDPLNGFRKYPGGWNISEVHYFASVGYTAIPLFAIALVWFVIFFLVMLGICCRHCCCPHHTYKYSRTAYALSLILLILFTCAAIAGCAMLYDGQGKFHKSTTTTLKFVVSQANYTVDNLRNLSDSLSAAKKVDIAQSFLLPPNVQNEINEIQGKLNSSATDLAIKTTDNAAKIKKVLNRVRLALVVIAAVMLLLAFVGFLLSIFGLEFLVSVLVIIGWILVTGTFILCGVFLLLHNVVSDTCVAMEEWVAHPTEHTALDEVIPCVEPATANESLYRSRQVTFELVNVVNQVITNVSNMNFPPQLTPLYYNQSGPLMPLLCNPFTPDLRDRNCSRGEVTLDNATQVWKRYECQSTTVSGGAEICATMGRVTPSIYGQMTAGVTVSQGLYQYGPFLIQLQDCTFVRDTFTTINQGYCPGLERYSKWVYVGLVMVSSAVMLSLIFWVIYARERRHRVYSKQHQPYPVEDKPAATVPGA

SEQ ID NO: 35589 - protein, 429 aa, Zea mays subsp. mays
MLGICCRHCCCPHHTYKYSRTAYALSLILLILFTCAAIAGCAMLYDGQGKFHKSTTTTLKFVVSQANYTVDNLRNLSDSLSAAKKVDIAQSFLLPPNVQNEINEIQGKLNSSATDLAIKTTDNAAKIKKVLNRVRLALVVIAAVMLLLAFVGFLLSIFGLEFLVSVLVIIGWILVTGTFILCGVFLLLHNVVSDTCVAMEEWVAHPTEHTALDEVIPCVEPATANESLYRSRQVTFELVNVVNQVITNVSNMNFPPQLTPLYYNQSGPLMPLLCNPFTPDLRDRNCSRGEVTLDNATQVWKRYECQSTTVSGGAEICATMGRVTPSIYGQMTAGVTVSQGLYQYGPFLIQLQDCTFVRDTFTTINQGYCPGLERYSKWVYVGLVMVSSAVMLSLIFWVIYARERRHRVYSKQHQPYPVEDKPAATVPGA

SEQ ID NO: 35590 - DNA, 1002 bp, Zea mays subsp. mays
gttatgatgtcatacttttactcatgatggttggttggaatatgcatttttgcttattctaaattttataaatactctaatcattgagatatagtaccgatgtggttcctgaaagcctagtccttgtatggttgcactgcactctgtcaagccccagttacaaacatatttttaaacaagtcacttagggtgtttaaagcgagtttcagttccctttgggagtactgcatgtttggcatttttctgtgtgtttcttttgggtgatgtagctttcatacttttattcgtacgtgaatggttgattggaatatgcattttttattattctaaatttgagaaatactccaatcattaggatacaataccaatgtgactcctgaaagcctagttcttgtatgattgtattgcactctgccaaacccaattgagaagtagttttgtaaacaactaacctttgggtgatgaactggtttctctcgtgctatggcttacatctgtttgcatcatttgcagtctgacgtgacgatgtctggtcatacccaacctgaaggaccacaccaacttgattcaaaacatgctgcaaattcatgccgaaagaatgtacccggtacatcgttcgtctcagatttgagggatcacatccacgagttcatcaatgcctctgcagatgaacaccggacatgcttcacaaagactctcaaaaggatgttcgatatgtcaaagactgtcactgatagatcctctgaagcagaggaagctggacccgaaagtgtcttgccacttcagaccacagtgtcgcggtagaagtttcgccacttcatattgcctccgtagaaataggataaagctagaaagcctcgccctccgcggatggagaaatttgttattttgtcactctcaattttgactctattaggtctataactggtcggatcatctgtgtctatgatttgtgggtctgattacatattgacaaagcccacagataataatagcaaaatt

SEQ ID NO: 35591 - protein, 106 aa, Zea mays subsp. mays
MAYICLHHLQSDVTMSGHTQPEGPHQLDSKHAANSCRKNVPGTSFVSDLRDHIHEFINASADEHRTCFTKTLKRMFDMSKTVTDRSSEAEEAGPESVLPLQTTVSR

SEQ ID NO: 35592 - protein, 92 aa, Zea mays subsp. mays
MSGHTQPEGPHQLDSKHAANSCRKNVPGTSFVSDLRDHIHEFINASADEHRTCFTKTLKRMFDMSKTVTDRSSEAEEAGPESVLPLQTTVSR

SEQ ID NO: 35593 - protein, 83 aa, Zea mays subsp. mays
MPLQMNTGHASQRLSKGCSICQRLSLIDPLKQRKLDPKVSCHFRPQCRGRSFATSYCLRRNRIKLESLALRGWRNLLFCHSQF

SEQ ID NO: 35594 - DNA, 2257 bp, Zea mays subsp. mays
ccctgccacgacgcccgcgacaaatccctgcgcgacggcatcttcgcctcccatcccctcccagcttcccctcccactccggccctcacacaaattgcccctcttcttctcctcctctttacacgctgccgaccacggctgccgccaaccacccgccccacccgtccaccgctgccgagtgctagccatttggagctgccgcgccatggcgtccgtggccgccaccaccacgctggcaccggcactcgccccggcgccgggcgcggccagggactgggctcgtgccgccgcgccgggcctcggccgtccgctgctcgctcgaccgtaacgtctccgacatgggcgtcaacgctcccaaagggttattcccacccgagccagagcactacaggggcccgaagctcaaggtggccatcataggggcaggccttgcgggcatgtccaccgctgttgagctcttggaccagggccatgaggttgatttgtacgagtcccgtccgtttatcggtggcaaggttggctcctttgttgacaggcaaggaaaccatatcgagatggggctgcatgtgttcttcgggtgctacagcaatctcttccgcctcatgaagaaggttggcgctgataataatctgctggtgaaggaacatacccatacttttgtaaataaagggggcacgattggtgaacttgattttcggttcccggtgggagctccgttacatggcattcaagcattcctaagaactaatcagctcaaggtttatgataaagcaagaaatgcagttgctcttgcccttagtccagttgttcgggctctggttgatcctgatggtgcattgcagcaagtgcgggacttggatgatataagtttcagtgattggttcatgtccaaagggggtactcgggagagtatcacaagaatgtgggatcctgttcgttacgctttgggtttcattgactgtgataatatcagtgcacgttgcatgcttactattttcaccttgtttgccacaaagacagaggcatccctgttacgcatgttaaagggttcacctgatgtttacttaagtggtccaataaagaagtatataacagacaggggtggtaggtttcacttaaggtggggatgcagagaggttctctatgagaagtcacctgatggagagacctatgttaagggccttctactcaccaaggctacaagtagagagataatcaaagctgatgcatacgtcgcagcctgtgatgttccaggtatcaaaagattacttccatcagaatggagggagtgggaaatgtttgacaatatctacaagttagatggtgtccctgttgtcactgtccagctccgctacaacggatgggtcactgaacttcaagatttggagaaatcaagacaactgcaaagggcggttgggttggataaccttttgtacacggcggatgcagacttttcctgtttttcggaccttgctctctcatctcctgctgattactacattgaagggcaaggttccctgatccaagctgtgctgactcctggagatccatacatgccattgccaaacgaggagatcattagtaaggttcaaaagcaggttgtagaactgttcccatcttcccggggcttagaagttacatggtccagtgtggtaaagatcggacaatcgctgtaccgtgaggctcctggaaacgacccattcaggcctgatcagaagacgcccgttaaaaacttcttcctctctggatcttacacgaaacaggactacatcgacagcatggaaggagcaactctctccggcaggcgaacgtcggcctacatctgcggtgccggggaggagctgctggccctccgaaagaagctactcatcgacgacggcgagaaggcgctggggaacgttcaagtcctgcaggctagctgaacaacccctcctgcactgcagagaagcttggatctttccaaccacacatacatgctggaatggacaaaccaaccaaccattgtcttttctcgcttcagggtgctggcgattcccgcagcaacctcctgtgtatcgtatccaatttgagcattagatctgccccccccccctgcaggcgtttctttcctatccctgatccgagaagcagggtgtagtctaggtggctggcatacgggattacatcaggcagtgtgtaagttcagctggaactcgattggtaattgggatggatgattgatgatatatatatagcacacactgttcttgcgtcttgc

SEQ ID NO: 35595 - protein, 527 aa, Zea mays subsp. mays
MGVNAPKGLFPPEPEHYRGPKLKVAIIGAGLAGMSTAVELLDQGHEVDLYESRPFIGGKVGSFVDRQGNHIEMGLHVFFGCYSNLFRLMKKVGADNNLLVKEHTHTFVNKGGTIGELDFRFPVGAPLHGIQAFLRTNQLKVYDKARNAVALALSPVVRALVDPDGALQQVRDLDDISFSDWFMSKGGTRESITRMWDPVRYALGFIDCDNISARCMLTIFTLFATKTEASLLRMLKGSPDVYLSGPIKKYITDRGGRFHLRWGCREVLYEKSPDGETYVKGLLLTKATSREIIKADAYVAACDVPGIKRLLPSEWREWEMFDNIYKLDGVPVVTVQLRYNGWVTELQDLEKSRQLQRAVGLDNLLYTADADFSCFSDLALSSPADYYIEGQGSLIQAVLTPGDPYMPLPNEEIISKVQKQVVELFPSSRGLEVTWSSVVKIGQSLYREAPGNDPFRPDQKTPVKNFFLSGSYTKQDYIDSMEGATLSGRRTSAYICGAGEELLALRKKLLIDDGEKALGNVQVLQAS

SEQ ID NO: 35596 - protein, 494 aa, Zea mays subsp. mays
MSTAVELLDQGHEVDLYESRPFIGGKVGSFVDRQGNHIEMGLHVFFGCYSNLFRLMKKVGADNNLLVKEHTHTFVNKGGTIGELDFRFPVGAPLHGIQAFLRTNQLKVYDKARNAVALALSPVVRALVDPDGALQQVRDLDDISFSDWFMSKGGTRESITRMWDPVRYALGFIDCDNISARCMLTIFTLFATKTEASLLRMLKGSPDVYLSGPIKKYITDRGGRFHLRWGCREVLYEKSPDGETYVKGLLLTKATSREIIKADAYVAACDVPGIKRLLPSEWREWEMFDNIYKLDGVPVVTVQLRYNGWVTELQDLEKSRQLQRAVGLDNLLYTADADFSCFSDLALSSPADYYIEGQGSLIQAVLTPGDPYMPLPNEEIISKVQKQVVELFPSSRGLEVTWSSVVKIGQSLYREAPGNDPFRPDQKTPVKNFFLSGSYTKQDYIDSMEGATLSGRRTSAYICGAGEELLALRKKLLIDDGEKALGNVQVLQAS

SEQ ID NO: 35597 - protein, 455 aa, Zea mays subsp. mays
MGLHVFFGCYSNLFRLMKKVGADNNLLVKEHTHTFVNKGGTIGELDFRFPVGAPLHGIQAFLRTNQLKVYDKARNAVALALSPVVRALVDPDGALQQVRDLDDISFSDWFMSKGGTRESITRMWDPVRYALGFIDCDNISARCMLTIFTLFATKTEASLLRMLKGSPDVYLSGPIKKYITDRGGRFHLRWGCREVLYEKSPDGETYVKGLLLTKATSREIIKADAYVAACDVPGIKRLLPSEWREWEMFDNIYKLDGVPVVTVQLRYNGWVTELQDLEKSRQLQRAVGLDNLLYTADADFSCFSDLALSSPADYYIEGQGSLIQAVLTPGDPYMPLPNEEIISKVQKQVVELFPSSRGLEVTWSSVVKIGQSLYREAPGNDPFRPDQKTPVKNFFLSGSYTKQDYIDSMEGATLSGRRTSAYICGAGEELLALRKKLLIDDGEKALGNVQVLQAS

SEQ ID NO: 35598 - DNA, 651 bp, Zea mays subsp. mays
  misc_feature (318)..(318): n is a, c, g, or t
  misc_feature (384)..(384): n is a, c, g, or t
tgccaagtcccaacatcttgagctcgatcgcaaaccctcagacacttcttcccccagccgacgtacatgaagcacccgagagacgccggcgccatgccgctctccctcgcgctgtccctcggcgccggcgtggcccccgggcacggcagcagcaagcggccccggcgcgcggcgggcggcggggacggcgagttggtctgcaagacgtgcagccgcgccttcgtctcgttccaggcgctgggcgggcaccggacaagccacctgagggccggccggcacggccttgcgctcgggatgcccgcgccggcgccggcgaangaggcgccgccgcccgcgacgacccacctgtgccacgtctgcgggctcggcttccagatgggccangcgctaggcggccacatgcggcgccaccgcgaggaggctgccgccaccaccgcgcaggcgccgcccgtcctcctccagctcttcgtgtagagttttgcccgtccacggagtctagctagtagaggaattcttcgcgttcctgtcgtcactcgtgagtctgctgcgcatcgtagattcacagtacagttgttggcgtcaattcattcattcattcatttagttgtatacatgtaaataactgattagttattttattgttcctaatct

SEQ ID NO: 35599 - protein, 166 aa, Zea mays subsp. mays
  misc_feature (106)..(106): Xaa can be any naturally occurring amino acid
  misc_feature (128)..(128): Xaa can be any naturally occurring amino acid
PSPNILSSIANPQTLLPPADVHEAPERRRRHAALPRAVPRRRRGPRARQQQAAPARGGRRGRRVGLQDVQPRLRLVPGAGRAPDKPPEGRPARPCARDARAGAGEXGAAARDDPPVPRLRARLPDGPXARRPHAAPPRGGCRHHRAGAARPPPALRVEFCPSTESS

SEQ ID NO: 35600 - protein, 135 aa, Zea mays subsp. mays
  misc_feature (84)..(84): Xaa can be any naturally occurring amino acid
  misc_feature (106)..(106): Xaa can be any naturally occurring amino acid
MKHPRDAGAMPLSLALSLGAGVAPGHGSSKRPRRAAGGGDGELVCKTCSRAFVSFQALGGHRTSHLRAGRHGLALGMPAPAPAXEAPPPATTHLCHVCGLGFQMGXALGGHMRRHREEAAATTAQAPPVLLQLFV

SEQ ID NO: 35601 - protein, 126 aa, Zea mays subsp. mays
  misc_feature (75)..(75): Xaa can be any naturally occurring amino acid
  misc_feature (97)..(97): Xaa can be any naturally occurring amino acid
MPLSLALSLGAGVAPGHGSSKRPRRAAGGGDGELVCKTCSRAFVSFQALGGHRTSHLRAGRHGLALGMPAPAPAXEAPPPATTHLCHVCGLGFQMGXALGGHMRRHREEAAATTAQAPPVLLQLFV

SEQ ID NO: 35602 - DNA, 2310 bp, Zea mays subsp. mays
gcacgagaccattacctagaacatcctaatcgaaaaccagtcgacttcccggtctcggcttttgccgaaagaaaggcacccggaacccaacgacagcggcagcagtcgagtccgggacgggccggggcaaagctgggatgaggatgaaaaggggggctgaataaaaaggcgggggaggaggcgagaaggctacagcggcggcaggccaggccagcagagcgcagaggaccgccgctcggaaagtgcggagccgtttcccctctagctgctcatgctctctgcttgcctccgtccactcacagcccacgtccacgcctcgcgctcttctccaggctcccaggtgctccccgatcaatcgcttccgctgctagcgcgcgcgcgatccccgaggtcgcgcgcttgatcgcgctcaacgccatgtcgtccgccgcgggcgggtatggcggcggcggcggcgcgggaagcggcgccgagccccacggccacgccgacttcctgctgcaccaccatgcacagcacgtcgccgcgcagcagctctaccacgtgccccagcacagccgccgcgagaagctgcggttcccccaagacgacgcgcccccacacgcctccgcttccgtcccgcagcagcacggcggggcggtggcctggccgccgcctccgccgccaccggcgttctactcctacgcgtcctcttccacgtcgtcctactccccgcacagccccacgctggcgcaggcacagctcgtcgtggcgcacggcctcgccccgccgctctcgtcgcagatcccgacgcagaacttgcgcgctctcgctctcctcctcgtcctcgaacccgccgcccccgcccccgcagccgaggaggcctcacgccgcgcccttcgggcccttcaccggctacgcggctgtgctcgggcgctcccgtttcctcctccccgcggagaagctgctcgaggagatctgcgacgtcgggggcgcggcctcgcgcgtggaccgcagcgcctccgacgagggcctgctcgacgctgacccgatggaatccatcgatcacgaaatggacggcgccgaccgcgtcgccaatgacgctggcccaatctccggcgccgagcagcagtggaagaagactaggctcatctctatgatggaagaggtttgcaagcggtaccggctgtactaccagcaggttcacacggtgatcaactcgttcgagacggtcgccgggttcagcaacgctgccccgttcgcggcgatggcgctgagagccatggcgaagcacttcaagtgcttgaagggcatgatactgagccagctgcgcaacatcaccaaggcccctgccggcaaggaggggctcagcaaggacatcgccatgttcgggcttgccggtggtagcgcggccgccctccagagaggtagcagtgtgggtgccttcggccagcccgcacaacatctggcggccacagagagggctgccggagcgtgcggtgtctgttctccgcgcttggctcttcgaacacttcctgcacccatatcctactgatggagacaagcaaatgcttgctaaacaaacgggtttaacacggaaccaggtatccaactggtttataaatgcaagggttcgtctttggaaaccaatggtggaagagatccacaaccttgagatgaggcaggtgcacaaacaccctgttctcgacaagggccagcacgtgctgcatcaccaaacccagcattcgttcgagagcagtggaaagccttctgacccttccgactctcagcttggccaaagcagcagcatcacgaggaaccacaacatccctgcgtcccagggatttgccgatgagctctccgagatgtcccattctattcagcaggggcaggtaaccttcgcatacaatgggatgtcggcgccacaccacagcctcgcttcgtcacagcaccaccagcaggccgggccgatgagcggcattggtggcgcggggaacggtggcgtctccctcaccctcggcctccaccagaacaacagagtctgcatagccgagccactcccggcgtccgtccctcccaacctcgctcaccgttttgggttggaggaggtcagcgacccctacatgatgggctctttcgggaaccaggaccggcatttcggcaaggagattggcggccatttggtgcatgattttgttggctgacatggcagctgctgctgcattgttgcttctggtcagctgatctgatctcagcttgctgatggtgcacaagcatgtatttgtaccactactagtatgttagaatggtatataagtgtatcacttggtg

SEQ ID NO: 35603 - protein, 364 aa, Zea mays subsp. mays
MAAAAAREAAPSPTATPTSCCTTMHSTSPRSSSTTCPSTAAARSCGSPKTTRPHTPPLPSRSSTAGRWPGRRLRRHRRSTPTRPLPRRPTPRTAPRWRRHSSSWRTASPRRSRRRSRRRTCALSLSSSSSNPPPPPPQPRRPHAAPFGPFTGYAAVLGRSRFLLPAEKLLEEICDVGGAASRVDRSASDEGLLDADPMESIDHEMDGADRVANDAGPISGAEQQWKKTRLISMMEEVCKRYRLYYQQVHTVINSFETVAGFSNAAPFAAMALRAMAKHFKCLKGMILSQLRNITKAPAGKEGLSKDIAMFGLAGGSAAALQRGSSVGAFGQPAQHLAATERAAGACGVCSPRLALRTLPAPISY

SEQ ID NO: 35604 - protein, 341 aa, Zea mays subsp. mays
MHSTSPRSSSTTCPSTAAARSCGSPKTTRPHTPPLPSRSSTAGRWPGRRLRRHRRSTPTRPLPRRPTPRTAPRWRRHSSSWRTASPRRSRRRSRRRTCALSLSSSSSNPPPPPPQPRRPHAAPFGPFTGYAAVLGRSRFLLPAEKLLEEICDVGGAASRVDRSASDEGLLDADPMESIDHEMDGADRVANDAGPISGAEQQWKKTRLISMMEEVCKRYRLYYQQVHTVINSFETVAGFSNAAPFAAMALRAMAKHFKCLKGMILSQLRNITKAPAGKEGLSKDIAMFGLAGGSAAALQRGSSVGAFGQPAQHLAATERAAGACGVCSPRLALRTLPAPISY

SEQ ID NO: 35605 - protein, 211 aa, Zea mays subsp. mays
MLAKQTGLTRNQVSNWFINARVRLWKPMVEEIHNLEMRQVHKHPVLDKGQHVLHHQTQHSFESSGKPSDPSDSQLGQSSSITRNHNIPASQGFADELSEMSHSIQQGQVTFAYNGMSAPHHSLASSQHHQQAGPMSGIGGAGNGGVSLTLGLHQNNRVCIAEPLPASVPPNLAHRFGLEEVSDPYMMGSFGNQDRHFGKEIGGHLVHDFVG

SEQ ID NO: 35606 - DNA, 2249 bp, Zea mays subsp. mays
  misc_feature (1778)..(1779): n is a, c, g, or t
aatgaatggcgtttatttaagtctccaccctccgccccggggaactcttttctgtgtatcgcggaattttttgggttctcgggctccgccgcgatcccatccccatccccgccttgccgttgccgttgccggcccccccggttctcccggagctttctttctggccggcgcagtagagaagcaagacagaattgcggcggcgcctgcccgcgcaaaggaaataatcagcactgtttgccaaaggcagctcctgacgcatggctagtacttaaggatactttatgtgcagaccatgaagatagatgacgaaaggccttaccaaactcatatttttcatgatcttgcatctaacggcagtcctaaattagactgtgaggctgaaagacaaagtaatcacaaggttgaggcagataaaatggttgagcaaaccaatcaatctgaagttagctttgtgaaggctgagcatctgaatggaggtaaaattcggaagacacgcattgaggattactcctatgacaaggatgttgtagagatcaaactgccagacacagatctttcttctgattacggtgtccattttgtcaaggatgtctgcattgatgaaggagttcttccagatcaaaagatttcatcagaaaagcaagtagaccaaaaggtgtctataaactttgattcctcggaatatacaaacggggacctaagggaagatataagtgctgactctacaaaaactgcacatgaattaaaatcagaaatagttgtcctacctgtcctgtgtgatactcataacaataatactgtggaacagaactcctcatgcaaaaagcaggatcttgaagataacaatactatagatgtatctaccgattctcacgatgagggattaaatcccaaacaattaccatttcatgaagttgcacaagattaccaggaggttgacagtgtcattccggagagcaatgaaaatcaggaccggcttttcactggagatgcaacccatcaggtttcatcgaatgattgttatgaagctggaattggtatcgcgtcagaggccagtaacatcattcacaatgatttagcagtagaatcagccgctgctgatttcccggtggtgatacctgaggaagttgctgtcactgcaacattgggtatggaaggatccaaccaagttaatcactataacccttttattgcctatggatcgctagacgagacatgggaacccaatctctctctcgctactactgtggatgccgcttctatagcacccatctgtcctgtcgaaaagacagatagttttagtgatcttgtcaacaggccactggaaggatttgatcctattgaactagacgaagctataattgaagagaacaggtcagattcagttgaagaaagctcgagcacattggacgtccaagcatctgaacaacgcgatgatcagagagagagtctcactaataatgacgtgaaaactgatgcagcacatgaaacgggcactgctatatctctatccaccagcaatggagagcacagtggcgtcaagggtgagaaatgtcagaaacatgagactgatggtcgagatacagatgatttcaacccaagagatgtggagcctggcacaaaagtaagcgaggacacaacggatgttaagagctcagctcatgtgcagacagaatctgtggttcaacaaaacggacctgatagcgcgaaagtgactactgcacagactgttattcgcaaccccttcgagtccagcttctctggacctagcattacgnnaggtccactaacgccctctggtcacataccatattctggcaacatttctcttcgatcagagagcagcacaacgagtactcgatccttcgcgtttcctgtactacagaacgagtggaacagcagccccgtgaagatggccaaggccgaccgcaggcgtcagaaggaagaccgaggctggggttacagaatcctttgctgtaaattctgaatggcgcttgcctcccctgcatcctttttgcctgtcgagttgagcccttcgtctctgtcatgcttgagccccgtggaggtccatgttaaattcattcatcaaatgtttctctcctctcctctcctcttgtctttctgctcccctgctgttcttatttatctctagcaggttaatggcttgtcggattcggtagtggcttgtaatttacagaacactatgaagagtgaggactcaagtcatagctttggtatagaatttgcgg

SEQ ID NO: 35607 - protein, 564 aa, Zea mays subsp. mays
  misc_feature (496)..(496): Xaa can be any naturally occurring amino acid
MKIDDERPYQTHIFHDLASNGSPKLDCEAERQSNHKVEADKMVEQTNQSEVSFVKAEHLNGGKIRKTRIEDYSYDKDVVEIKLPDTDLSSDYGVHFVKDVCIDEGVLPDQKISSEKQVDQKVSINFDSSEYTNGDLREDISADSTKTAHELKSEIVVLPVLCDTHNNNTVEQNSSCKKQDLEDNNTIDVSTDSHDEGLNPKQLPFHEVAQDYQEVDSVIPESNENQDRLFTGDATHQVSSNDCYEAGIGIASEASNIIHNDLAVESAAADFPVVIPEEVAVTATLGMEGSNQVNHYNPFIAYGSLDETWEPNLSLATTVDAASIAPICPVEKTDSFSDLVNRPLEGFDPIELDEAIIEENRSDSVEESSSTLDVQASEQRDDQRESLTNNDVKTDAAHETGTAISLSTSNGEHSGVKGEKCQKHETDGRDTDDFNPRDVEPGTKVSEDTTDVKSSAHVQTESVVQQNGPDSAKVTTAQTVIRNPFESSFSGPSITXGPLTPSGHIPYSGNISLRSESSTTSTRSFAFPVLQNEWNSSPVKMAKADRRRQKEDRGWGYRILCCKF

SEQ ID NO: 35608 - protein, 523 aa, Zea mays subsp. mays
  misc_feature (455)..(455): Xaa can be any naturally occurring amino acid
MVEQTNQSEVSFVKAEHLNGGKIRKTRIEDYSYDKDVVEIKLPDTDLSSDYGVHFVKDVCIDEGVLPDQKISSEKQVDQKVSINFDSSEYTNGDLREDISADSTKTAHELKSEIVVLPVLCDTHNNNTVEQNSSCKKQDLEDNNTIDVSTDSHDEGLNPKQLPFHEVAQDYQEVDSVIPESNENQDRLFTGDATHQVSSNDCYEAGIGIASEASNIIHNDLAVESAAADFPVVIPEEVAVTATLGMEGSNQVNHYNPFIAYGSLDETWEPNLSLATTVDAASIAPICPVEKTDSFSDLVNRPLEGFDPIELDEAIIEENRSDSVEESSSTLDVQASEQRDDQRESLTNNDVKTDAAHETGTAISLSTSNGEHSGVKGEKCQKHETDGRDTDDFNPRDVEPGTKVSEDTTDVKSSAHVQTESVVQQNGPDSAKVTTAQTVIRNPFESSFSGPSITXGPLTPSGHIPYSGNISLRSESSTTSTRSFAFPVLQNEWNSSPVKMAKADRRRQKEDRGWGYRILCCKF

SEQ ID NO: 35609 - DNA, 2023 bp, Zea mays subsp. mays
cccctttttccaaatccgtctccgccctcacgcacgcggcccaactagcctaacaaaccctagctagatttagaaaaaaaatttgtccccaatccgaaccgacgaggagctcgccgccgtgagatgtccgagtacgacgagcgctaccagggcaacggcgacatgcccgcagccgaaggcggctatccgcaggccgagtacgccgccgccgccgcgcctgccgccgggggttcgccgcccgcagacagcaagccctccgggttctccgaccacgccgacggccgctcctcccagcaccagcatgagacacaatcacatgacagtggttcctcgaaatctcgagaaagggaccgagaacgcgataagggcaaggatagggagcgtgacagggatcgtggccgagaaaaggggagggaccgagacagggataaggatcgtgaaagaagtgacagagacagagatcgcgatcgccaccacagggaccatcgagagcgcagcgagaaaagggaacaccgtgatcgttctgatgatcgtgaccgtcaccgtgatggtcgtgaccgccaccgtgatgatcgtgattctgagaggagaagagatcgtgacagagatggtcatcgtaggcatcgctcccgctccccttctaagagtcgtgaccgtgaccgcagatctagatctcgttcacgctctcgatcaaagagcaagcgcgtgagtggttttgaccaagcacctccacaacatgcacttcctattgttgccgctggtgctatccctggtcagcttcctggtatcactgctcctattcccggggttggggtgcttccgaacttgtataatttggctgcaggacagttcaacccccttgttattcagccacaagccatgacacaacaggctacccggcatgctcggcgtgtctatgtgggtggacttcctccaacagctaatgagcagaccgttgccatattcttcaatggagttatggctgctattggaggaaacacagctggtccaggtgatgctgttcttaatgtctatataaaccatgacaagaaatttgcttttgtggagatgagatctgtggaggaagcaagcaatgcaatggctttagatggcataatgtttgagggagcaccagtcaaggttagaagaccaacggactataatccttccctagcagctgctcttggcccgagccagccaaatccaaatctcaatcttgctgctgttggcttaacacctggctctgctggaggattagaaggtccagaccggatctttgtaggtggtctaccatattatttcactgaggctcaagtgcgggagttgctcgagtccttcggacctctgcgtggattcgatcttgtgaaggatagagaaactggtaactcgaagggatatgccttctgtgtttaccaggatcttaatgtcactgacattgcctgtgctgcccttaatggcatcaagatgggggacaagactcttactgttagtagggcaaaccaaggagcttctcagcctaggccagagcaagaaagcatcctgctgcaggcacagcagcaggtgcaaatgcagaaactcgtataccaagtcggaggtgccctgccgacaaaagttgtctgcctgacacaggtagtgacagcagatgaactgagagatgatgaggaatacaatgacattgtggaggacatgagggaagaaggacgcaaatatggtaacttggtgaaagttgtaattccacgacctgaccccagcgatgccccagttgctggtgttggaaaggtgtttttggaatatgcagatgtcgagggctcgaccaaagcaaagacggggatgcatgggcggaaatttggcgggaaccaggtggtggccgtgttctatcccgaggacaagttcgctgctgagcagtatgactgaaagttgtagaacctgttctagagttgcaacacacaatgtgtttttttaaaatctttgagggtaccggtttctcttgaatttgaatcttatccagttataagtttggtgc

SEQ ID NO: 35610 - protein, 596 aa, Zea mays subsp. mays
MSEYDERYQGNGDMPAAEGGYPQAEYAAAAAPAAGGSPPADSKPSGFSDHADGRSSQHQHETQSHDSGSSKSRERDRERDKGKDRERDRDRGREKGRDRDRDKDRERSDRDRDRDRHHRDHRERSEKREHRDRSDDRDRHRDGRDRHRDDRDSERRRDRDRDGHRRHRSRSPSKSRDRDRRSRSRSRSRSKSKRVSGFDQAPPQHALPIVAAGAIPGQLPGITAPIPGVGVLPNLYNLAAGQFNPLVIQPQAMTQQATRHARRVYVGGLPPTANEQTVAIFFNGVMAAIGGNTAGPGDAVLNVYINHDKKFAFVEMRSVEEASNAMALDGIMFEGAPVKVRRPTDYNPSLAAALGPSQPNPNLNLAAVGLTPGSAGGLEGPDRIFVGGLPYYFTEAQVRELLESFGPLRGFDLVKDRETGNSKGYAFCVYQDLNVTDIACAALNGIKMGDKTLTVSRANQGASQPRPEQESILLQAQQQVQMQKLVYQVGGALPTKVVCLTQVVTADELRDDEEYNDIVEDMREEGRKYGNLVKVVIPRPDPSDAPVAGVGKVFLEYADVEGSTKAKTGMHGRKFGGNQVVAVFYPEDKFAAEQYD

SEQ ID NO: 35611 - protein, 583 aa, Zea mays subsp. mays
MPAAEGGYPQAEYAAAAAPAAGGSPPADSKPSGFSDHADGRSSQHQHETQSHDSGSSKSRERDRERDKGKDRERDRDRGREKGRDRDRDKDRERSDRDRDRDRHHRDHRERSEKREHRDRSDDRDRHRDGRDRHRDDRDSERRRDRDRDGHRRHRSRSPSKSRDRDRRSRSRSRSRSKSKRVSGFDQAPPQHALPIVAAGAIPGQLPGITAPIPGVGVLPNLYNLAAGQFNPLVIQPQAMTQQATRHARRVYVGGLPPTANEQTVAIFFNGVMAAIGGNTAGPGDAVLNVYINHDKKFAFVEMRSVEEASNAMALDGIMFEGAPVKVRRPTDYNPSLAAALGPSQPNPNLNLAAVGLTPGSAGGLEGPDRIFVGGLPYYFTEAQVRELLESFGPLRGFDLVKDRETGNSKGYAFCVYQDLNVTDIACAALNGIKMGDKTLTVSRANQGASQPRPEQESILLQAQQQVQMQKLVYQVGGALPTKVVCLTQVVTADELRDDEEYNDIVEDMREEGRKYGNLVKVVIPRPDPSDAPVAGVGKVFLEYADVEGSTKAKTGMHGRKFGGNQVVAVFYPEDKFAAEQYD

SEQ ID NO: 35612 - protein, 344 aa, Zea mays subsp. mays
MTQQATRHARRVYVGGLPPTANEQTVAIFFNGVMAAIGGNTAGPGDAVLNVYINHDKKFAFVEMRSVEEASNAMALDGIMFEGAPVKVRRPTDYNPSLAAALGPSQPNPNLNLAAVGLTPGSAGGLEGPDRIFVGGLPYYFTEAQVRELLESFGPLRGFDLVKDRETGNSKGYAFCVYQDLNVTDIACAALNGIKMGDKTLTVSRANQGASQPRPEQESILLQAQQQVQMQKLVYQVGGALPTKVVCLTQVVTADELRDDEEYNDIVEDMREEGRKYGNLVKVVIPRPDPSDAPVAGVGKVFLEYADVEGSTKAKTGMHGRKFGGNQVVAVFYPEDKFAAEQYD

SEQ ID NO: 35613 - DNA, 1495 bp, Zea mays subsp. mays
aaacccgaggcgctgttctgccaggattcggcatctttggttgcccacgtatgtgatcttcgtgccttgcttaggttctggggtgttagtgctaattgttgatgggttaactagattccggtgctgctagcatgagatggccacttccacatctcagcatgcgctttcatccatcaaattgctgtccacaggctgcttgcatcccgataagagaaattgccgcgtgctttctgtttcagtagggcgtcgctgtcccagtgcccgcaatttgggtctactttgtgcttcaaactctcaatcttcagtgattgagccggtccagctaccgaggagccctaaaagtggtgtaactccaaagaaatcaggtgaaagcgcactcattctgatacggcatggagaatcgttgtggaacgagaagaacctgtttactggatgtgtcgatgttccactgacccctaagggcgttgacgaggcaattgaggcggggaaaaggatatgcaatatcccagtcgatgtaatatacacttcgtcgctgattcgggctcagatgaccgctatgcttgccatgatgcagcatcgccgaaagaaggttccaatcattttgcacaacgagagtgaacaagctcacatgtggagtcagatatacagtgaagagacaaagaagcagtccattcctgtcataacagcttggcaattgaatgaacggatgtatggtgagcttcaaggccttaacaaacaagaaaccgccgatcgatttggtaaagaacaagttcatgaatggcgtcgcagttatgatattcctcccccaaatggcgagagccttgagatgtgtgcagagagagcagttgcttatttcaaagaccaaattatacctaaacttgtggatggaaagcatgtaatgatcgcggcccatgggaattcacttcgttcgatcataatgcatttggacaagctgacttctcaagaggttatcagccttgagttgtctactggcattcctatgctgtatatatttaaggaagggaaattcatcaggcgaggaagccccgctggaccttctgaagcaggtgtctatgcttataccaagaatttggctcagtacagacagaagcttgatggcatagttcagtagccatctgcaggcttttcgtttgctactcatccgtcgaacatgcatttggtcccggaaaacaaggggccaagctcctaccatctcatcgacattcaactgccaagtagtccattcctgtcacaagtttgtagcggctcatttatctcttcagaaacctcccaccacgtggtagtaaaatatacggagtagatgccaattttaggtggtgagctgtagatacaaatggagatatactggatggcagttgtgttatctttccgctttccccagtcacttagatctcagatgtttgtaatggtgcagtaataaacacagcgaactgcatggaacgagacgctgttatcgaatccttgttccccgtct

SEQ ID NO: 35614 - protein, 331 aa, Zea mays subsp. mays
MATSTSQHALSSIKLLSTGCLHPDKRNCRVLSVSVGRRCPSARNLGLLCASNSQSSVIEPVQLPRSPKSGVTPKKSGESALILIRHGESLWNEKNLFTGCVDVPLTPKGVDEAIEAGKRICNIPVDVIYTSSLIRAQMTAMLAMMQHRRKKVPIILHNESEQAHMWSQIYSEETKKQSIPVITAWQLNERMYGELQGLNKQETADRFGKEQVHEWRRSYDIPPPNGESLEMCAERAVAYFKDQIIPKLVDGKHVMIAAHGNSLRSIIMHLDKLTSQEVISLELSTGIPMLYIFKEGKFIRRGSPAGPSEAGVYAYTKNLAQYRQKLDGIVQ

SEQ ID NO: 35615 - protein, 194 aa, Zea mays subsp. mays
MTAMLAMMQHRRKKVPIILHNESEQAHMWSQIYSEETKKQSIPVITAWQLNERMYGELQGLNKQETADRFGKEQVHEWRRSYDIPPPNGESLEMCAERAVAYFKDQIIPKLVDGKHVMIAAHGNSLRSIIMHLDKLTSQEVISLELSTGIPMLYIFKEGKFIRRGSPAGPSEAGVYAYTKNLAQYRQKLDGIVQ

SEQ ID NO: 35616 - protein, 191 aa, Zea mays subsp. mays
MLAMMQHRRKKVPIILHNESEQAHMWSQIYSEETKKQSIPVITAWQLNERMYGELQGLNKQETADRFGKEQVHEWRRSYDIPPPNGESLEMCAERAVAYFKDQIIPKLVDGKHVMIAAHGNSLRSIIMHLDKLTSQEVISLELSTGIPMLYIFKEGKFIRRGSPAGPSEAGVYAYTKNLAQYRQKLDGIVQ

SEQ ID NO: 35617 - DNA, 457 bp, Zea mays subsp. mays
  misc_feature (18)..(18): n is a, c, g, or t
agcatgggacttccaggnatgcctgtgccagcaatacctggcagcatgtacggttccagagaagaaaaaggaaacgaagggtttactttcaaagctgcacctttggaccgatcagctaacttatgttacagtagtgctggtaacttagtgatgggtccatgagtgcctcttctgatggctatacctccatgaatcacacctatcaccgtcgtcatgaagttctcttcagaagatgctcctctacttcgtatcgtccgcacataattggaggcggtcaaggtatacctgggagctgcagcgatggcacatgatgtcttttgctgtgtggatgaactcgctgtatgtgacgctgcagctaaacattcgttgtacagcaaaccagttatgattaattagattatgataatttggttatgtaaacttctttctggacataaccgaagagccatctggtggc

SEQ ID NO: 35618 - protein, 53 aa, Zea mays subsp. mays
  misc_feature (6)..(6): Xaa can be any naturally occurring amino acid
SMGLPXMPVPAIPGSMYGSREEKGNEGFTFKAAPLDRSANLCYSSAGNLVMGP

SEQ ID NO: 35619 - protein, 52 aa, Zea mays subsp. mays
  misc_feature (5)..(5): Xaa can be any naturally occurring amino acid
MGLPXMPVPAIPGSMYGSREEKGNEGFTFKAAPLDRSANLCYSSAGNLVMGP

SEQ ID NO: 35620 - protein, 51 aa, Zea mays subsp. mays
MLLYFVSSAHNWRRSRYTWELQRWHMMSFAVWMNSLYVTLQLNIRCTANQL

SEQ ID NO: 35621 - DNA, 678 bp, Zea mays subsp. mays
cttctcccttataaaaccgaacgcccagggccctccatgttcaatctcgttgtccgttgtactctctctctctattcgttccccgcctcaccccgagccagccgtctcgctagggtttcgccgccgccgccgccatgcctcgccgcagctcaggaaggtctgccccacgcccagctccccgtgctgctccagtgaggaacccgccacagccagcacgccaggctcctcctccagctcctgttcgagatggtggtggctccatgtttggaggaattgggtccaccattgctcaaggtatggcgtttggcacgggtagtgccatggcacacagggctgttgatgctgtattaggtccccggaccattcagcatgagactgtttcctcagaagctgctgctgctgcccctgcccctccagtgatgaatgctgatgcttgcagcatccattctaaggctttccaagattgtctcaacaactatggcagcgagatcagcaagtaccagttctacctagacatgctgaacgagtgccgccgtggtggtgtgtctgcctaagctgcctctggggttattcatggattttctttcggtgatgctatctcattaataagataccgtgaaacttttgtctccacagcttgaagctaaacttcctgggattaatacattttgttatcct

SEQ ID NO: 35622 - protein, 139 aa, Zea mays subsp. mays
MPRRSSGRSAPRPAPRAAPVRNPPQPARQAPPPAPVRDGGGSMFGGIGSTIAQGMAFGTGSAMAHRAVDAVLGPRTIQHETVSSEAAAAAPAPPVMNADACSIHSKAFQDCLNNYGSEISKYQFYLDMLNECRRGGVSA

SEQ ID NO: 35623 - protein, 104 aa, Zea mays subsp. mays
FSLIKPNAQGPPCSISLSVVLSLSIRSPPHPEPAVSLGFRRRRRHASPQLRKVCPTPSSPCCSSEEPATASTPGSSSSSCSRWWWLHVWRNWVHHCSRYGVWHG

SEQ ID NO: 35624 - protein, 97 aa, Zea mays subsp. mays
MFGGIGSTIAQGMAFGTGSAMAHRAVDAVLGPRTIQHETVSSEAAAAAPAPPVMNADACSIHSKAFQDCLNNYGSEISKYQFYLDMLNECRRGGVSA

SEQ ID NO: 35625 - DNA, 786 bp, Zea mays subsp. mays
gttgcgcgagcccacacgtcagatcttcttgtgtcgcaagacaggcccacaaactgggactaatggttcgagagtcgagacttcgagtgccttctcccttataaaaccgaacgcccagggccctccgtgttcaatctcgttgcccgttgtgctctctctctctattcgttccccgcctcaccccgagccagccgtctcgctagggtttcgccgccgccgccgccgccgccgccgctatgcctcgccgcagctcaggaaggtctgccccacgcccagctacccgtgctgctccagtgaggaacccgccacagccagcacgcccaggctcctcctccagctcctgttcgagatggtggtggctccatgtttggaggaattgggtccaccattgctcaaggtatggcgtttggcacgggtagtgccatggcacacagggctgttgatgctgtattaggtccccggaccattcagcatgagactgttgcctcagaagctgctgctgctgcccctgcccctccagtgatgaatgctgacgcttgcagcatccattctaaggctttccaagattgtctcaacaactatggcagcgagatcagcaagtgccagttctacctagacatgctgaacgagtgccgccgtggtggtgtgtctgcctaagctgcctctggggttattcgtggattttctttcggtgatgctatctcattaataagataccgtgaaacttttgtctccacagcttgaagctaaacttcctgggattaatacattttgttatcctatgcc

SEQ ID NO: 35626 - protein, 150 aa, Zea mays subsp. mays
LREPTRQIFLCRKTGPQTGTNGSRVETSSAFSLIKPNAQGPPCSISLPVVLSLSIRSPPHPEPAVSLGFRRRRRRRRRYASPQLRKVCPTPSYPCCSSEEPATASTPRLLLQLLFEMVVAPCLEELGPPLLKVWRLARVVPWHTGLLMLY

SEQ ID NO: 35627 - protein, 97 aa, Zea mays subsp. mays
MFGGIGSTIAQGMAFGTGSAMAHRAVDAVLGPRTIQHETVASEAAAAAPAPPVMNADACSIHSKAFQDCLNNYGSEISKCQFYLDMLNECRRGGVSA

SEQ ID NO: 35628 - protein, 85 aa, Zea mays subsp. mays
MAFGTGSAMAHRAVDAVLGPRTIQHETVASEAAAAAPAPPVMNADACSIHSKAFQDCLNNYGSEISKCQFYLDMLNECRRGGVSA

SEQ ID NO: 35629 - DNA, 2480 bp, Zea mays subsp. mays
  misc_feature (601)..(601): n is a, c, g, or t
  misc_feature (603)..(603): n is a, c, g, or t
  misc_feature (621)..(621): n is a, c, g, or t
acggcgcacgccatagcccttcccgcaagcagccgagcaggctcctccccaaatccttccccgatgctgcggcgcaacagcgagtgcgaaatcgagtccgagctctgacgcgctcgcatggagctctggttctaggtgtgggctgcgctcctcgtatggatccagatgttctcgtggaaccgtaagcagtcctcctcctccggctcgccctcgccctcctcctcctccggccgccgccgcggcggggcggacgcctccatggactccagcagccgcggcggcggcgggagcgggagcgggagccgcggacggagcccgcggttggatcgccgcaacgcggtgaagcgcgtcgactacgaggcgggcgcgggggcgtccgtgtcggtggccgcgtcgtggtcgttctcgtcctccgcggaccagcagcgttcgccgggcccggggctccagccttcgcgctccctagaccttgcccctggagcggacctccggatcagcgggagcgtagagggggaggtcgacgaactctgtcgcagcctggggctctcggggcccgaggatttcgccatccccgtcgcggcctgggaggcgcgcaagtcgngntctaactccgaccttctnccgcgctcccaccccgacccgtccacacccgccgacgaaccctcgccaattgcgcgtgtggtctcggcgcccgatgttcagccgactcgcttcgtccctgcccccattcctgctaccgttgcggcgcccgaggagtcacccaaggctgtccctgccgttgctgttgcggctcccgtcgggggtttgcccctgccttcgccaaggaggggaggcggggaggtagggatacgtggtgcacgaccgcctttactctccccgcctccgccaattggtgcactcgctcctccgccggtgaggaggtccttcgttgacgatgacatgactaggtccgcttgggacattgtgcagtcgtttgctcccagggaacagggaagtgaaccgggagagcgtttggacactcgttgcaattcggacacagaggaagagagtgaggctgaggatggggtggcagctgtggagggcgagctgaaagagttgaggataggagagaccttcgaggggctcactggaacttcttcattgtcaacgacaaatgatgatgatgcgtccagtacaaccacggaggccatgttcatcatctcaccgaatggcaagttcaagcgtaagattaagtcatggatgcgtggtgctcttctgggaagcggctcatttgggatggtgtacgaggggatcagtgatgagggtgcttttttcgctgtgaaggaagtatctttgcttgaccaaggaagcaacgcacaacaatctattgttgcacttgagcaggaaattgcactcctcagtcagtttgaacatgaaaatatagtccagtattatggaactgacaaggaagaatccaaactctatatttttattgagcttgtcacgcaaggatctctttcatccctctaccaaaagtataaactacgagaatcacaagtctctgcatacacaaggcagattcttaacggattggtttacctgcatgagagaaatgtggtccacagagatatcaagtgtgccaatatattggtgcatgcaaatggatctgtaaagcttgcagattttggattggcaaaggaggttaccctttgtctttctgttcattatttccatgttcgcagtgtcaaattgtcttatggttgtagtttttttgttcaactttcagatgtcaaaaatcaatatgctaaggtcatgcaaaggaagtgtttactggatggcacctgaggttattaatcctaaaaagatgtatgggccttcagctgatatatggagccttggctgcaccgtgttggaaatgctaacccggcaaataccatttcctaatattgagtggacaaatgctttcttcatgattggaagaggggaacagcctactattccctgctacctgtcgaaggaggcacaagatttcattggccagtgtgtaagagttgatcctgagagccggccttctgcatcacaacttttggagcacccattcgttaacagaccactgcgggcttcatttgaatcttcatctcccccagccatctgattgtactattgatatagtggggtgtttctcgttgtgaggccaatgcgcaggtcacgtgttgatcgtcatgatttacgctactggttccagaatagaattatgtgggcgtgttagtttagtatttgtagtccatagggtttggtaggcagcattgctgtgtttttgtattctttgggtgttcttcatcaggcatagggttttcttcctggttactacgtagatttgtgtacacttgtaggtaaaagggttgcaaacttgcaattgcctctggtgtagggttaggcagttagccgatgtttgtgaatattagacatcaccattctttacttaatggtttgttgaagcg

SEQ ID NO: 35630 - protein, 552 aa, Zea mays subsp. mays
  misc_feature (146)..(146): Xaa can be any naturally occurring amino acid
  misc_feature (152)..(152): Xaa can be any naturally occurring amino acid
MFSWNRKQSSSSGSPSPSSSSGRRRGGADASMDSSSRGGGGSGSGSRGRSPRLDRRNAVKRVDYEAGAGASVSVAASWSFSSSADQQRSPGPGLQPSRSLDLAPGADLRISGSVEGEVDELCRSLGLSGPEDFAIPVAAWEARKSXSNSDLXPRSHPDPSTPADEPSPIARVVSAPDVQPTRFVPAPIPATVAAPEESPKAVPAVAVAAPVGGLPLPSPRRGGGEVGIRGARPPLLSPPPPIGALAPPPVRRSFVDDDMTRSAWDIVQSFAPREQGSEPGERLDTRCNSDTEEESEAEDGVAAVEGELKELRIGETFEGLTGTSSLSTTNDDDASSTTTEAMFIISPNGKFKRKIKSWMRGALLGSGSFGMVYEGISDEGAFFAVKEVSLLDQGSNAQQSIVALEQEIALLSQFEHENIVQYYGTDKEESKLYIFIELVTQGSLSSLYQKYKLRESQVSAYTRQILNGLVYLHERNVVHRDIKCANILVHANGSVKLADFGLAKEVTLCLSVHYFHVRSVKLSYGCSFFVQLSDVKNQYAKVMQRKCLLDGT

SEQ ID NO: 35631 - protein, 521 aa, Zea mays subsp. mays
  misc_feature (115)..(115): Xaa can be any naturally occurring amino acid
  misc_feature (121)..(121): Xaa can be any naturally occurring amino acid
MDSSSRGGGGSGSGSRGRSPRLDRRNAVKRVDYEAGAGASVSVAASWSFSSSADQQRSPGPGLQPSRSLDLAPGADLRISGSVEGEVDELCRSLGLSGPEDFAIPVAAWEARKSXSNSDLXPRSHPDPSTPADEPSPIARVVSAPDVQPTRFVPAPIPATVAAPEESPKAVPAVAVAAPVGGLPLPSPRRGGGEVGIRGARPPLLSPPPPIGALAPPPVRRSFVDDDMTRSAWDIVQSFAPREQGSEPGERLDTRCNSDTEEESEAEDGVAAVEGELKELRIGETFEGLTGTSSLSTTNDDDASSTTTEAMFIISPNGKFKRKIKSWMRGALLGSGSFGMVYEGISDEGAFFAVKEVSLLDQGSNAQQSIVALEQEIALLSQFEHENIVQYYGTDKEESKLYIFIELVTQGSLSSLYQKYKLRESQVSAYTRQILNGLVYLHERNVVHRDIKCANILVHANGSVKLADFGLAKEVTLCLSVHYFHVRSVKLSYGCSFFVQLSDVKNQYAKVMQRKCLLDGT

SEQ ID NO: 35632 - protein, 294 aa, Zea mays subsp. mays
MTRSAWDIVQSFAPREQGSEPGERLDTRCNSDTEEESEAEDGVAAVEGELKELRIGETFEGLTGTSSLSTTNDDDASSTTTEAMFIISPNGKFKRKIKSWMRGALLGSGSFGMVYEGISDEGAFFAVKEVSLLDQGSNAQQSIVALEQEIALLSQFEHENIVQYYGTDKEESKLYIFIELVTQGSLSSLYQKYKLRESQVSAYTRQILNGLVYLHERNVVHRDIKCANILVHANGSVKLADFGLAKEVTLCLSVHYFHVRSVKLSYGCSFFVQLSDVKNQYAKVMQRKCLLDGT

SEQ ID NO: 35633 - DNA, 2157 bp, Zea mays subsp. mays
agcctgccgcacaacgatccgggcgcgcccgtccctggcccagaagaccccaacgccgggcgcgcgtccccatccgtccgtcgcgcccggcgtcgtggggtcggagctccgggtccggggccgggaaggcgcgaagcagggcgcaagcgcaatggtggagatagggagccgggtgcgggggttcctgcggaaccggtggctggtgttcgtggcggcgatgtggatgcagtcctgcgccggggtcggctacctattcggcagcctctcgccggtgatcaaggcctcgctcgggtacaaccagcgccaggtggccgggctcggcgtcgccaaggacctgggcgacagcgtcggcttcctcgccggcacgctctgctccgtgctcccgctctggagccgcgctcctcgtcggcgccgcgcagaacctcgtcggatacggatgggtctggctcgccgtcacgcgccgtgtccccgtgcccccgctctgggcgatgtgcattctaatcttcatcggtaacaatggtgagacatacttcaacactgctgcacttgtctcatgtgttcagaacttccccaagagccgtggatcaattgttggtatcctcaaaggattcgctggattaagtggagcaattctaacacagatttatgcaattgtgcactctcctgatgatgctgcgctgatcttcatggttgcagttggcccaacaatgattgttatagctttaatgttcattgtaagacctgttggaggccacagacaagtgcggccttctgataacacaagtttcacatttgtatacagtgtctgcttgctcttggccgcttatcttatgggcgtcatgttattggaagaccttgtcgacctaagccagtcagtgactgtcttgttgaccatcgtcctaataatatttttattagttccaatagtcatcccagttctactcagcttcttttcggatgatgatgagactctgcatgcactactgttgccatcacctcggaaagaagaaccaagtgcatcaacatcttccgaagagcaacaggaggttatactcagcgaggtggaggatgaaaagccaaaggacgttgatttacttccagcctcagagaggcaaaaaaggatagcagaactgcagacaaggttatttcaggcagctgctgatggtgctgtcagggttaagagaaggaaaggtccacggagaggagaggatttcacactgatgcaagcgctcatcaaggcagatttctggcttctgtttttctctcttctgctgggctctggatctggtctcaccgtgattgataatcttgggcaaatgtgccagtcgttgggttacgaggaaactcacatctttgtgtcaatgattagcatctggaactttcttggacgcatcggtggagggtacttctcagagatcattgtcaaagactatgcgtacccaagggctatcgcgctagcaatagcccaaatcctgatggcgatcgggcacttcaacttcgccatggcgtggcccgggacaatgtacgtcggcacgctgctcgtgggggtaggctacggcgcgcactgggccatcgtgccagccgcggcctctgagctgttcggggtgaagaacttcggggcgttgtacaacttcctcacggtcgcgaacccggccggctcgctggtgttctcgggggtcatcgccagcggcatctacgacgccgaagcagcgaagcaggcccagcagcgccacagcacctctaagctgctggcgacgagtgggagagtggtgagcgtagtctctgaagcagctccggcgctgaagtgcgagggcgccatctgtttcttcctctcgtccctgatcatggccgggttctgcgtcgtcgcgttcggcttgagcttgatcctggtctatcggacgaaggtcgtgtacgcaggtctgtatgggaagccgcgtacttgaaagatctaaaccctcaagggccagatggcgtggatgtacaggcagtgttgtgtcttcccttcgttctgcacaagttctttgagagtagaacatgctgctgaatgctgatgcacctgagccatagaaggtgcagatgggaggttcattgtaaagtttacaacgaacgaagtatacggaggtcgaaagttcgcggtggaaatgctgtattttgctc

SEQ ID NO: 35634 - protein, 484 aa, Zea mays subsp. mays
MCILIFIGNNGETYFNTAALVSCVQNFPKSRGSIVGILKGFAGLSGAILTQIYAIVHSPDDAALIFMVAVGPTMIVIALMFIVRPVGGHRQVRPSDNTSFTFVYSVCLLLAAYLMGVMLLEDLVDLSQSVTVLLTIVLIIFLLVPIVIPVLLSFFSDDDETLHALLLPSPRKEEPSASTSSEEQQEVILSEVEDEKPKDVDLLPASERQKRIAELQTRLFQAAADGAVRVKRRKGPRRGEDFTLMQALIKADFWLLFFSLLLGSGSGLTVIDNLGQMCQSLGYEETHIFVSMISIWNFLGRIGGGYFSEIIVKDYAYPRAIALAIAQILMAIGHFNFAMAWPGTMYVGTLLVGVGYGAHWAIVPAAASELFGVKNFGALYNFLTVANPAGSLVFSGVIASGIYDAEAAKQAQQRHSTSKLLATSGRVVSVVSEAAPALKCEGAICFFLSSLIMAGFCVVAFGLSLILVYRTKVVYAGLYGKPRT

SEQ ID NO: 35635 - protein, 418 aa, Zea mays subsp. mays
MVAVGPTMIVIALMFIVRPVGGHRQVRPSDNTSFTFVYSVCLLLAAYLMGVMLLEDLVDLSQSVTVLLTIVLIIFLLVPIVIPVLLSFFSDDDETLHALLLPSPRKEEPSASTSSEEQQEVILSEVEDEKPKDVDLLPASERQKRIAELQTRLFQAAADGAVRVKRRKGPRRGEDFTLMQALIKADFWLLFFSLLLGSGSGLTVIDNLGQMCQSLGYEETHIFVSMISIWNFLGRIGGGYFSEIIVKDYAYPRAIALAIAQILMAIGHFNFAMAWPGTMYVGTLLVGVGYGAHWAIVPAAASELFGVKNFGALYNFLTVANPAGSLVFSGVIASGIYDAEAAKQAQQRHSTSKLLATSGRVVSVVSEAAPALKCEGAICFFLSSLIMAGFCVVAFGLSLILVYRTKVVYAGLYGKPRT

SEQ ID NO: 35636 - protein, 411 aa, Zea mays subsp. mays
MIVIALMFIVRPVGGHRQVRPSDNTSFTFVYSVCLLLAAYLMGVMLLEDLVDLSQSVTVLLTIVLIIFLLVPIVIPVLLSFFSDDDETLHALLLPSPRKEEPSASTSSEEQQEVILSEVEDEKPKDVDLLPASERQKRIAELQTRLFQAAADGAVRVKRRKGPRRGEDFTLMQALIKADFWLLFFSLLLGSGSGLTVIDNLGQMCQSLGYEETHIFVSMISIWNFLGRIGGGYFSEIIVKDYAYPRAIALAIAQILMAIGHFNFAMAWPGTMYVGTLLVGVGYGAHWAIVPAAASELFGVKNFGALYNFLTVANPAGSLVFSGVIASGIYDAEAAKQAQQRHSTSKLLATSGRVVSVVSEAAPALKCEGAICFFLSSLIMAGFCVVAFGLSLILVYRTKVVYAGLYGKPRT

SEQ ID NO: 35637 - DNA, 874 bp, Zea mays subsp. mays
gcacgagaccattacctagaacatcctaatcgaaaattctgattctgtggacaatacatctgatgctgtcgacaaacgacagcaagctgtaggcgaagctagccgaccattgtcttcaggcacaatgacgcaacatggacaacatgctggaaccgtggcaatttctccaattgagatgttccagtctgtctttacacttgttgaagatgaaatgatgggtgatcctgcatatcttattgctgtcatcatagagtttctacggagtgtctcaaaggctgggcttaaggctcctcacaacctttatgtgatgacggcgacactactagctcgtagcaaccgttacgctgaaatagcattgtttgtgtcaaacaagattcttgagccgtgtaaagaactggcaatgcaacttatggagctgggtctgcagcacccgccaacgaggaagctgggcatggacatgctgagggagcgaggcctgcatcacgactacgtgactgcgatgctgcaagatgggtactacttggaggccctgcgctatgccagaaaatacaaggtgatcaccgtgcagcctgccctatttctggagaaagccctggcgaagaacagcgcccacaacctggctgcagtgctgagcttcttctgcgagttcactccgagcttcaaggccacatcggactttgtcagataccggcatattctgtctgaaatggtttgaacagctttccgttgtgcaaacttgttgtcccgaaatgacttggcacgtcctctgtaacaagcaacgtcacctcggagggtacttttatttaattcttttggtccctcttgcagaaaataatattttattgttgtgaataaaaaaacgttgcaattaccg

SEQ ID NO: 35638 - protein, 196 aa, Zea mays subsp. mays
MTQHGQHAGTVAISPIEMFQSVFTLVEDEMMGDPAYLIAVIIEFLRSVSKAGLKAPHNLYVMTATLLARSNRYAEIALFVSNKILEPCKELAMQLMELGLQHPPTRKLGMDMLRERGLHHDYVTAMLQDGYYLEALRYARKYKVITVQPALFLEKALAKNSAHNLAAVLSFFCEFTPSFKATSDFVRYRHILSEMV

SEQ ID NO: 35639 - protein, 179 aa, Zea mays subsp. mays
MFQSVFTLVEDEMMGDPAYLIAVIIEFLRSVSKAGLKAPHNLYVMTATLLARSNRYAEIALFVSNKILEPCKELAMQLMELGLQHPPTRKLGMDMLRERGLHHDYVTAMLQDGYYLEALRYARKYKVITVQPALFLEKALAKNSAHNLAAVLSFFCEFTPSFKATSDFVRYRHILSEMV

SEQ ID NO: 35640 - protein, 167 aa, Zea mays subsp. mays
MMGDPAYLIAVIIEFLRSVSKAGLKAPHNLYVMTATLLARSNRYAEIALFVSNKILEPCKELAMQLMELGLQHPPTRKLGMDMLRERGLHHDYVTAMLQDGYYLEALRYARKYKVITVQPALFLEKALAKNSAHNLAAVLSFFCEFTPSFKATSDFVRYRHILSEMV

SEQ ID NO: 35641 - DNA, 1444 bp, Zea mays subsp. mays
gcacgagaccattacctagaacatcctaatcgaaaagtcatcaatcaaatactcagacaaccatggggcaccagcaggcgcagcacggcaaggacgacaccgaggagctgcttgcagcccaccggcagctgtggtgccatgccctgggctacgtcaagtccatggcgctcaagtgcgccctggacctgcgcatccccgacaccatcgaccgctgcggcgggagcgccaccctgggcgagctgctcgccgccagcgagatcccggcgtccaaccacgactacctccggcgggtcatgcgcacgctgacagccatgcgcatcttcgcggccagccacgaccccgccaaggccgacgacgcggccgccatctcctaccagctgaccccggcgtcccggctgctcgtcagcagcagcagcagcgtcgacgacgccgccggcgcctcgaaggagaacactactaccccgagcatcctccccaacatcgcccacctggtccgccccaacaccatctccctgctgttcagcatgggcgagtggatgaaggacgagagcgcggcgtccgtgtcgctgtacgagacggtgcaccggcaggggatgtgggcgtgcgtggaggacgacgcggccaacagggccagcttctacgagagcatggacgccgacacccggctcgtgatgcaggccgtggtccgccggtgcccgcacgtgttcgacggcgtcaagtcgctcgtcgacgtcggcggcggccgcggcaccgccgccgccgccgtcgtcgccgccttcccgcacatccagaggtgcaccgtcatggacctcccccacgtcgtcgccgaggctcccgccggcaccgccggcctgtccttccacggcggcgacatgttcgagcacatcccgtcggctgacgcactcatgctcaagtggatcctgcacgactgggatgaggacaagtgcatcaagataatggagcgctgcaaggaagcgatcggtggcaaggaagcaggggggaaggtgattataatagacacggtgctcggatctcgggcagacgacgacgacgacgacaagacgtgcagggagacgtatgtgttggatctccacatactgagcttcgtgaacggggcggagcgggaggagcaggagtggaggaggatcttcctggcggctgggttccgtgactacaagatcacgcacacccgaggcatcccgtccatcatcgaggtcttcccgtgatgatgatggatcgagagtcgatcatatatgcatgtttgtacgtgtttgtgtcataataaatcgatcgatcatgttgtttaccctttttatttcggtatgtagttgcatctgcgggcgggctaaaataaatcacggcaggctgggcttcatcaagcccatgtatccatctgtgtgtaataatgcaatggaaaacgaaccaaaaagaatgcttccattcc

SEQ ID NO: 35642 - protein, 387 aa, Zea mays subsp. mays
MGHQQAQHGKDDTEELLAAHRQLWCHALGYVKSMALKCALDLRIPDTIDRCGGSATLGELLAASEIPASNHDYLRRVMRTLTAMRIFAASHDPAKADDAAAISYQLTPASRLLVSSSSSVDDAAGASKENTTTPSILPNIAHLVRPNTISLLFSMGEWMKDESAASVSLYETVHRQGMWACVEDDAANRASFYESMDADTRLVMQAVVRRCPHVFDGVKSLVDVGGGRGTAAAAVVAAFPHIQRCTVMDLPHVVAEAPAGTAGLSFHGGDMFEHIPSADALMLKWILHDWDEDKCIKIMERCKEAIGGKEAGGKVIIIDTVLGSRADDDDDDKTCRETYVLDLHILSFVNGAEREEQEWRRIFLAAGFRDYKITHTRGIPSIIEVFP

SEQ ID NO: 35643 - protein, 354 aa, Zea mays subsp. mays
MALKCALDLRIPDTIDRCGGSATLGELLAASEIPASNHDYLRRVMRTLTAMRIFAASHDPAKADDAAAISYQLTPASRLLVSSSSSVDDAAGASKENTTTPSILPNIAHLVRPNTISLLFSMGEWMKDESAASVSLYETVHRQGMWACVEDDAANRASFYESMDADTRLVMQAVVRRCPHVFDGVKSLVDVGGGRGTAAAAVVAAFPHIQRCTVMDLPHVVAEAPAGTAGLSFHGGDMFEHIPSADALMLKWILHDWDEDKCIKIMERCKEAIGGKEAGGKVIIIDTVLGSRADDDDDDKTCRETYVLDLHILSFVNGAEREEQEWRRIFLAAGFRDYKITHTRGIPSIIEVFP

SEQ ID NO: 35644 - protein, 310 aa, Zea mays subsp. mays
MRTLTAMRIFAASHDPAKADDAAAISYQLTPASRLLVSSSSSVDDAAGASKENTTTPSILPNIAHLVRPNTISLLFSMGEWMKDESAASVSLYETVHRQGMWACVEDDAANRASFYESMDADTRLVMQAVVRRCPHVFDGVKSLVDVGGGRGTAAAAVVAAFPHIQRCTVMDLPHVVAEAPAGTAGLSFHGGDMFEHIPSADALMLKWILHDWDEDKCIKIMERCKEAIGGKEAGGKVIIIDTVLGSRADDDDDDKTCRETYVLDLHILSFVNGAEREEQEWRRIFLAAGFRDYKITHTRGIPSIIEVFP

SEQ ID NO: 35645 - DNA, 1383 bp, Zea mays subsp. mays
cattacctagaacatcctaatcgaaaactctccgttccgtcccctccaccccgcactgcagccgcgggatgaccggcggcggccgcggcgcgtgcgcggtgtgcaagcaccagcggcgcaagtgcgagcccaactgcgagctggccgcctacttcccggcgcacaggatgaacgacttccgcgcgctgcacctcgtcttcggggtggccaacctcaccaagctcatcaaggccaacgccagcgaggccggccggcgccgcgccgccgagacgctcacctgggaggcccgctggagggagtgcgacccctcggacgggtgctaccgcgaggtggcctgcctgcgccgcgacaacgccgtgctgcgcgccgagaacgccgcgctgcggcggcagctggccgagcagcagttgctctggtccagcgcctgcagcactggcggcaacgcgcttctggccgagcggcagctgctgccgccgtgtgggggcaataataatgggcttctgacggcgagtagcagagctcatcatgcaccggcagcagctccggcggcaacgcacaccgcgctggcctgctaccgtggcagcatgccggtgtgtactattactatgacagcggacgacggcagcggcaggaggccggcgtcggatgctgccgccatcgccgggagagggggtggtggtgctcaggtcgacgcttctagggataacaagagcagcgcctgcaggtgatgctagctggccggctatactgctaattaacaactgcaaagaaaggaagatacccataccctaccgtcgtcctaaagtgtagatttttggttactcgtgtactgatgacagcaagggcaaggcggctcaatatatagaaatatatcgacgacgagagctagactacttctatatgtatattggttgctacttcagttatatgatcctagaaattacatgaaccacaagatcatcaaatcgatcgagcagcatatgacgacccagcccctcagcaaagtttttttttcatccagcatcactcagcggctgctatatacagtgcttcccggccgcttacaggttgtatcatcatctgtctcatcggttgttgtgtcatttcaccaagcagatagtttcgcataggaaagaaggggtggatataaaacttgtctttctttgctagaatcagagatccaatacacttgtaggccttggtgtttcatccccgtgaatacggtcctacactctgctggtgggtcgtgattttagggtctgtttggttgggctgtggctgtgaaaaaagttgctgtgggttgtgagctgtgggaaaagctgctgtaggctgtaagctgttaaaaagctaaaaactgtttggtggaaaccattaaaagtcgtg

SEQ ID NO: 35646 - protein, 219 aa, Zea mays subsp. mays
MTGGGRGACAVCKHQRRKCEPNCELAAYFPAHRMNDFRALHLVFGVANLTKLIKANASEAGRRRAAETLTWEARWRECDPSDGCYREVACLRRDNAVLRAENAALRRQLAEQQLLWSSACSTGGNALLAERQLLPPCGGNNNGLLTASSRAHHAPAAAPAATHTALACYRGSMPVCTITMTADDGSGRRPASDAAAIAGRGGGGAQVDASRDNKSSACR

SEQ ID NO: 35647 - protein, 186 aa, Zea mays subsp. mays
MNDFRALHLVFGVANLTKLIKANASEAGRRRAAETLTWEARWRECDPSDGCYREVACLRRDNAVLRAENAALRRQLAEQQLLWSSACSTGGNALLAERQLLPPCGGNNNGLLTASSRAHHAPAAAPAATHTALACYRGSMPVCTITMTADDGSGRRPASDAAAIAGRGGGGAQVDASRDNKSSACR

SEQ ID NO: 35648 - DNA, 767 bp, Zea mays subsp. mays
ggcacgaccgccggcctacaaccgttttcgtgctcacacacccaaaccttagtcgcgatcaggccccaaggactcgagatgaagtcgagggcacggtccaccgccggcgactccaggctctcggtgaggaagaccaaggcagagaaggacccaaacaagcccaagaggcctccgagcgcgttcttcgtcttcatggaggagttcaggaaggactacaaggagaagcaccccaatgtgaagcaagtctccgtgattggcaaggctggtggtgacaagtggaagtccctgtctgatgccgagaaggctccctacgtgtctaaggcagagaagctcaaggctgagtacaccaagaagatcgacgcttacaacaacaagcagtctggagaccccacggcgtctggtgattccgacaagtccaagtccgaggtgaacgacgaggacgaggagggtgacgagtgatgtatgacggatgaaactctgtccaagtgtttgcagtcagggaaaaaaatcttcgtcgttgtcggcctaaccgggctttctcgaaggactttctagatgcagtagattagtgccgtcttctctgagtagtttccttgcaagtgtcgtcccgtccctggagtgaggcagtttagtttgtagtttcttcgcttcatcggcactcgaccgttgttggattgggatgtttagcctgcagtctgtacttaccccaagcatctatggtgcctgttttaaatctcagatcacaatagacgtttgttttaaatctc

SEQ ID NO: 35649 - protein, 152 aa, Zea mays subsp. mays
GTTAGLQPFSCSHTQTLVAIRPQGLEMKSRARSTAGDSRLSVRKTKAEKDPNKPKRPPSAFFVFMEEFRKDYKEKHPNVKQVSVIGKAGGDKWKSLSDAEKAPYVSKAEKLKAEYTKKIDAYNNKQSGDPTASGDSDKSKSEVNDEDEEGDE

SEQ ID NO: 35650 - protein, 126 aa, Zea mays subsp. mays
MKSRARSTAGDSRLSVRKTKAEKDPNKPKRPPSAFFVFMEEFRKDYKEKHPNVKQVSVIGKAGGDKWKSLSDAEKAPYVSKAEKLKAEYTKKIDAYNNKQSGDPTASGDSDKSKSEVNDEDEEGDE

SEQ ID NO: 35651 - protein, 89 aa, Zea mays subsp. mays
HDRRPTTVFVLTHPNLSRDQAPRTRDEVEGTVHRRRLQALGEEDQGREGPKQAQEASERVLRLHGGVQEGLQGEAPQCEASLRDWQGWW

SEQ ID NO: 35652 - DNA, 744 bp, Zea mays subsp. mays
atcgccgtgcgcgtgcgtccacttcattgctgctcatgtacccctacacgtttcgggcggccgccagcagcagcagcagcacggcactcgggttcgcgctcggccggatcggcggcaccacgaggagcggcggcgtcgctgcgccaggcttggtggtacccgcagcgggcgtagcacgcgggaggagcgtctcctcgacgccggccggcagcgcacccgtgccgggcgaccagggcgtcggcatggaccagccgaagcagcagcagcagcccaaggtgcccccgcgggacgccgccggtggcgagaacaaacgcgacgacatgcacaagcacaccagggacgtgatgacccactcgttcggggaggggtactcgacgcgctccgacgaggaaggcttcggcggggtgtacggcgggaacgaccccgtggaacaccccggcgccgagatccatcctagccactccgagtacgacacgtcgcagggctcggaggtaaaggagaaggagaaggcgcgccacctcaaggacgagaagcatgccaccgcctagaggcgccggcgggcggcggcgacatcaggcagggatgtcggcgtttagtttagtcgagttcgctttgctcccggcctcggcgcgtcacgtactcagcgtggttcgctacgctgctttcgaaatactacaatactatccaagtttgctgagatgtaaaaaaaaaaatagtaaactgtttcaactttcaaggagcttc

SEQ ID NO: 35653 - protein, 181 aa, Zea mays subsp. mays
RRARASTSLLLMYPYTFRAAASSSSSTALGFALGRIGGTTRSGGVAAPGLVVPAAGVARGRSVSSTPAGSAPVPGDQGVGMDQPKQQQQPKVPPRDAAGGENKRDDMHKHTRDVMTHSFGEGYSTRSDEEGFGGVYGGNDPVEHPGAEIHPSHSEYDTSQGSEVKEKEKARHLKDEKHATA

SEQ ID NO: 35654 - protein, 170 aa, Zea mays subsp. mays
MYPYTFRAAASSSSSTALGFALGRIGGTTRSGGVAAPGLVVPAAGVARGRSVSSTPAGSAPVPGDQGVGMDQPKQQQQPKVPPRDAAGGENKRDDMHKHTRDVMTHSFGEGYSTRSDEEGFGGVYGGNDPVEHPGAEIHPSHSEYDTSQGSEVKEKEKARHLKDEKHATA

SEQ ID NO: 35655 - protein, 151 aa, Zea mays subsp. mays
SPCACVHFIAAHVPLHVSGGRQQQQQHGTRVRARPDRRHHEERRRRCARLGGTRSGRSTREERLLDAGRQRTRAGRPGRRHGPAEAAAAAQGAPAGRRRWREQTRRHAQAHQGRDDPLVRGGVLDALRRGRLRRGVRRERPRGTPRRRDPS

SEQ ID NO: 35656 - DNA, 1345 bp, Zea mays subsp. mays
ataccgcaaccagctattgagctactgcctctgaccaagtcccaagctgcgctgcgcctgctatgtcgtcgtcctcgcccgtatcggcggtctcatcagccactgcgccgcacgtcgtggacgactgcctcggcatcgtgcagcttcttagcgatggcaccgtgacgcgctccgcggactactccgacatccctctcctgggcgaggtgccgtccaacctgcccgtccagtggaaggacgtcgtctacgaccccgcgcacgcgctccgcctccgcatgtacaggcccaccgacaccgacggcggcaggacgaccaacaacaagctgccggtgctagtctacttccacggcggcggcttctgcatctgcagcttcgagatgccccacttccacgccggcgggctccgcctcgccgccgagctcccggcgctcgtgctctccgccgactaccgcctggggcccgagcaccgcctccccgcggcgcaccgcgacgccgaggccgtcctgtcctggctccgcgcccaggccgaggccgacccgtggcttgtcgagtcggctgacatgggcagggtgttcgtctgcggcgactcggccggcggcaacatcgcgcaccacatcgccgtccagtacggcacgggccacctcgccctcggccccgtcgtccggcttggcggctacatcatgctgtggccctacttcgccgccgaggagaggacggcgtccgagacggccggtcttgacgtcgaccaccagttcgttagcacggcgctgttggatcagatgtggcgcctggcgctgccggtcggcgcgaccagggaccacccagcagcgaacccgttcggaccggacagcgtcccgctggaggacgtcgccttccagccgctgctcgtcgtggacccagaccaggacgtgctgcacgaccgcacacaggactatgccgctaggttgacggccatggggaaactggtcgagctcgtcgtgttcagaggccagggccacgggttcttcgtcttcgacccgtgtggtgaagctttccgaccagctgatccacgtcattcggcgcttcgtactgttgcataagcatccatgtaatcttgttgatcttagtactaccatgtagttgcattagtgagtcatgtactcatgtgttcgtcagtcggacaagtttgtttcgtagaatcgcggacgagctggagagtgcacagcccgtgcagtgaccgcgtctagggatgtgtttccgccacggtgtgcatgtcatgcacgtcgcacgttcgtccttagaagtcggatcgtgcagctgtattccgtggcggggaaacgtggaactaccccagtgtatttggttc

SEQ ID NO: 35657 - protein, 338 aa, Zea mays subsp. mays
MSSSSPVSAVSSATAPHVVDDCLGIVQLLSDGTVTRSADYSDIPLLGEVPSNLPVQWKDVVYDPAHALRLRMYRPTDTDGGRTTNNKLPVLVYFHGGGFCICSFEMPHFHAGGLRLAAELPALVLSADYRLGPEHRLPAAHRDAEAVLSWLRAQAEADPWLVESADMGRVFVCGDSAGGNIAHHIAVQYGTGHLALGPVVRLGGYIMLWPYFAAEERTASETAGLDVDHQFVSTALLDQMWRLALPVGATRDHPAANPFGPDSVPLEDVAFQPLLVVDPDQDVLHDRTQDYAARLTAMGKLVELVVFRGQGHGFFVFDPCGEAFRPADPRHSALRTVA

SEQ ID NO: 35658 - protein, 267 aa, Zea mays subsp. mays
MYRPTDTDGGRTTNNKLPVLVYFHGGGFCICSFEMPHFHAGGLRLAAELPALVLSADYRLGPEHRLPAAHRDAEAVLSWLRAQAEADPWLVESADMGRVFVCGDSAGGNIAHHIAVQYGTGHLALGPVVRLGGYIMLWPYFAAEERTASETAGLDVDHQFVSTALLDQMWRLALPVGATRDHPAANPFGPDSVPLEDVAFQPLLVVDPDQDVLHDRTQDYAARLTAMGKLVELVVFRGQGHGFFVFDPCGEAFRPADPRHSALRTVA

SEQ ID NO: 35659 - protein, 233 aa, Zea mays subsp. mays
MPHFHAGGLRLAAELPALVLSADYRLGPEHRLPAAHRDAEAVLSWLRAQAEADPWLVESADMGRVFVCGDSAGGNIAHHIAVQYGTGHLALGPVVRLGGYIMLWPYFAAEERTASETAGLDVDHQFVSTALLDQMWRLALPVGATRDHPAANPFGPDSVPLEDVAFQPLLVVDPDQDVLHDRTQDYAARLTAMGKLVELVVFRGQGHGFFVFDPCGEAFRPADPRHSALRTVA

SEQ ID NO: 35660 - DNA, 562 bp, Zea mays subsp. mays
atcgtctgctggcatcgttccattctcctctaaaccctagccgcctagcgcctcgatctgagcagcctgtctcgcggaggtagttctggttgatttggtcctagatggcggaggaaaaagtggggcggatcttcgtcggcgggctgtcgtggaacaccacggagcgcacgctcgagcgcaccttcggtcagtacggcaaggtcatcgaggctcaggttgtagtggaaagggagacaggccgctctaggggatttggatttgtcacattttcagaacctcgggctgtggatgctgccattcggggaatgcataacggagaactggatggccgcaatatttctgtgaacaaagctgaacctaggaactctgatggctatggatatggtggtggtggtggtggtggttactcgtccggtggtagaggtggatatcgtagtggagctgatgtagttccagcagccagtgatgattgtttcaaatgtggccgtcctggacattgggctcgtgaatgcccttattcagatggaagtggtagaactggaaggtattctcccggttcaag

SEQ ID NO: 35661 - protein, 152 aa, Zea mays subsp. mays
MAEEKVGRIFVGGLSWNTTERTLERTFGQYGKVIEAQVVVERETGRSRGFGFVTFSEPRAVDAAIRGMHNGELDGRNISVNKAEPRNSDGYGYGGGGGGGYSSGGRGGYRSGADVVPAASDDCFKCGRPGHWARECPYSDGSGRTGRYSPGS

SEQ ID NO: 35662 - protein, 85 aa, Zea mays subsp. mays
MHNGELDGRNISVNKAEPRNSDGYGYGGGGGGGYSSGGRGGYRSGADVVPAASDDCFKCGRPGHWARECPYSDGSGRTGRYSPGS

SEQ ID NO: 35663 - DNA, 2019 bp, Zea mays subsp. mays
attcggcacgagagcagcgcagctgcacagaattgttatcgcagggggcattaagctgcctgcctccgctgccggccgtgctacctaatcgccgcgcttgtttcccaccgcccgatggccgccatcacgccgccgacgcagtcggagccgtcgccgcagacggggcgcccggcctcgtctgccgccgccgcggccaagcgtggagggggcggggctggtgccgccggcgggccgctgatggggaagtacgagctggggcgcctcctggggcacggcaccttcgcgaaggtgtaccacgcgcggcacgtcgacacgggggacaacgttgccatcaaggtgctcgacaaggagaaggccgtgaagagcgggctcgtcccgcacatcaagcgcgagatcgctgtgctacgccgcgtgcgccacccgaacatcgtgcacctgttcgaggttatggccacaaagactaagatctacttcgtcatggagctcgtccgcggcggcgagctcttctcccgcgtctccaagggccgactcagggaggacaccgcgcgccgctacttccagcagctcgtctccgccgtggggttctgccacgcccgcggcgtcttccaccgcgacctgaagcccgagaatctactcgtcgacgagcaggggaacctcaaggtatcggattttgggctctccgccgtcgccgagcagttccgtcccgacggcctgctccacaccttctgcggcaccgcggcctatgtggcccccgaagtgctcggccgccgcgggtacgacggcgccaaggcagacgtgtggtcgtgcggtgtcatcctctttgtgctcatggccggatatctccctttccatgacaaaaacatcatggccatgtacaagaagatttacaagggcgagttccgctgtgcgaggtggttctccaaagaccttaccagcttgctgatgcgcattcttcacactaatcccaacactcggatcactttgccggagatcatggagtcccgctggttcaagaaaggattcaagcctgtcaagttctatatcgaggatgaccagctgcataacgttatagatgacgaagatggcctgttagatatgggacctgctggtcctgttcctccaccattgccacctccaccgccacctctacctccaccaaaggttgatggtgatgaatcagggtctgactcagactcgtcgatctcatcctgccctgcttcaatgttatctgatgagagccaaaggccccgtggctctctaccacgtccagcaagtcttaatgcctttgatatcatatcattttcaaggggatttaacttatcagggttatttgaggagaaaggggatgaagtgaggttcatctcggctgagcccatgtcagatatcataaccaaattggaggacatagcgaagctgaagagcttcaagttgcggaggaaggactggcgcatctgcctggagggtacaagggaaggagttaaggggccattaacaattggcgcggagatatttgaactcacacctccccttgtaatggtggaggtaaaaaagaaggcaggggataatgaagagtacgagaacttctgtgacaaggaattgaagccagggatgcagcaccttgtccaccatatggtccgagctccaagtatgctgcttactgatgccaagtagatcgaaaggctttgaacttaacaacagcacttcgcacggagctactggtaacaggcgtgacattctgagcggcatgaggctagaggagacagttgagcacagcacagttgaccagaagagatagtcgccggaacaaaaaccttgaccagttccacagcgctgtagtttcgcagatgatgagcagctcggcatctcatgactgaataaacgcaatgcccgccatggagggagaactaccggtgtctttcttgtacctgaggtggttaagttgttactcgaatgctgtatcacgagtggtgtagtcctgctattcgtaatatttcgattaaccatcatgctattctgtct

SEQ ID NO: 35664 - protein, 518 aa, Zea mays subsp. mays
MAAITPPTQSEPSPQTGRPASSAAAAAKRGGGGAGAAGGPLMGKYELGRLLGHGTFAKVYHARHVDTGDNVAIKVLDKEKAVKSGLVPHIKREIAVLRRVRHPNIVHLFEVMATKTKIYFVMELVRGGELFSRVSKGRLREDTARRYFQQLVSAVGFCHARGVFHRDLKPENLLVDEQGNLKVSDFGLSAVAEQFRPDGLLHTFCGTAAYVAPEVLGRRGYDGAKADVWSCGVILFVLMAGYLPFHDKNIMAMYKKIYKGEFRCARWFSKDLTSLLMRILHTNPNTRITLPEIMESRWFKKGFKPVKFYIEDDQLHNVIDDEDGLLDMGPAGPVPPPLPPPPPPLPPPKVDGDESGSDSDSSISSCPASMLSDESQRPRGSLPRPASLNAFDIISFSRGFNLSGLFEEKGDEVRFISAEPMSDIITKLEDIAKLKSFKLRRKDWRICLEGTREGVKGPLTIGAEIFELTPPLVMVEVKKKAGDNEEYENFCDKELKPGMQHLVHHMVRAPSMLLTDAK

SEQ ID NO: 35665 - protein, 477 aa, Zea mays subsp. mays
MGKYELGRLLGHGTFAKVYHARHVDTGDNVAIKVLDKEKAVKSGLVPHIKREIAVLRRVRHPNIVHLFEVMATKTKIYFVMELVRGGELFSRVSKGRLREDTARRYFQQLVSAVGFCHARGVFHRDLKPENLLVDEQGNLKVSDFGLSAVAEQFRPDGLLHTFCGTAAYVAPEVLGRRGYDGAKADVWSCGVILFVLMAGYLPFHDKNIMAMYKKIYKGEFRCARWFSKDLTSLLMRILHTNPNTRITLPEIMESRWFKKGFKPVKFYIEDDQLHNVIDDEDGLLDMGPAGPVPPPLPPPPPPLPPPKVDGDESGSDSDSSISSCPASMLSDESQRPRGSLPRPASLNAFDIISFSRGFNLSGLFEEKGDEVRFISAEPMSDIITKLEDIAKLKSFKLRRKDWRICLEGTREGVKGPLTIGAEIFELTPPLVMVEVKKKAGDNEEYENFCDKELKPGMQHLVHHMVRAPSMLLTDAK

SEQ ID NO: 35666 - protein, 407 aa, Zea mays subsp. mays
MATKTKIYFVMELVRGGELFSRVSKGRLREDTARRYFQQLVSAVGFCHARGVFHRDLKPENLLVDEQGNLKVSDFGLSAVAEQFRPDGLLHTFCGTAAYVAPEVLGRRGYDGAKADVWSCGVILFVLMAGYLPFHDKNIMAMYKKIYKGEFRCARWFSKDLTSLLMRILHTNPNTRITLPEIMESRWFKKGFKPVKFYIEDDQLHNVIDDEDGLLDMGPAGPVPPPLPPPPPPLPPPKVDGDESGSDSDSSISSCPASMLSDESQRPRGSLPRPASLNAFDIISFSRGFNLSGLFEEKGDEVRFISAEPMSDIITKLEDIAKLKSFKLRRKDWRICLEGTREGVKGPLTIGAEIFELTPPLVMVEVKKKAGDNEEYENFCDKELKPGMQHLVHHMVRAPSMLLTDAK

SEQ ID NO: 35667 - DNA, 1329 bp, Zea mays subsp. mays
gctttaaatccgcctcctcccagcgtctccctcctcccggcctgtcccctcacctccctccccctatctctccaccgccgcagctagctgcgacgtcatgcactcgccggcgccaccgccaccgcatactatctacaattagccagccgtaggcttacctatcctgtgtcaagcaagcctctcgcaagcaacaaggaaggaagctagctagttttatagctgctgtcggcggcggcggctgaagcgacgtgcctgagctaggatttaggttgagatcaggagagggagaaggcggcggcgatggggcgcgggaaggtgcagctgaagcggatcgagaacaagatcaaccgccaggtgacattctccaagcgccgctcggggctactcaagaaggcgcacgagatctccgtgctctgcgacgccgaggtcgcgctcatcatcttctccaccaagggcaagctctacgagtactctaccgattcatgtatggacaaaattcttgaacggtatgagcgctactcctatgcagaaaaggttctcatttccgcagaatatgaaactcagggcaattggtgccatgaatatagaaaactaaaggcgaaggtcgagacaatacagaaatgtcaaaagcacctcatgggagaggatcttgaaactttgaatctcaaagagcttcagcaactagagcagcagctggagagttcactgaaacatatcagaacaaggaagagccagcttatggtcgagtcaatttcagcgctccaacggaaggagaagtcactgcaggaggagaacaaggttctgcagaaggagctcgcggagaagcagaaagaccagcggcagcaagtgcaacgggaccaaactcaacagcagaccagttcgtcttccacgtccttcatgttaagggaagctgccccaacaacaaatgtcagcatcttccctgtggcagcaggcgggagggtggtggaaggggcagcagcgcagccgcaggctcgcgttggactgccaccatggatgcttagccatctgagctgctgaaggtttgccctcaccgtcgcgatgtgatagcccaaaatccagcaagtcttccccggaccccggactgtccccgcttctccgcctggtgcagtatcgtcgtgatcgcgagaagcagcagcagcggtttgccgtattttttaccactgtgtataagtagcatatctgcaatgtgtatattttgttcaccgttcctgctggggcggccgcacggtactttacgcatgtaatatatgtgcttcatcaaatcactttcactaccatagcatgtgccggtttgtggtagtttcatgt

SEQ ID NO: 35668 - protein, 245 aa, Zea mays subsp. mays
MGRGKVQLKRIENKINRQVTFSKRRSGLLKKAHEISVLCDAEVALIIFSTKGKLYEYSTDSCMDKILERYERYSYAEKVLISAEYETQGNWCHEYRKLKAKVETIQKCQKHLMGEDLETLNLKELQQLEQQLESSLKHIRTRKSQLMVESISALQRKEKSLQEENKVLQKELAEKQKDQRQQVQRDQTQQQTSSSSTSFMLREAAPTTNVSIFPVAAGGRVVEGAAAQPQARVGLPPWMLSHLSC

SEQ ID NO: 35669 - protein, 183 aa, Zea mays subsp. mays
MDKILERYERYSYAEKVLISAEYETQGNWCHEYRKLKAKVETIQKCQKHLMGEDLETLNLKELQQLEQQLESSLKHIRTRKSQLMVESISALQRKEKSLQEENKVLQKELAEKQKDQRQQVQRDQTQQQTSSSSTSFMLREAAPTTNVSIFPVAAGGRVVEGAAAQPQARVGLPPWMLSHLSC

SEQ ID NO: 35670 - protein, 133 aa, Zea mays subsp. mays
MGEDLETLNLKELQQLEQQLESSLKHIRTRKSQLMVESISALQRKEKSLQEENKVLQKELAEKQKDQRQQVQRDQTQQQTSSSSTSFMLREAAPTTNVSIFPVAAGGRVVEGAAAQPQARVGLPPWMLSHLSC

SEQ ID NO: 35671 - DNA, 814 bp, Zea mays subsp. mays
  misc_feature (463)..(463): n is a, c, g, or t
  misc_feature (509)..(509): n is a, c, g, or t
aattccacccgcttcccccagccgcacgaaaccctaacgctgccgccgcttcacaggtaagccgccgccatggtgtccggttccggcgtatgcgcgaagcgcatcgtggtggacgcgcgccaccacatgctgggccgcctgtcgtcgattatcgccaaggaactgctcaatgggcagaaggtggtcgtcgtccgctgcgaggagatctgtatgtcgggtgggctcgtacgccagaagatgaagtacctccgctttctccgcaagcggatgaacaccaagccatcccatggacccatccacttccgcgccccgtccaagatcctgtggcgcaccatccgcgggatgattccgcacaagaccaagaggggggaggcggctctggcgaggctcaagacgtacgagggcgtaccgccgccgtacgacaagactaagcgcctggtcatccctgacgctcttaaggttntgaggctgcaaccaggacacaagtactgcctccttggggagctttntaaggaggtcggatggaactaccatgacaccatcagggagcttgaggagaagaggaaggagaaggccaaggtggcctatgagaggaggaagcagctggccaagctgcgcctaaaggctgaggctacagccgaggaaaagctagggtcacagctggacattcttactccgatcaagtactgaatctgtggtttcgtgcctatcagttttgtggaacatctgatccatcgttttaaaagttgtgacagtataatcttgagtgctattctgaacacattttgtagccggtgaatgtattgtttgtttt

SEQ ID NO: 35672 - protein, 206 aa, Zea mays subsp. mays
  misc_feature (132)..(132): Xaa can be any naturally occurring amino acid
  misc_feature (147)..(147): Xaa can be any naturally occurring amino acid
MVSGSGVCAKRIVVDARHHMLGRLSSIIAKELLNGQKVVVVRCEEICMSGGLVRQKMKYLRFLRKRMNTKPSHGPIHFRAPSKILWRTIRGMIPHKTKRGEAALARLKTYEGVPPPYDKTKRLVIPDALKVXRLQPGHKYCLLGELXKEVGWNYHDTIRELEEKRKEKAKVAYERRKQLAKLRLKAEATAEEKLGSQLDILTPIKY

SEQ ID NO: 35673 - protein, 187 aa, Zea mays subsp. mays
  misc_feature (113)..(113): Xaa can be any naturally occurring amino acid
  misc_feature (128)..(128): Xaa can be any naturally occurring amino acid
MLGRLSSIIAKELLNGQKVVVVRCEEICMSGGLVRQKMKYLRFLRKRMNTKPSHGPIHFRAPSKILWRTIRGMIPHKTKRGEAALARLKTYEGVPPPYDKTKRLVIPDALKVXRLQPGHKYCLLGELXKEVGWNYHDTIRELEEKRKEKAKVAYERRKQLAKLRLKAEATAEEKLGSQLDILTPIKY

SEQ ID NO: 35674 - protein, 159 aa, Zea mays subsp. mays
  misc_feature (85)..(85): Xaa can be any naturally occurring amino acid
  misc_feature (100)..(100): Xaa can be any naturally occurring amino acid
MSGGLVRQKMKYLRFLRKRMNTKPSHGPIHFRAPSKILWRTIRGMIPHKTKRGEAALARLKTYEGVPPPYDKTKRLVIPDALKVXRLQPGHKYCLLGELXKEVGWNYHDTIRELEEKRKEKAKVAYERRKQLAKLRLKAEATAEEKLGSQLDILTPIKY

SEQ ID NO: 35675 - DNA, 1391 bp, Zea mays subsp. mays
  misc_feature (1379)..(1379): n is a, c, g, or t
agcgcagggtcaggagaggcagaggcctcagagatacgccgggacgcaacacgtcgtgccgcgcggagggttttgccgagattttccctcaaaagggtattgccacccgcaccgagaaaagaaaacgatacacaccgagataaaaacataccctctccatcctctcctcttcttcctcctcccgtagcggcttcccccgatttgcatccgggcgcggccccatccccacctggccgccgcgcgccgccatggacggcctgcacggtacggacgcatgcttctcccccgcgagggctatctcgccgcaggtgaggccccccgggccgccggacgtaggcagtcagtacctggcggagctgctgcaggagcaccagaagctggggcccttcatgcaggtgctcccaatctgcagcaggctgctgaatcaagaaatagtgcgggtgtcgaatatacggcgccaacatggtgttgctggcgactttgagaggtttccagccgcaagccccaaccagatgcatccggcaccccccatgacaaacttttgtggaaacggttttagtccatggaatgggatgcattcagagagagtaggtgttccgcaaggagctatgggttggcaaggacccccacagagcccctcttcttatattgtcaagaagattttgcggttggaagtaccgacagaagcataccctaatttcaattttatcggccgtcttcttggaccaaggggaaactctttaaagatgattgaagcctccacaggctgtcgtgttttcatcagagggaaaggctcaattaaagattctggcaaggaggaacaactcaagggaagacctggctatgaacacttgagtgaacccctccatatcttgattgaagctgagttacctgctaatgtgattgatgcaagacttgcaaaggcacaagagatccttgaagagctgttgaaaccagtggacgaatcacaagactactacaagagacagcaactgcgagaacttgcaatgctaaattcgccactccgagaggagagtccacatccaggtggtgctcctcctagtcccttcagtaacggcggcatgaaaagagtgaaacaatgacaccgccgaggctcgttcctccatcttgactccccagcaaccccaatgcagtccataccttcacaccctatttttcaatgagcaagctttcatgacggtgttggtagtgtgtgacattcttcactgtactagcaggtgaattttgatctcccatcccatgttacattaaccttgagtgacagatgactatgcgtagtgtatcctctatggcagtataactagaacatttgatttatttgttactggtaatgctgagatatagtactgtgcagattntgagttacggtg

SEQ ID NO: 35676 - protein, 284 aa, Zea mays subsp. mays
MDGLHGTDACFSPARAISPQVRPPGPPDVGSQYLAELLQEHQKLGPFMQVLPICSRLLNQEIVRVSNIRRQHGVAGDFERFPAASPNQMHPAPPMTNFCGNGFSPWNGMHSERVGVPQGAMGWQGPPQSPSSYIVKKILRLEVPTEAYPNFNFIGRLLGPRGNSLKMIEASTGCRVFIRGKGSIKDSGKEEQLKGRPGYEHLSEPLHILIEAELPANVIDARLAKAQEILEELLKPVDESQDYYKRQQLRELAMLNSPLREESPHPGGAPPSPFSNGGMKRVKQ

SEQ ID NO: 35677 - protein, 237 aa, Zea mays subsp. mays
MQVLPICSRLLNQEIVRVSNIRRQHGVAGDFERFPAASPNQMHPAPPMTNFCGNGFSPWNGMHSERVGVPQGAMGWQGPPQSPSSYIVKKILRLEVPTEAYPNFNFIGRLLGPRGNSLKMIEASTGCRVFIRGKGSIKDSGKEEQLKGRPGYEHLSEPLHILIEAELPANVIDARLAKAQEILEELLKPVDESQDYYKRQQLRELAMLNSPLREESPHPGGAPPSPFSNGGMKRVKQ

SEQ ID NO: 35678 - protein, 196 aa, Zea mays subsp. mays
MHPAPPMTNFCGNGFSPWNGMHSERVGVPQGAMGWQGPPQSPSSYIVKKILRLEVPTEAYPNFNFIGRLLGPRGNSLKMIEASTGCRVFIRGKGSIKDSGKEEQLKGRPGYEHLSEPLHILIEAELPANVIDARLAKAQEILEELLKPVDESQDYYKRQQLRELAMLNSPLREESPHPGGAPPSPFSNGGMKRVKQ

SEQ ID NO: 35679 - DNA, 537 bp, Zea mays subsp. mays
  misc_feature (512)..(512): n is a, c, g, or t
agcctgtggtactggtgcttgtgcagtggttgttgcagctgttcttgagggtcgagctgagcggaaatgtgtagttgatttgcctggcgggccattggaaattgagtggagggaggatgacaatcatgtttacatgactggtcctgcagaggtcgtcttttatggatctgttgttcactaggtactggggaccaagatagaagggttggctgccactcagagcttgtgagattggttatagtatccatgaaacagagtgttctggtaccagtacacttgttcagatattcttaattatgattgcttgatttgggtagcagtagaggcttccttttgaagcattctagtgttcaccttttgtactcctttagtttgtcaggtttgaacactacatgggtaacatgtctttcccaccattttctgtttcttttctttgtaagtgaacgccaatgcagttttagtattgttttctatagatttgtcttgatgcactgggcttactacttattttntggtatgaatgctgcctatttcctg

SEQ ID NO: 35680 - protein, 59 aa, Zea mays subsp. mays
ACGTGACAVVVAAVLEGRAERKCVVDLPGGPLEIEWREDDNHVYMTGPAEVVFYGSVVH

SEQ ID NO: 35681 - DNA, 640 bp, Zea mays subsp. mays
ggttataatgtcccaaaggtcattgatcaattgtctagcaggaaagtgctgacctcggagtttgttccaggcattcctatcgataaggtggctcagttaagtcaggaaacccgcaattatgttggttgtaaactgcttgagcttacaataaaggagttgtttgtcttcagattcatgcagacggatccaaattggagtaattttctgtatgatgatgctacaaggaaattcaatctgatagattttggagcagcccgtgattttgcaaaacactttgtagatgattatctacgaatggtagttgcctgtgcaaatagagatcggaccggtgtcttagagatgtcccgcagactaggattccttactggggaggaaccagaagtcatgctggatgctcatgtccaagcagccttcattgttggtgtgccgttctcaaagccaggcggtcacgattttcgagcgaataatatcacgcatagtgtttccaatcttggggccaccatgttgaagcacaggctgaccccaccaccggatgaagtgtacagcctccatagaaagctgtcaggtgcattccttgcctgcatcaagattggggcagttgtaccctgcagagagatcctgttccaagtttacgagcaat

SEQ ID NO: 35682 - protein, 213 aa, Zea mays subsp. mays
GYNVPKVIDQLSSRKVLTSEFVPGIPIDKVAQLSQETRNYVGCKLLELTIKELFVFRFMQTDPNWSNFLYDDATRKFNLIDFGAARDFAKHFVDDYLRMVVACANRDRTGVLEMSRRLGFLTGEEPEVMLDAHVQAAFIVGVPFSKPGGHDFRANNITHSVSNLGATMLKHRLTPPPDEVYSLHRKLSGAFLACIKIGAVVPCREILFQVYEQ

SEQ ID NO: 35683 - protein, 155 aa, Zea mays subsp. mays
MQTDPNWSNFLYDDATRKFNLIDFGAARDFAKHFVDDYLRMVVACANRDRTGVLEMSRRLGFLTGEEPEVMLDAHVQAAFIVGVPFSKPGGHDFRANNITHSVSNLGATMLKHRLTPPPDEVYSLHRKLSGAFLACIKIGAVVPCREILFQVYEQ

SEQ ID NO: 35684 - protein, 115 aa, Zea mays subsp. mays
MVVACANRDRTGVLEMSRRLGFLTGEEPEVMLDAHVQAAFIVGVPFSKPGGHDFRANNITHSVSNLGATMLKHRLTPPPDEVYSLHRKLSGAFLACIKIGAVVPCREILFQVYEQ

SEQ ID NO: 35685 - DNA, 571 bp, Zea mays subsp. mays
  misc_feature (269)..(269): n is a, c, g, or t
gcctagcctgggccgagagcgtgatgaaactccggcttggtatggtggagtctcgcctgctggatttctcgctcgcttcgctggaaatcatccgacgagggcactggaacttctacaggctggagaatgaacacttgaacaacgctggaaagttcagagcagtgaagactgtcccattaccattccgtgagcttgaaactgactgatgaagacggagctccaagttgaacagcaggaatttagggggaagaattccaggaatggatacnctgtcccctgcaagaactggtgtttaagtggtaataaaacgaatcggagagcgtaactgcacaagaccgagacgctgcagattttaggatggaataagctcaggcgggtgtgccagggtacagcatgaggcgttctggtcaggagagatgatgtgcatttaactagctagtggtcgattgagaattgttgcatgtcaatcgactaacaagatcttaattttgtcgatcgtttataagttgtgaaaatgtatctgggaattggtgactgaaaattattgcatggaaggaaacatatggtcgtt

SEQ ID NO: 35686 - protein, 67 aa, Zea mays subsp. mays
LAWAESVMKLRLGMVESRLLDFSLASLEIIRRGHWNFYRLENEHLNNAGKFRAVKTVPLPFRELETD

SEQ ID NO: 35687 - protein, 60 aa, Zea mays subsp. mays
MKLRLGMVESRLLDFSLASLEIIRRGHWNFYRLENEHLNNAGKFRAVKTVPLPFRELETD

SEQ ID NO: 35688 - protein, 54 aa, Zea mays subsp. mays
MVESRLLDFSLASLEIIRRGHWNFYRLENEHLNNAGKFRAVKTVPLPFRELETD

SEQ ID NO: 35689 - DNA, 652 bp, Zea mays subsp. mays
tcccactccaccctttcattgtcgaaatgctggaaaacaccatggatatgtttagtggaggagagtattcaggtttcaccgaagataagaagtatcaacgtaccaacttcctgtttgactgcatcatagagtcgctggattcaaaattctgcaattttggcaaatgtggatacaaggcctggctgagcctgcctctcagtttgagcgaagacctgctgaagcgccaggtattggaagacatcggcaactggatggagtcgagtgggactgctcttagacaagtctctgacaaagaagtggaccaagtgactgacaggtgggatgcaagccaggttgaagcatttgacataagcattgcaatcgagaacgacattcttgaggcgcttgccggtgagttcgcactcgacctgtggtgaaacggcgtattggctgctgtatgtgagatattgacatgtttggactttctgctcgcatgattaattacgtataaataagagatactgcggatatctttgttttttcccctgcagcaaattttgtacagagccatgtaatgtaaggttgaaggacctcccgtttgttttgccctttgtatgctgtaaccgaaacgtgctaaagccctaaggccttgtttggggaacacagtttttcc

SEQ ID NO: 35690 - protein, 137 aa, Zea mays subsp. mays
PLHPFIVEMLENTMDMFSGGEYSGFTEDKKYQRTNFLFDCIIESLDSKFCNFGKCGYKAWLSLPLSLSEDLLKRQVLEDIGNWMESSGTALRQVSDKEVDQVTDRWDASQVEAFDISIAIENDILEALAGEFALDLW

SEQ ID NO: 35691 - protein, 129 aa, Zea mays subsp. mays
MLENTMDMFSGGEYSGFTEDKKYQRTNFLFDCIIESLDSKFCNFGKCGYKAWLSLPLSLSEDLLKRQVLEDIGNWMESSGTALRQVSDKEVDQVTDRWDASQVEAFDISIAIENDILEALAGEFALDLW

SEQ ID NO: 35692 - protein, 124 aa, Zea mays subsp. mays
MDMFSGGEYSGFTEDKKYQRTNFLFDCIIESLDSKFCNFGKCGYKAWLSLPLSLSEDLLKRQVLEDIGNWMESSGTALRQVSDKEVDQVTDRWDASQVEAFDISIAIENDILEALAGEFALDLW

SEQ ID NO: 35693 - DNA, 1807 bp, Zea mays subsp. mays
  misc_feature (1802)..(1802): n is a, c, g, or t
gttcagtcttcagagctgggttcggtctattcctcatcctctcttgttgatccggagtgccttaagttttggccgtcttgttactgtctgctgttccacagtcgacgaatcacgaatgctaatggaggaagaatgcgtagaggcaccgtcgtacatccacattgacagcaacgctttctcctacagaaagcataagagtcagacagaggaggacatagctgtgtgtgagtgccagtatgatatcttggatccagagagtccatgtggagaccggtgtttaaatttattgactaacacagaatgcacgcctggctattgccgttgtggtgtgtactgcaagaatcagcggttccaaaaatgtcaatatgccaggacaagacttgtaagaactggagggcgtggatggggccttgtggctgatgagaatattatggctggtcaatttgttatcgaatattgtggagaagtaatatcatggaaggaagccaaacggagagctcaagcttatgaaacccagtgtttaaaggatgcctatatcatttacctcaatgctgatgagtcaattgatgcaacaagaaaagggaaccttgcgagattcatcaaccattcatgccaaccgaattgtgagacaaggaaatggaatgtccttggggaagtaagagttggaatttttgctaagcaaaacattccttttggcacggaattatcctatgactacaattttgagtggtatggtggtgtgatggtgcggtgcctctgtggagccgccagctgttctgggtttcttggggctaaatcacgtggtttccaggaggccacgtacctgtgggaagatgatgatgacaggttttctgttgagaatatccctctttacgattctgctgatgacgaacctacaagcattaacaaggaaatcctcgtatcaagtgatggcatggttacccaatacagcaacatcagcagagtacagagtaccgaaaatcctggaaacactggaacaaatgaatttgcgccaattatcgtcgacgaactgacaagctcaaatggattagcaccaatgaacgttgaaccattgactgtaagctcaaatgagttcacgccatcgaacgccatgccaatggtagctcgtctagtcgagaatgggtcaactggatacagcgcacaggacactcacgacgcttctcagaattcagcgcccaaagctgcaaatcacgcgaaccaaactggacctcagaacaacagcaaccattcagcgttggtccctgtgaagcccgcgccgaaacgccgtggcaggaaaccgaaacgcgttgtgcacaagcagctggacatcccagatatctgcgaccggcttacatcgtctgtggcgtgcgaagaaatactgtactgtgaggaagtgaagaaccaggccgtttctgaaatcgatgccctgtacgacgagataaggcctgcggttgaagagcacgagagggacagccaagatagcgtctccacaagcctcgcggagaagtggatcgaggctagctgccgcaagtacaaggccgaattcgacctgtatgctgcagtactcaagaacgttgcctccactccactacggtcgaaagatgatgtgggcccaagagagcagaacgggttgaagtacctggagaacggctcatgattttttttagctagaagcgtggaatattacgtacgccttcaatttgtagtatagggattgcatttttttttaactgtggttggtcttgtatttaggtagaggcattgtaaggttacatgattttaaatagcgtggaatcatgtcnaacgc

SEQ ID NO: 35694 - protein, 551 aa, Zea mays subsp. mays
FSLQSWVRSIPHPLLLIRSALSFGRLVTVCCSTVDESRMLMEEECVEAPSYIHIDSNAFSYRKHKSQTEEDIAVCECQYDILDPESPCGDRCLNLLTNTECTPGYCRCGVYCKNQRFQKCQYARTRLVRTGGRGWGLVADENIMAGQFVIEYCGEVISWKEAKRRAQAYETQCLKDAYIIYLNADESIDATRKGNLARFINHSCQPNCETRKWNVLGEVRVGIFAKQNIPFGTELSYDYNFEWYGGVMVRCLCGAASCSGFLGAKSRGFQEATYLWEDDDDRFSVENIPLYDSADDEPTSINKEILVSSDGMVTQYSNISRVQSTENPGNTGTNEFAPIIVDELTSSNGLAPMNVEPLTVSSNEFTPSNAMPMVARLVENGSTGYSAQDTHDASQNSAPKAANHANQTGPQNNSNHSALVPVKPAPKRRGRKPKRVVHKQLDIPDICDRLTSSVACEEILYCEEVKNQAVSEIDALYDEIRPAVEEHERDSQDSVSTSLAEKWIEASCRKYKAEFDLYAAVLKNVASTPLRSKDDVGPREQNGLKYLENGS

SEQ ID NO: 35695 - protein, 513 aa, Zea mays subsp. mays
MLMEEECVEAPSYIHIDSNAFSYRKHKSQTEEDIAVCECQYDILDPESPCGDRCLNLLTNTECTPGYCRCGVYCKNQRFQKCQYARTRLVRTGGRGWGLVADENIMAGQFVIEYCGEVISWKEAKRRAQAYETQCLKDAYIIYLNADESIDATRKGNLARFINHSCQPNCETRKWNVLGEVRVGIFAKQNIPFGTELSYDYNFEWYGGVMVRCLCGAASCSGFLGAKSRGFQEATYLWEDDDDRFSVENIPLYDSADDEPTSINKEILVSSDGMVTQYSNISRVQSTENPGNTGTNEFAPIIVDELTSSNGLAPMNVEPLTVSSNEFTPSNAMPMVARLVENGSTGYSAQDTHDASQNSAPKAANHANQTGPQNNSNHSALVPVKPAPKRRGRKPKRVVHKQLDIPDICDRLTSSVACEEILYCEEVKNQAVSEIDALYDEIRPAVEEHERDSQDSVSTSLAEKWIEASCRKYKAEFDLYAAVLKNVASTPLRSKDDVGPREQNGLKYLENGS

SEQ ID NO: 35696 - protein, 511 aa, Zea mays subsp. mays
MEEECVEAPSYIHIDSNAFSYRKHKSQTEEDIAVCECQYDILDPESPCGDRCLNLLTNTECTPGYCRCGVYCKNQRFQKCQYARTRLVRTGGRGWGLVADENIMAGQFVIEYCGEVISWKEAKRRAQAYETQCLKDAYIIYLNADESIDATRKGNLARFINHSCQPNCETRKWNVLGEVRVGIFAKQNIPFGTELSYDYNFEWYGGVMVRCLCGAASCSGFLGAKSRGFQEATYLWEDDDDRFSVENIPLYDSADDEPTSINKEILVSSDGMVTQYSNISRVQSTENPGNTGTNEFAPIIVDELTSSNGLAPMNVEPLTVSSNEFTPSNAMPMVARLVENGSTGYSAQDTHDASQNSAPKAANHANQTGPQNNSNHSALVPVKPAPKRRGRKPKRVVHKQLDIPDICDRLTSSVACEEILYCEEVKNQAVSEIDALYDEIRPAVEEHERDSQDSVSTSLAEKWIEASCRKYKAEFDLYAAVLKNVASTPLRSKDDVGPREQNGLKYLENGS

SEQ ID NO: 35697 - DNA, 725 bp, Zea mays subsp. mays
  misc_feature (83)..(83): n is a, c, g, or t
cagtctgtgacactctctgatcatgatctgtgtgagatgtagctctattgaccatgaagaagttggtctgattctgctcaggngctgttcccctgccatgttggatgctttatcaagaattactgggtcttttaactcttcaggttccaagttgctagaaaaagctattcagaggagcttcctggtctctgctgacatggcacatgctttacatcccaactatatggacaagcatgaggagaaccaccagcctaaattgcatggaggacttgtgatcaagcacaatgccaatcaacgatatgctacaaatgctgtgacagcatttatttttcgagaaattgctgagagacaccagctacctatacaggattttgttgttcgcaatgacatggcttgtggttcaacaattggcccaatacttgctagtggtgttggtattcgcactgttgatattggagcaccccaattatcaatgcacagcatcagagaaatgtgtgccgctgacgatattagctactcatatgagcatttcaaggcatattttgaagaatttactgaattggatggcaaggtcaaggtggattactaaggcatatagcacaataggttagctttgttacaagctgtacttttatacaaattcgataagcaagtggagaacaaatttgggagaatgtgctagttgtgtttgcattgccatacgatgttctaaattgtatcttttt

SEQ ID NO: 35698 - protein, 188 aa, Zea mays subsp. mays
  misc_feature (21)..(21): Xaa can be any naturally occurring amino acid
MICVRCSSIDHEEVGLILLRXCSPAMLDALSRITGSFNSSGSKLLEKAIQRSFLVSADMAHALHPNYMDKHEENHQPKLHGGLVIKHNANQRYATNAVTAFIFREIAERHQLPIQDFVVRNDMACGSTIGPILASGVGIRTVDIGAPQLSMHSIREMCAADDISYSYEHFKAYFEEFTELDGKVKVDY

SEQ ID NO: 35699 - protein, 163 aa, Zea mays subsp. mays
MLDALSRITGSFNSSGSKLLEKAIQRSFLVSADMAHALHPNYMDKHEENHQPKLHGGLVIKHNANQRYATNAVTAFIFREIAERHQLPIQDFVVRNDMACGSTIGPILASGVGIRTVDIGAPQLSMHSIREMCAADDISYSYEHFKAYFEEFTELDGKVKVDY

SEQ ID NO: 35700 - protein, 130 aa, Zea mays subsp. mays
MAHALHPNYMDKHEENHQPKLHGGLVIKHNANQRYATNAVTAFIFREIAERHQLPIQDFVVRNDMACGSTIGPILASGVGIRTVDIGAPQLSMHSIREMCAADDISYSYEHFKAYFEEFTELDGKVKVDY

SEQ ID NO: 35701 - DNA, 1154 bp, Zea mays subsp. mays
  misc_feature (65)..(65): n is a, c, g, or t
  misc_feature (318)..(318): n is a, c, g, or t
attttcgcctgctacttttaccttggaggaaccaccaacctcttcatgcagtaattggggctcanaaagtggagcatttgactgtagcccttctgaagtaaaaccttctcagtatgattattgcccttcagcccagtcatctacaaaaggccaaaattttcgaggcagtaaaataaaggtggaagaacaagaagaatgcagcagcataagcaatgcaaggaaggaacaggaaaatgaagatctaagtcccctatctgtgcttgaacccaccacctctctaagcgagagttgctggtcttctgagtgttcggacagcancggtgggggtaaggttaatccatcactttttgatgttaaaaatggtcaggggaatttcttgattaacccagcatcagttgatatcgaggcaaagacaacagactcagcctcttcggcatcagcagatacatcggatgtttcagatatcacccaatgctctaaaagatcaagacacacagagctggactacattgcagacgtgttaagcagtgtcaacttgacaacagatgaactgggaccactctttgtcgatcaggatagaccagctttggactcgtccctcttccagaaattggagaacatgcatgtgtacaacaaacaagggaaagagcccttttgccgtggagggtacaggcggctgttgttcgactgcgtaaatgagtgcctggagacaaggcgcacggcctacttccgggcaggatatgcagcatggagcaagggagcagcagcgctgatccggggcgttgaggcccaagtctgcagtgagatcaccagctggaagagcatgggagactggacggaggatgagcttgtcgacaaggacatgagcagcgggctgggcacatgggtcgacttcctggtggaggagttcgaggctggtgtggaggtggagaaccacgtactgggctcgctgcttgacgaggtcgtcgccgacatggtcgtgggacgccacgggcaggagtgtaaatttgtagtttgagatgaatcgtgtggttgttggtctgtaattttgctgttacatatcccctatttattctgtcaccccagacatgttgttcagaacagtgataaatgttgtttacccaatgagatagatagttttcacttttcagctc

SEQ ID NO: 35702 - protein, 338 aa, Zea mays subsp. mays
  misc_feature (22)..(22): Xaa can be any naturally occurring amino acid
  misc_feature (106)..(106): Xaa can be any naturally occurring amino acid
FSPATFTLEEPPTSSCSNWGSXSGAFDCSPSEVKPSQYDYCPSAQSSTKGQNFRGSKIKVEEQEECSSISNARKEQENEDLSPLSVLEPTTSLSESCWSSECSDSXGGGKVNPSLFDVKNGQGNFLINPASVDIEAKTTDSASSASADTSDVSDITQCSKRSRHTELDYIADVLSSVNLTTDELGPLFVDQDRPALDSSLFQKLENMHVYNKQGKEPFCRGGYRRLLFDCVNECLETRRTAYFRAGYAAWSKGAAALIRGVEAQVCSEITSWKSMGDWTEDELVDKDMSSGLGTWVDFLVEEFEAGVEVENHVLGSLLDEVVADMVVGRHGQECKFVV

SEQ ID NO: 35703 - DNA, 821 bp, Zea mays subsp. mays
gtggcagggccggcggcggatgggagtaaatcgcggccggagtgcatcaactcgtccaacccgtaccacgagtgcactgactactgcctccgcaagatcgccgaggccaggcagcgcctcgacgacgagctccccgactcgtggaagcgcccgcccgagcaccgcaccgtccaccgggactgcatcaacgcctccaacccctaccacgagtgctccgactactgcttcaagcgcatcgccgacgccaaatcagggcttgagcgtggggaacaacagccaccagctgacgtggccaccgctgccggcacgtctgatgccgtggagcagcagcaacttgaagataacgatgccgacggacaggagggcgcagccgcggatgacggctacccgcagatgacggagaagcagaaaaagctgttcgagctgcggcttaagatgaatgaagcacggaaagcgaatcagcaggcgatggttgccgagaagaaaaggatggagcctcgtggcgagagccgaggtgtttctaagcagaagtggttagacgacaggaagaagaagattgggaagctgctcgactcgaatgggcttgatatgaaaatggcgtacatgctcgacacacaggagactgcagaagccaagtacaagaagtgggagaaggaacctgctccatatgggtgggatgttttcaatcagaagaccttgtatgacgcatacaagaagaggaccaagaacatagaagttgacatggagtcttacaataaagccaaagaagctgatcctgaattctaccgcgacgcctcaagtttccagtatgggaaggtgtc

SEQ ID NO: 35704 - protein, 273 aa, Zea mays subsp. mays
VAGPAADGSKSRPECINSSNPYHECTDYCLRKIAEARQRLDDELPDSWKRPPEHRTVHRDCINASNPYHECSDYCFKRIADAKSGLERGEQQPPADVATAAGTSDAVEQQQLEDNDADGQEGAAADDGYPQMTEKQKKLFELRLKMNEARKANQQAMVAEKKRMEPRGESRGVSKQKWLDDRKKKIGKLLDSNGLDMKMAYMLDTQETAEAKYKKWEKEPAPYGWDVFNQKTLYDAYKKRTKNIEVDMESYNKAKEADPEFYRDASSFQYGKV

SEQ ID NO: 35705 - protein, 142 aa, Zea mays subsp. mays
MTEKQKKLFELRLKMNEARKANQQAMVAEKKRMEPRGESRGVSKQKWLDDRKKKIGKLLDSNGLDMKMAYMLDTQETAEAKYKKWEKEPAPYGWDVFNQKTLYDAYKKRTKNIEVDMESYNKAKEADPEFYRDASSFQYGKV

SEQ ID NO: 35706 - DNA, 1001 bp, Zea mays subsp. mays
  misc_feature (94)..(94): n is a, c, g, or t
  misc_feature (293)..(293): n is a, c, g, or t
  misc_feature (296)..(296): n is a, c, g, or t
  misc_feature (299)..(300): n is a, c, g, or t
  misc_feature (303)..(303): n is a, c, g, or t
  misc_feature (325)..(325): n is a, c, g, or t
  misc_feature (341)..(342): n is a, c, g, or t
  misc_feature (344)..(344): n is a, c, g, or t
  misc_feature (353)..(353): n is a, c, g, or t
  misc_feature (399)..(399): n is a, c, g, or t
  misc_feature (492)..(492): n is a, c, g, or t
  misc_feature (506)..(506): n is a, c, g, or t
  misc_feature (595)..(595): n is a, c, g, or t
  misc_feature (605)..(605): n is a, c, g, or t
  misc_feature (761)..(761): n is a, c, g, or t
  misc_feature (786)..(786): n is a, c, g, or t
acgcgattacgcgattagccgagtcctttattgcaaaaacacgcatcacctccgtcgccatcccgatccctgataccacgctgagggcggtggngttaggagattagcgatggcgaggtggcggccggcggcgctgctggtagtggctctggcggcggttctatcggcggcgtggcgggcggatgcgctatcggttacggtgaccgacaccgagtgcatccacgagttcgtgccctatgagggcgacaccgtgtccgggaacttcgtcgtcgtcgaccacgacatcttctggngcnccnnccncccaggaatcgacctcacggtnacgtcaccaggtggcnncnctgtgtacncattgaagggaaaatctggtgagaaatttgagtttaaagctccaanaggtggcatgtataagttctgcttccataacccatatggagcacctgaaactgtttctttctacatccatgttgggcacatacccaatgagcncaatctggcgaaanatgagcacttggaccctatcaatgttaaaatcgcggagctgaaggaagcattagaatccgtcaccgccgagcagaagtacctaaaagcncgcgaagctngtcaccgacacactaatgagagcaccagaaagcgtgtcatgttctatacgatggcggagtacctggctttcatggctgctagcgcgttgcaggtcctctacatccgccgcttgttcagtaaaaatgtgggatacaacagagtgtaggatagaaatntacttcaaaggcgacggtggaagcnccgcatatgatggtcggagcgggaaacattctctgccagtttgacaaattgtagttctgcaccctcttttttttttgttagtttataagaaacactttaatttatcatcatgtacttttagcaacacttgtggtatgttaagtgcatttggtgctgaacattgttccataactaatcttcagaggtttgttatgaaagttagtatcgctctgccg

SEQ ID NO: 35707 - protein, 213 aa, Zea mays subsp. mays
  misc_feature (62)..(65): Xaa can be any naturally occurring amino acid
  misc_feature (72)..(72): Xaa can be any naturally occurring amino acid
  misc_feature (78)..(79): Xaa can be any naturally occurring amino acid
  misc_feature (82)..(82): Xaa can be any naturally occurring amino acid
  misc_feature (97)..(97): Xaa can be any naturally occurring amino acid
  misc_feature (128)..(128): Xaa can be any naturally occurring amino acid
  misc_feature (133)..(133): Xaa can be any naturally occurring amino acid
  misc_feature (162)..(162): Xaa can be any naturally occurring amino acid
  misc_feature (166)..(166): Xaa can be any naturally occurring amino acid
MARWRPAALLVVALAAVLSAAWRADALSVTVTDTECIHEFVPYEGDTVSGNFVVVDHDIFWXXXXPGIDLTXTSPGGXXVYXLKGKSGEKFEFKAPXGGMYKFCFHNPYGAPETVSFYIHVGHIPNEXNLAKXEHLDPINVKIAELKEALESVTAEQKYLKXREAXHRHTNESTRKRVMFYTMAEYLAFMAASALQVLYIRRLFSKNVGYNRV

SEQ ID NO: 35708 - protein, 114 aa, Zea mays subsp. mays
  misc_feature (29)..(29): Xaa can be any naturally occurring amino acid
  misc_feature (34)..(34): Xaa can be any naturally occurring amino acid
  misc_feature (63)..(63): Xaa can be any naturally occurring amino acid
  misc_feature (67)..(67): Xaa can be any naturally occurring amino acid
MYKFCFHNPYGAPETVSFYIHVGHIPNEXNLAKXEHLDPINVKIAELKEALESVTAEQKYLKXREAXHRHTNESTRKRVMFYTMAEYLAFMAASALQVLYIRRLFSKNVGYNRV

SEQ ID NO: 35709 - DNA, 1094 bp, Zea mays subsp. mays
  misc_feature (485)..(485): n is a, c, g, or t
cccagctccgcgccgtgtacgggcacaccttctcgtactgcctggtggagcacggcagcgacgccggcagcaaggtggtgttcggggaggactacttggtgctggcgcatccgcagctcaagtacacggcgttcgcgcccacgtcgtcgccggcggacacattctattacgtgaagctcaagggcgtgctggtgggcggcgacctgctgaacatcagctcggacacgtgggacgtgggcaaggacgggtccggcggcacgatcatcgactccggcacgacgctgagctacttcgtggagccggcgtaccaggtgatccggcaagcgttcgtcgatcgcatgagcaggctgtaccctctgatcccggacttcccggtgctgaacccgtgctacaacgtctctggcgtggagcgacccgaggtgccggagatgtcgctgctgttcgccgacggtgccgtgtgggacttccccgcggagaactacttngtccggctggacccggacggcatcatgtgcctggcggtccggggcaccccgcgcaccggcatgtccatcatcggtaacttccagcagcagaactttcacgtcgtgtacgacctgcagaacaaccggctgggcttcgcgccgcggcggtgcgccgaggtgtagtgtatagccgccggcgaggcctcctgagactgagaggacgaacaattcgaactcagtcctcgcttgattgattggattgggaggcaaattgggtgtagaaatttttggttgggaaggacggtggcacgtacgcaagctctaatacatagttttttttgttgcatttatctccaaggagagaaggttagggatattttattaaggaccgttcaggtgggttgtaacgggaaaatactgattttgttcccatgtacaatacctgtttcttcactcaaattttagaaattgtaagttgtagattaagaatgagagtgcacacaatcttttttttaagtaattgctcatgaagatatgattacaactacggaatagattccatcttttagaatatcatgcacaaattattcttattctatcaaatgctatgtaaggccctatttcaatgtc

SEQ ID NO: 35710 - protein, 214 aa, Zea mays subsp. mays
  misc_feature (161)..(161): Xaa can be any naturally occurring amino acid
QLRAVYGHTFSYCLVEHGSDAGSKVVFGEDYLVLAHPQLKYTAFAPTSSPADTFYYVKLKGVLVGGDLLNISSDTWDVGKDGSGGTIIDSGTTLSYFVEPAYQVIRQAFVDRMSRLYPLIPDFPVLNPCYNVSGVERPEVPEMSLLFADGAVWDFPAENYXVRLDPDGIMCLAVRGTPRTGMSIIGNFQQQNFHVVYDLQNNRLGFAPRRCAEV

SEQ ID NO: 35711 - protein, 186 aa, Zea mays subsp. mays
  misc_feature (162)..(162): Xaa can be any naturally occurring amino acid
PAPRRVRAHLLVLPGGARQRRRQQGGVRGGLLGAGASAAQVHGVRAHVVAGGHILLREAQGRAGGRRPAEHQLGHVGRGQGRVRRHDHRLRHDAELLRGAGVPGDPASVRRSHEQAVPSDPGLPGAEPVLQRLWRGATRGAGDVAAVRRRCRVGLPRGELLXPAGPGRHHVPGGPGHPAHRHVHHR

SEQ ID NO: 35712 - DNA, 549 bp, Zea mays subsp. mays
accagagtcaccgcggtcggagttcaaatcccacaatcttcttgtagcacaccactgtcttcgtccaactcggcggcgatgtctgggcgcggcaagggcggcaaggggctgggcaagggcggcgcgaaacgccaccgtaaggttctccgcgacaacatccagggtatcacgaagccggcaatccggaggctggcgaggaggggcggcgtgaagcgtatctccgggcttatctacgaggaaacccgcggcgtgctcaagatcttcctcgagaatgtcatccgcgacgcggtcacctacaccgagcacgctcgccgcaagaccgtcaccgccatggatgttgtgtacgccctcaagcgccagggccgcactctgtacgggttcggtggttgagcgcatctcttccctcgtctgcagcggctgccggtggcgtttcctcagttccctctgccttgcttggcttgatgtagagagttatcagattaaaatatctctgatgtgcttcgttattgggtggaatcatgtgtcccagcagtgctgggaaatcaagat

SEQ ID NO: 35713 - protein, 129 aa, Zea mays subsp. mays
TRVTAVGVQIPQSSCSTPLSSSNSAAMSGRGKGGKGLGKGGAKRHRKVLRDNIQGITKPAIRRLARRGGVKRISGLIYEETRGVLKIFLENVIRDAVTYTEHARRKTVTAMDVVYALKRQGRTLYGFGG

SEQ ID NO: 35714 - protein, 103 aa, Zea mays subsp. mays; identical to SEQ ID NO: 71

SEQ ID NO: 35715 - protein, 92 aa, Zea mays subsp. mays
MSSATRSPTPSTLAARPSPPWMLCTPSSARAALCTGSVVERISSLVCSGCRWRFLSSLCLAWLDVESYQIKISLMCFVIGWNHVSQQCWEIK

SEQ ID NO: 35716 - DNA, 770 bp, Zea mays subsp. mays
  misc_feature (344)..(344): n is a, c, g, or t
  misc_feature (474)..(474): n is a, c, g, or t
  misc_feature (518)..(518): n is a, c, g, or t
  misc_feature (531)..(531): n is a, c, g, or t
  misc_feature (539)..(539): n is a, c, g, or t
  misc_feature (542)..(542): n is a, c, g, or t
  misc_feature (627)..(627): n is a, c, g, or t
aaaccttgcccctgctcctcacgccgccgccgccgccgccgtcgccgccaccacatccgtagcgcccagccgccggagaagaggagggagccagcaccagccaccatgggtcgcgtccgcaccaagaccgtgaagaagacctccaggcaggtgatcgagaagtactactcccgcatgaccctcgacttccacaccaacaagaaggtgctggaagaggtctcgatcctcccctcgaagcgcctccgcaacaaggttgccggcttcaccacccacctgatgcgccgcatccagcggggccccgtccgtggcatctcgctcaagctgcaggaggaggagcgggagcnccgcatggacttcgtcccggagaagtcagcgctcgaggtcgaagagatccgcgtcgacaaggagaccatggagatgctcgcggcacttggcatggccgatctcccgggcgtagagcgccaggctgaggtntccagcgtccccgcctacggccgcccgcagtatggaggtccccnccgtgaccgcgtntaggttcnccnccgatcgcagtggttgcgtcgtggtcgcaccgttactcacagttgttatgctactatgttaaacttgttttagatctgtggtttnttctggcgattaagttttgaacttgtctgttatgctttaaactctatagttggatctgcgtgtgatggacattagagttatgttcttgcgccaatgaagtctcaagagattataagttactatgaggttttttgtttgatgct

SEQ ID NO: 35717 - protein, 177 aa, Zea mays subsp. mays
  misc_feature (115)..(115): Xaa can be any naturally occurring amino acid
  misc_feature (158)..(158): Xaa can be any naturally occurring amino acid
  misc_feature (173)..(173): Xaa can be any naturally occurring amino acid
  misc_feature (177)..(177): Xaa can be any naturally occurring amino acid
KPCPCSSRRRRRRRRRHHIRSAQPPEKRREPAPATMGRVRTKTVKKTSRQVIEKYYSRMTLDFHTNKKVLEEVSILPSKRLRNKVAGFTTHLMRRIQRGPVRGISLKLQEEEREXRMDFVPEKSALEVEEIRVDKETMEMLAALGMADLPGVERQAEXSSVPAYGRPQYGGPXRDRX

SEQ ID NO: 35718 - protein, 142 aa, Zea mays subsp. mays
  misc_feature (80)..(80): Xaa can be any naturally occurring amino acid
  misc_feature (123)..(123): Xaa can be any naturally occurring amino acid
  misc_feature (138)..(138): Xaa can be any naturally occurring amino acid
  misc_feature (142)..(142): Xaa can be any naturally occurring amino acid
MGRVRTKTVKKTSRQVIEKYYSRMTLDFHTNKKVLEEVSILPSKRLRNKVAGFTTHLMRRIQRGPVRGISLKLQEEEREXRMDFVPEKSALEVEEIRVDKETMEMLAALGMADLPGVERQAEXSSVPAYGRPQYGGPXRDRX

SEQ ID NO: 35719 - protein, 119 aa, Zea mays subsp. mays
  misc_feature (57)..(57): Xaa can be any naturally occurring amino acid
  misc_feature (100)..(100): Xaa can be any naturally occurring amino acid
  misc_feature (115)..(115): Xaa can be any naturally occurring amino acid
  misc_feature (119)..(119): Xaa can be any naturally occurring amino acid
MTLDFHTNKKVLEEVSILPSKRLRNKVAGFTTHLMRRIQRGPVRGISLKLQEEEREXRMDFVPEKSALEVEEIRVDKETMEMLAALGMADLPGVERQAEXSSVPAYGRPQYGGPXRDRX

SEQ ID NO: 35720 - DNA, 739 bp, Zea mays subsp. mays
  misc_feature (634)..(634): n is a, c, g, or t
  misc_feature (653)..(653): n is a, c, g, or t
actttcttcgagcgtcgacaggctttccggctgccgaccccacccgggcggctcgccggggtcctctacagacgcagcgggtcgacttctgtcagggtgctacgatgatgcggcgtgcgtccctgtcctgctcgagcacaagctccggcggggaggggaggctaacgtacaaggatggtggcgtggacatagacgccgacgccgagcttgtccgccgcatagctaggatggcacccgggattggcggcttcggcggtctctttccctacaatgacgattaccttgttgttagcaccgacggggtcgggacgaagctgaagcttgctttcgaaagtggtattcatgacacaatcggcattgacctggtggcaatgaacgtcaatgacattgttactttaggtgcaaaaccactgttcttcctagattactatgcaacaagcaagcttgatgttgatcttgcagagaaggttatcaatgggattagggatgggtgtgaacaatcagtcggaggagatgtaagatttctgaaatcgaattaccatgacttagcaattcaaccatgcggtattgcgccattatccttgagaaggatgcccggtccttgtaccctgtgcattgatcgggtagagagccnaggccagggtcggaggctngaatgcgtacccgagcctgtcctatagatgagatgtttgagttgtagcagttgaaacaacgctcaacatggtaaaaagttcttggt

SEQ ID NO: 35721 - protein, 225 aa, Zea mays subsp. mays
  misc_feature (211)..(211): Xaa can be any naturally occurring amino acid
  misc_feature (217)..(217): Xaa can be any naturally occurring amino acid
FLRASTGFPAADPTRAARRGPLQTQRVDFCQGATMMRRASLSCSSTSSGGEGRLTYKDGGVDIDADAELVRRIARMAPGIGGFGGLFPYNDDYLVVSTDGVGTKLKLAFESGIHDTIGIDLVAMNVNDIVTLGAKPLFFLDYYATSKLDVDLAEKVINGIRDGCEQSVGGDVRFLKSNYHDLAIQPCGIAPLSLRRMPGPCTLCIDRVESXGQGRRXECVPEPVL

SEQ ID NO: 35722 - protein, 191 aa, Zea mays subsp. mays
  misc_feature (177)..(177): Xaa can be any naturally occurring amino acid
  misc_feature (183)..(183): Xaa can be any naturally occurring amino acid
MMRRASLSCSSTSSGGEGRLTYKDGGVDIDADAELVRRIARMAPGIGGFGGLFPYNDDYLVVSTDGVGTKLKLAFESGIHDTIGIDLVAMNVNDIVTLGAKPLFFLDYYATSKLDVDLAEKVINGIRDGCEQSVGGDVRFLKSNYHDLAIQPCGIAPLSLRRMPGPCTLCIDRVESXGQGRRXECVPEPVL

SEQ ID NO: 35723 - protein, 190 aa, Zea mays subsp. mays
  misc_feature (176)..(176): Xaa can be any naturally occurring amino acid
  misc_feature (182)..(182): Xaa can be any naturally occurring amino acid
MRRASLSCSSTSSGGEGRLTYKDGGVDIDADAELVRRIARMAPGIGGFGGLFPYNDDYLVVSTDGVGTKLKLAFESGIHDTIGIDLVAMNVNDIVTLGAKPLFFLDYYATSKLDVDLAEKVINGIRDGCEQSVGGDVRFLKSNYHDLAIQPCGIAPLSLRRMPGPCTLCIDRVESXGQGRRXECVPEPVL

SEQ ID NO: 35724 - DNA, 1610 bp, Zea mays subsp. mays
gttgctctgaaatcatccgtgcattttctttctttttatttggcaagggactttccttctcttttctttctcctaatttatagtggtgaccaaacagataagggacctgcgcgtcgctgagagggaggaagacattggattctacgctggtttcctcggcgcagcatacatgatcggcagaggcgtcgcgtcggtcttctggggcgtggtggcggaccgcgttggccggaagcccgtcatcgcgttctccgtcctctcggtcgtggtgttcaacaccctgttcgggctgagcgccaagtactggatggctatcgctacgaggtttctcctgggcgccctcaacggcttccttgcgccagcgaaggcgtactccatcgaggtctgccggcctgagcagcaggctctgggtatatcggtcgtaagcacagcgtgggggatgggcgtcataatcggcccggccatcggtggctacctcgcgcagcctgccaaacagtatccgcacctgttccatgagaaatcagtgtttggaaggttcccgtacctgttgccatgcctgtgcatctcgttcttcgccgccttggttgtcataagctgcgcatggctcccggagaccctacacaagcacagaggcctggagagagcagcagctgaagtggcagaaggcacgacagcagcagcagcagctcaagaaagcaccccggagccggagccggagccacctaagagcagcctgctcaggaaccggccactcatgtcctccatcgtcacgtactgcgtcttctccctccacgacaccgcgtacgtcgagatattttctctgtggaccgtgagtggcagagatcacggcggcctcagcttcgcgtccaaggacgtcggccaagtcctcaccgtcgctggcgccagtctcctggtgtaccaaatcttcgcctaccgttgggtcaacaagatcctcggcccagtcaactcaacccgagtttcgtcggcgctatccataccgataatcgccgcttaccccttcatgacgcgcttgtcgggaataaggcttggtgtgcctctctacgtcgcggcgatgctcaaaagcgtcctcgccatcaccagagtcaccggcacatcgctcctgcagaacaacgctgtgccacaggagcagaggggcgctgcgaacgggatagctacgacggcgatgtctctgtccaaggcgttcgctccggccgtggccggcatcttgttctcgtgggcacagaagcgccagcatgccgcgttctttccaggtgaccagatggtgtttctgctcctgaatctgacggaggtcatcgggctcgtgctcaccttcaagcctttcctcgcggttccccagcagtacaaacagtgaaagcggtgctgcgtgcgtgcgtgctctgcatggatactatagagaggtagctagctgctagccagtgtgtgtgggcgagagcgagacgagggagatggacatgtcaagtagaagcagaggatatgatgtcattatacatatttactttgcgagatatgtagttcctcatgagtcttcgctgtgcggttttctaaaaaaaaattgagataaagttggtctctcaattatatggtgcattccg

SEQ ID NO: 35725 - protein, 399 aa, Zea mays subsp. mays
MIGRGVASVFWGVVADRVGRKPVIAFSVLSVVVFNTLFGLSAKYWMAIATRFLLGALNGFLAPAKAYSIEVCRPEQQALGISVVSTAWGMGVIIGPAIGGYLAQPAKQYPHLFHEKSVFGRFPYLLPCLCISFFAALVVISCAWLPETLHKHRGLERAAAEVAEGTTAAAAAQESTPEPEPEPPKSSLLRNRPLMSSIVTYCVFSLHDTAYVEIFSLWTVSGRDHGGLSFASKDVGQVLTVAGASLLVYQIFAYRWVNKILGPVNSTRVSSALSIPIIAAYPFMTRLSGIRLGVPLYVAAMLKSVLAITRVTGTSLLQNNAVPQEQRGAANGIATTAMSLSKAFAPAVAGILFSWAQKRQHAAFFPGDQMVFLLLNLTEVIGLVLTFKPFLAVPQQYKQ

SEQ ID NO: 35726 - protein, 354 aa, Zea mays subsp. mays
MAIATRFLLGALNGFLAPAKAYSIEVCRPEQQALGISVVSTAWGMGVIIGPAIGGYLAQPAKQYPHLFHEKSVFGRFPYLLPCLCISFFAALVVISCAWLPETLHKHRGLERAAAEVAEGTTAAAAAQESTPEPEPEPPKSSLLRNRPLMSSIVTYCVFSLHDTAYVEIFSLWTVSGRDHGGLSFASKDVGQVLTVAGASLLVYQIFAYRWVNKILGPVNSTRVSSALSIPIIAAYPFMTRLSGIRLGVPLYVAAMLKSVLAITRVTGTSLLQNNAVPQEQRGAANGIATTAMSLSKAFAPAVAGILFSWAQKRQHAAFFPGDQMVFLLLNLTEVIGLVLTFKPFLAVPQQYKQ

SEQ ID NO: 35727 - protein, 310 aa, Zea mays subsp. mays
MGVIIGPAIGGYLAQPAKQYPHLFHEKSVFGRFPYLLPCLCISFFAALVVISCAWLPETLHKHRGLERAAAEVAEGTTAAAAAQESTPEPEPEPPKSSLLRNRPLMSSIVTYCVFSLHDTAYVEIFSLWTVSGRDHGGLSFASKDVGQVLTVAGASLLVYQIFAYRWVNKILGPVNSTRVSSALSIPIIAAYPFMTRLSGIRLGVPLYVAAMLKSVLAITRVTGTSLLQNNAVPQEQRGAANGIATTAMSLSKAFAPAVAGILFSWAQKRQHAAFFPGDQMVFLLLNLTEVIGLVLTFKPFLAVPQQYKQ

SEQ ID NO: 35728 - DNA, 892 bp, Zea mays subsp. mays
  misc_feature (541)..(541): n is a, c, g, or t
  misc_feature (560)..(560): n is a, c, g, or t
  misc_feature (607)..(607): n is a, c, g, or t
  misc_feature (661)..(661): n is a, c, g, or t
  misc_feature (705)..(705): n is a, c, g, or t
  misc_feature (754)..(754): n is a, c, g, or t
  misc_feature (812)..(812): n is a, c, g, or t
gattctgccttttcttctccttccctcacctgctctctctctctctctctctctctctctccctttctttcccgcggcgacggtgacgacgaccgcgcgagcgccgccgactccctactgcatcaggtgcctcggccttcgtcgtgctctccgccggcaacgagtatagacgggcgcgcatggccaccttcgagctgtaccggaggtccaccatcggcatgtgcctcaccgagacgctcgacgagatggtctccaacggcaccctcagcccggagctcgctatccaggtcctcgtccagttcgacaagtccatgacggatgctctggagaaccaagtgaagagcaaggttactgtcaagggtcacctgcacacctacaggttctgtgacaatgtgtggaccttcatcttgacagacgcaagcttcaagaacgaggaggccacggagcaggtgggcaaggtgaagattgtggcatgtgattccaaattgctcggacaataggcctgtgtaccctcgaggtcaaggaaggaagcttttaagtncggcgaggcggggtctgtntgcgcgtcagctgtacacgcctaggctaccgcgaggcggggtctgtntgcgtcagctgtacacgcctaggctaccgcccgaacggcatttcatttgccttnttcgtactgtatgtgtatcttcttttttccccttgtatacaatntgctgcagctataccggccaagagtatggcatggtatggcggcaggcanccgcaaacttgtttttacctacttggtgtagcgcctgtgtaacagttttcgatcgatnttgcttgttgtgttgtcgatgctaataccgcagtgtaattgacgaaatgactaaaatgaagagtagtgtagtagatgtcc

SEQ ID NO: 35729 - protein, 106 aa, Zea mays subsp. mays
MATFELYRRSTIGMCLTETLDEMVSNGTLSPELAIQVLVQFDKSMTDALENQVKSKVTVKGHLHTYRFCDNVWTFILTDASFKNEEATEQVGKVKIVACDSKLLGQ

SEQ ID NO: 35730 - protein, 104 aa, Zea mays subsp. mays
DSAFSSPSLTCSLSLSLSLSPFLSRGDGDDDRASAADSLLHQVPRPSSCSPPATSIDGRAWPPSSCTGGPPSACASPRRSTRWSPTAPSARSSLSRSSSSSTSP

SEQ ID NO: 35731 - protein, 93 aa, Zea mays subsp. mays
MCLTETLDEMVSNGTLSPELAIQVLVQFDKSMTDALENQVKSKVTVKGHLHTYRFCDNVWTFILTDASFKNEEATEQVGKVKIVACDSKLLGQ

SEQ ID NO: 35732 - DNA, 304 bp, Zea mays subsp. mays
  misc_feature (123)..(123): n is a, c, g, or t
aaccggcggcgacggcgacgctcatgtcctttgtcaccaggagcggcaaatccgccgcctccgacgaggacagggagctcgccgcgctggagaagatggagcggctcgacgcgtgcatcgccnagatggaagccgggagcgacgaggtgttcaggagcatcctgcacactagggtcgcactcctcaacatccgcacccagacatgctgatcgttttggacatccatcaaaaccacactccagaatgtcaccaaaatgcaagtgtacatacatattattggatgaaaaaaaaggctctcttgttt

SEQ ID NO: 35733 - protein, 101 aa, Zea mays subsp. mays
  misc_feature (41)..(41): Xaa can be any naturally occurring amino acid
NRRRRRRSCPLSPGAANPPPPTRTGSSPRWRRWSGSTRASXRWKPGATRCSGASCTLGSHSSTSAPRHADRFGHPSKPHSRMSPKCKCTYILLDEKKGSLV

SEQ ID NO: 35734 - protein, 68 aa, Zea mays subsp. mays
  misc_feature (41)..(41): Xaa can be any naturally occurring amino acid
PAATATLMSFVTRSGKSAASDEDRELAALEKMERLDACIAXMEAGSDEVFRSILHTRVALLNIRTQTC

SEQ ID NO: 35735 - protein, 61 aa, Zea mays subsp. mays
  misc_feature (34)..(34): Xaa can be any naturally occurring amino acid
MSFVTRSGKSAASDEDRELAALEKMERLDACIAXMEAGSDEVFRSILHTRVALLNIRTQTC

SEQ ID NO: 35736 - DNA, 558 bp, Zea mays subsp. mays
  misc_feature (90)..(90): n is a, c, g, or t
  misc_feature (281)..(281): n is a, c, g, or t
tcctgaacttgtagacccgaggatcaggggcgctgttgacgtggaccatctgcatgtggtggtgggcatcgtgcagtggtgcacccatanagaagggcggcagaggccctccgtgaggcaggttcttcggatgctctcggagaggctggacccggggaacggcagcttcggcgagggcatggaagacgcggagggcggcttctatccccggagcagcaggtgcggcggcgcacatcaccggaacgagctggtcccatacggcggcggtgacatgaggtctntgcattcctcgtcgagcacgaccaggtcctcttactgcagccgcagcatgctgctggagagcgggcagactcaatctcccccagaaacccagtgatgaatgaatgaatctagttagttcataggcaacttgttggtggttgctgttatttattattatttgctgtttgtttgttttgtaagggggaaaaaaggaattgtcaagtggtcattggaaggaaccagtggcggcagtgaatgagcaaagcagcagcacatgttccatgtggttgttggtcg

SEQ ID NO: 35737 - protein, 124 aa, Zea mays subsp. mays
  misc_feature (30)..(30): Xaa can be any naturally occurring amino acid
  misc_feature (94)..(94): Xaa can be any naturally occurring amino acid
PELVDPRIRGAVDVDHLHVVVGIVQWCTHXEGRQRPSVRQVLRMLSERLDPGNGSFGEGMEDAEGGFYPRSSRCGGAHHRNELVPYGGGDMRSXHSSSSTTRSSYCSRSMLLESGQTQSPPETQ

SEQ ID NO: 35738 - protein, 81 aa, Zea mays subsp. mays
  misc_feature (51)..(51): Xaa can be any naturally occurring amino acid
MLSERLDPGNGSFGEGMEDAEGGFYPRSSRCGGAHHRNELVPYGGGDMRSXHSSSSTTRSSYCSRSMLLESGQTQSPPETQ

SEQ ID NO: 35739 - protein, 65 aa, Zea mays subsp. mays
  misc_feature (35)..(35): Xaa can be any naturally occurring amino acid
MEDAEGGFYPRSSRCGGAHHRNELVPYGGGDMRSXHSSSSTTRSSYCSRSMLLESGQTQSPPETQ

SEQ ID NO: 35740 - DNA, 782 bp, Zea mays subsp. mays
ccatttcgactttcgagcgcagaaacgagagggccggagcagccgcagtcccggcgatcccgccgccggtcgccctcatacttcctcgtcactgccttcgatggtacccgtttgcgtgtgagcttgcaaaatcctgggcttggtcatctttcttcagagtttctctttccaacaatcaagatgagccgtggcggtagcgcgggtggtggtcaaagttctctgggttacctctttggaagcggtgagccccccaaaccagcagtggcaccagctgtaagtgctccacctgctgctgcaggtgctccacctgctgagaaaccacctgctgcaaagcctgatggcaccagtcagattgctgctggggttaccagccaaaccaataactaccacagggccgacggtcagaacaccggaaacttccttacggaccgtccttcgaccaaggtccacgctgctcctggcggtggctcttccctgggatacctgtttggtggcaactgatgccgctcaccaagctatcaccccccactgtcgccgcatgctttttctgaatcgtgaacagccgttgtcatttcatgtgtacccaaacctcccgtcccgcgtgggcccgtaagctgcgcctagatttcagggctaatcgtgtgcctgaaccctcatcataagtcgtctctgtacccagcttctcgtttcgtttgcacccgtgatggtatggtttggttgttgcccgctggacctatctattctttgcatttttcctttgaaatgtatccttgcccatttcc

SEQ ID NO: 35741 - protein, 166 aa, Zea mays subsp. mays
PFRLSSAETRGPEQPQSRRSRRRSPSYFLVTAFDGTRLRVSLQNPGLGHLSSEFLFPTIKMSRGGSAGGGQSSLGYLFGSGEPPKPAVAPAVSAPPAAAGAPPAEKPPAAKPDGTSQIAAGVTSQTNNYHRADGQNTGNFLTDRPSTKVHAAPGGGSSLGYLFGGN

SEQ ID NO: 35742 - protein, 106 aa, Zea mays subsp. mays
MSRGGSAGGGQSSLGYLFGSGEPPKPAVAPAVSAPPAAAGAPPAEKPPAAKPDGTSQIAAGVTSQTNNYHRADGQNTGNFLTDRPSTKVHAAPGGGSSLGYLFGGN

SEQ ID NO: 35743 - protein, 91 aa, Zea mays subsp. mays
MAPVRLLLGLPAKPITTTGPTVRTPETSLRTVLRPRSTLLLAVALPWDTCLVATDAAHQAITPHCRRMLFLNREQPLSFHVYPNLPSRVGP

SEQ ID NO: 35744 - DNA, 1619 bp, Zea mays subsp. mays
aattcccaaacccctagtagacccacgtctccggtccccctctcctcgcgcccgccatggcagcctgcggcggcgccggcgccggctgcgggccgcagtgctcgtcctcctcctccgcgggcggccaggaggatgctctggcggagagcatgggacgcctttcgaccgcctccgccgccgccgcgtgcggcaagtgcgacggcggcggcgcggccgtcgcggtggccggcggcgtcggcatgtgcgccggctgcttccggactcacctcttcggcaagttcaagctctccgtcacgagcaacgccatggtgcgccccacagacgccgtcctcctcgccttctccggcggtcccgcctccagggtggctctgcagttcatacacgagatgcagtccaaggcgatccagagctgggaggcgagcaactcccaggccctgccggtcttcagcctcggcgtcgtgttcgtcgacgagaggagcgtcctctcagcgagtcttccggggcacgaaatccaagctgcgatagaagatatcaggtccgtcgtgtcgggtctgtcaccgggggataagcgagtgcacatcgcccctctcgaggaggtgttctcgtccgggtcagacgacaaggcggccaggctgaaggaggtggtcggcgtgatcagtgacgagacgggcagggacgactttgttaggcgcctgcgcatgctttcactgcagaaggttgcactggagaacggatacaccaagatcatgctgggaacgtgtgcttccggaatagcatgccatgtgctatctgcaaccgtgaaggggcaaggctacgctttaccagctgatgtccagtatgttgatacgcggtgggaagtacccgtggttcttccacttcatgattgcctggcccaagagcttaacttgctctgtgaaattgatagtttgaagacacagcaacttctcgataggccttgcagtggcatcaatggcttagtttcatcctttgtttcacggctaagggaagagaactcttctcgagagcataccattttaagaactgctcaaaagcttaagccattctcgtttaacaagttctcagcaaacggctaccatgatttcctgccatcgcggcttcgtcccaagtttcagaacattgatgccaacgagtgtactttctctgagattctttgcctaatatgtggaagcccgttcagtgaatcagagctcctgaatttggaaaacacaaagctcaaggctcagaagaaaattgatctttatactgcccattgttgtcaaagttgccatttccagattctcccagcagctacagatatgtatggacatttcttttcgctactaccgaagttttggactgagaaagtggacgctgcatctgccagccatagctcactaagagatcagatagcggactacctgctggatgaagatgatggaaactgactttattctctggtttcgtgacataatttcatggagtcaaatgtttaactcacatggaattcccgaatgcctgtctgtactgacatgttttgtttgttgtactataagacatcgcattctaattgggcctcacacaggcatatgccaaacttatggataacagtgtttcttctt

SEQ ID NO: 35745 - protein, 462 aa, Zea mays subsp. mays
MAACGGAGAGCGPQCSSSSSAGGQEDALAESMGRLSTASAAAACGKCDGGGAAVAVAGGVGMCAGCFRTHLFGKFKLSVTSNAMVRPTDAVLLAFSGGPASRVALQFIHEMQSKAIQSWEASNSQALPVFSLGVVFVDERSVLSASLPGHEIQAAIEDIRSVVSGLSPGDKRVHIAPLEEVFSSGSDDKAARLKEVVGVISDETGRDDFVRRLRMLSLQKVALENGYTKIMLGTCASGIACHVLSATVKGQGYALPADVQYVDTRWEVPVVLPLHDCLAQELNLLCEIDSLKTQQLLDRPCSGINGLVSSFVSRLREENSSREHTILRTAQKLKPFSFNKFSANGYHDFLPSRLRPKFQNIDANECTFSEILCLICGSPFSESELLNLENTKLKAQKKIDLYTAHCCQSCHFQILPAATDMYGHFFSLLPKFWTEKVDAASASHSSLRDQIADYLLDEDDGN

SEQ ID NO: 35746 - protein, 431 aa, Zea mays subsp. mays
MGRLSTASAAAACGKCDGGGAAVAVAGGVGMCAGCFRTHLFGKFKLSVTSNAMVRPTDAVLLAFSGGPASRVALQFIHEMQSKAIQSWEASNSQALPVFSLGVVFVDERSVLSASLPGHEIQAAIEDIRSVVSGLSPGDKRVHIAPLEEVFSSGSDDKAARLKEVVGVISDETGRDDFVRRLRMLSLQKVALENGYTKIMLGTCASGIACHVLSATVKGQGYALPADVQYVDTRWEVPVVLPLHDCLAQELNLLCEIDSLKTQQLLDRPCSGINGLVSSFVSRLREENSSREHTILRTAQKLKPFSFNKFSANGYHDFLPSRLRPKFQNIDANECTFSEILCLICGSPFSESELLNLENTKLKAQKKIDLYTAHCCQSCHFQILPAATDMYGHFFSLLPKFWTEKVDAASASHSSLRDQIADYLLDEDDGN

SEQ ID NO: 35747 - protein, 401 aa, Zea mays subsp. mays
MCAGCFRTHLFGKFKLSVTSNAMVRPTDAVLLAFSGGPASRVALQFIHEMQSKAIQSWEASNSQALPVFSLGVVFVDERSVLSASLPGHEIQAAIEDIRSVVSGLSPGDKRVHIAPLEEVFSSGSDDKAARLKEVVGVISDETGRDDFVRRLRMLSLQKVALENGYTKIMLGTCASGIACHVLSATVKGQGYALPADVQYVDTRWEVPVVLPLHDCLAQELNLLCEIDSLKTQQLLDRPCSGINGLVSSFVSRLREENSSREHTILRTAQKLKPFSFNKFSANGYHDFLPSRLRPKFQNIDANECTFSEILCLICGSPFSESELLNLENTKLKAQKKIDLYTAHCCQSCHFQILPAATDMYGHFFSLLPKFWTEKVDAASASHSSLRDQIADYLLDEDDGN

SEQ ID NO: 35748 - DNA, 901 bp, Zea mays subsp. mays
atccccaatatatccccactcttcgcctcctttctggagcagctagggttccgtcctcgatccgatccgccgagtgcacaccacctttccccactccgatcgaatcgatggccgccgagggcgagaagaagatgataaccctcaaaagctccgatggcgaggagttcgaggtggaagaggcggtggcgatggagtcgcagaccatccgccacatgatcgaggatgactgcgccgacaacggcatccctcttcctaacgttaactccaagatcctatccaaggtaatcgagtactgcaacaagcacgtacatgccgccgccgccgcagccgccgcctcgaaggccggttccgacgacgtgggtgccgcctccgccaacagcaccgccgcctccggtgaggacctcaagaactgggatgcggacttcgtcaaggtcgaccagggccacgcttttcgacctcatcttggctgcaaactatctgaacatcaagggtctgctcgacctgacctgtcagactgttgctgacatgatcaagggcaagacaccagaagagattcgcaagaccttcaacatcaagaatgacttcacccctgaggaggaagaggagatccgcagggagaaccagtgggccttcgagtaaggaggtgctggatctattgatgcctaagtttcgtggtgtctactactatgtctactttatgttgtcctaatggttgtaagtattttgggagtcactttgcttgcgaatgtctcgcgtaagacttatgtggtcaatggtcggttattaacttattaccatgaaagcacttcgtctgctgccctaagaggtttagtcccatttgcattataaccaattcaatccttgtggatgatttgtgtgattccatcgtgaatctcatggt

SEQ ID NO: 35749 - protein, 173 aa, Zea mays subsp. mays
PQYIPTLRLLSGAARVPSSIRSAECTPPFPTPIESMAAEGEKKMITLKSSDGEEFEVEEAVAMESQTIRHMIEDDCADNGIPLPNVNSKILSKVIEYCNKHVHAAAAAAAASKAGSDDVGAASANSTAASGEDLKNWDADFVKVDQGHAFRPHLGCKLSEHQGSARPDLSDCC

SEQ ID NO: 35750 - protein, 138 aa, Zea mays subsp. mays
MAAEGEKKMITLKSSDGEEFEVEEAVAMESQTIRHMIEDDCADNGIPLPNVNSKILSKVIEYCNKHVHAAAAAAAASKAGSDDVGAASANSTAASGEDLKNWDADFVKVDQGHAFRPHLGCKLSEHQGSARPDLSDCC

SEQ ID NO: 35751 - protein, 130 aa, Zea mays subsp. mays
MITLKSSDGEEFEVEEAVAMESQTIRHMIEDDCADNGIPLPNVNSKILSKVIEYCNKHVHAAAAAAAASKAGSDDVGAASANSTAASGEDLKNWDADFVKVDQGHAFRPHLGCKLSEHQGSARPDLSDCC

SEQ ID NO: 35752 - DNA, 916 bp, Zea mays subsp. mays
  misc_feature (238)..(238): n is a, c, g, or t
ttcttcgccactctctcctctcctcgttcactctgccaggtggccggccgcccctgctcccatctcccacagccgccgccgccctcagctcctcagccacctcccatggcctcgtctccctgctgcagcgaacgcgaccaccgtttcctgcagcctcgatagctcccccccccccccccccccatgccgtccctgctcacctcaccttcgtcggccgtccttggacgccgtgctcggngcccgagctccctacgccggccaccatccttcccatggcaggagctccgatcggcccctgctgaccttggcactcggcgtggctccaagcagcgccttctcccccaggaccggctcaccgtcagccgcgagctcctctccctcacgtcccctacagacaagcagtgtcgccggtgagcagcagccacagcaactccgcgctccgccggcttgcggttttgtcaagcccagtagacagcagcaaccccgatgtcttcacgtcgtgcgctccaccccgatttgcgcagcccctgcgcgacgtcgtccacccgctagatgttgacgctgtgccacgcgcaccaagcgttcgacgaaatgcccaaccaacggacagcacgcgggtctcgaacccgattcggctaggttgttcgatttgtattttgtggtctactctaattacgctttggtcgatgtcgcatatatatgtgtgtgaatatgtttgtatggattcgagttagggaaggagaagaaagcgaagtagaaaagaacccggatgtttcttaggttttcagaggattgtggttgtattggatgtgtgttgaaaatgcctcctcgcaaagagtgtatggtcccatgcatgcgatgtgtgatttttgttggtgaatgcgaaataagtttagtgtttcaaaacggttaattg

SEQ ID NO: 35753 - protein, 185 aa, Zea mays subsp. mays
  misc_feature (79)..(79): Xaa can be any naturally occurring amino acid
SSPLSPLLVHSARWPAAPAPISHSRRRPQLLSHLPWPRLPAAANATTVSCSLDSSPPPPPPCRPCSPHLRRPSLDAVLXARAPYAGHHPSHGRSSDRPLLTLALGVAPSSAFSPRTGSPSAASSSPSRPLQTSSVAGEQQPQQLRAPPACGFVKPSRQQQPRCLHVVRSTPICAAPARRRPPARC

SEQ ID NO: 35754 - protein, 99 aa, Zea mays subsp. mays
  misc_feature (79)..(79): Xaa can be any naturally occurring amino acid
LRHSLLSSFTLPGGRPPLLPSPTAAAALSSSATSHGLVSLLQRTRPPFPAASIAPPPPPPHAVPAHLTFVGRPWTPCSXPELPTPATILPMAGAPIGPC

SEQ ID NO: 35755 - DNA, 1710 bp, Zea mays subsp. mays
tcatcatcgagtcatccatctaaacatccgatccgaccatggcggcagacgcacttcggggccttctccccggcgtttacgccgtgctgatggtaatcgccgtcacaagcgccgcctccagcgacgcgtcctcggtggtcgtcggcctcgccaaatgcgccgactgcaccaggaagaacttgaaggccgaggcggcattcaagggtcttgaggtggcgatcaagtgcaagaacagcaaaggcgagtacgagagcaaggccatgggcaagcttgatggcttcggcgccttcagcatcccacttagcacggacctccacggcgctgactgcgttgcacagctccacagcgctgcggggaacccgtgccccggtcaagaaccttccagaattgtgccacaatcgtcaaagggcaacttcgtcgtggtccctggaaagacagactacccatcgaaggaatgtgcgtccgcaaccctgtgtgggtcgatcaagaagcacctactagaccatttccacaagaaacctgtgccaccaaagccaaagccagaacctaagccagagctggagccgaagccagaacctaagccagagccagagaaccacccacctacaccaacatacggatcctcaactccgatctaccatcctccatccaggcagttgtttgacaagaaacacatgtttgataacttccacaagcaccacgactaccatcacttctttgaccacttccacaagaaaccagttccaccaaagccaaaaccagaacctaagccagaaccaaaacccaagccccagccagagtaccactctccaactccaacatatgggtcgcccacaccgatctaccaccctccggctaggcatttgtttgataagaagcccttgctagatcacttccataaggaccatgactatcaccacttcttagaccacttccacaagaaacccgtgccacaaaagccaaagctagaacccaagccacagcctaagcccgagtaccaccctccgacacccacatatgtttctccaactcccatctatcacccgcccgctgagacagaaatgaagtatgacaagaagcactttgatcactttcacaaggatcatgactaccaccacttctttgaccacttccacaagaagcctgtgccacccaagccaaaaccggagccagagccaaagccaaagccacaacctaagccagagtacaagccccccatgcccacatacgggtctccaactcctatctaccatcctccagccaagaaagaagtggcatttgacaagaagcacttccttgatcacttccacaaagaccatgactaccaccacttctttgaccacttccacaagaagcctgtgccaccaaagcctaagccggagcccaagccagagcccaaaccacaacctgagcctgagtaccacccacctacaccgacctatggatcaccgactcccatctaccaccctccggccaagcattgatcgatggagttgaatggtggtcagtgatcgacgtcgctagctaagagttgcatgtgtggtctagctagcgtggtttgcagtcctgcttttttgtttctacagaataaattatagctttatttgggtatgtatacttatttgtgtatcggttagtatcatataaatgtatgatttgagtgtgcgttgtttttaatatgcatgttctatgatgtactttattcctttt

SEQ ID NO: 35756 - protein, 481 aa, Zea mays subsp. mays
MAADALRGLLPGVYAVLMVIAVTSAASSDASSVVVGLAKCADCTRKNLKAEAAFKGLEVAIKCKNSKGEYESKAMGKLDGFGAFSIPLSTDLHGADCVAQLHSAAGNPCPGQEPSRIVPQSSKGNFVVVPGKTDYPSKECASATLCGSIKKHLLDHFHKKPVPPKPKPEPKPELEPKPEPKPEPENHPPTPTYGSSTPIYHPPSRQLFDKKHMFDNFHKHHDYHHFFDHFHKKPVPPKPKPEPKPEPKPKPQPEYHSPTPTYGSPTPIYHPPARHLFDKKPLLDHFHKDHDYHHFLDHFHKKPVPQKPKLEPKPQPKPEYHPPTPTYVSPTPIYHPPAETEMKYDKKHFDHFHKDHDYHHFFDHFHKKPVPPKPKPEPEPKPKPQPKPEYKPPMPTYGSPTPIYHPPAKKEVAFDKKHFLDHFHKDHDYHHFFDHFHKKPVPPKPKPEPKPEPKPQPEPEYHPPTPTYGSPTPIYHPPAKH

SEQ ID NO: 35757 - protein, 464 aa, Zea mays subsp. mays
MVIAVTSAASSDASSVVVGLAKCADCTRKNLKAEAAFKGLEVAIKCKNSKGEYESKAMGKLDGFGAFSIPLSTDLHGADCVAQLHSAAGNPCPGQEPSRIVPQSSKGNFVVVPGKTDYPSKECASATLCGSIKKHLLDHFHKKPVPPKPKPEPKPELEPKPEPKPEPENHPPTPTYGSSTPIYHPPSRQLFDKKHMFDNFHKHHDYHHFFDHFHKKPVPPKPKPEPKPEPKPKPQPEYHSPTPTYGSPTPIYHPPARHLFDKKPLLDHFHKDHDYHHFLDHFHKKPVPQKPKLEPKPQPKPEYHPPTPTYVSPTPIYHPPAETEMKYDKKHFDHFHKDHDYHHFFDHFHKKPVPPKPKPEPEPKPKPQPKPEYKPPMPTYGSPTPIYHPPAKKEVAFDKKHFLDHFHKDHDYHHFFDHFHKKPVPPKPKPEPKPEPKPQPEPEYHPPTPTYGSPTPIYHPPAKH

SEQ ID NO: 35758 - protein, 407 aa, Zea mays subsp. mays
MGKLDGFGAFSIPLSTDLHGADCVAQLHSAAGNPCPGQEPSRIVPQSSKGNFVVVPGKTDYPSKECASATLCGSIKKHLLDHFHKKPVPPKPKPEPKPELEPKPEPKPEPENHPPTPTYGSSTPIYHPPSRQLFDKKHMFDNFHKHHDYHHFFDHFHKKPVPPKPKPEPKPEPKPKPQPEYHSPTPTYGSPTPIYHPPARHLFDKKPLLDHFHKDHDYHHFLDHFHKKPVPQKPKLEPKPQPKPEYHPPTPTYVSPTPIYHPPAETEMKYDKKHFDHFHKDHDYHHFFDHFHKKPVPPKPKPEPEPKPKPQPKPEYKPPMPTYGSPTPIYHPPAKKEVAFDKKHFLDHFHKDHDYHHFFDHFHKKPVPPKPKPEPKPEPKPQPEPEYHPPTPTYGSPTPIYHPPAKH

SEQ ID NO: 35759 - DNA, 1233 bp, Zea mays subsp. mays
aacgcaacaaagccgaggtaaagcagggagcatcttgagtgttcgacagtgagccatggagaagacgtccgagagcgctataccgccggcggcatccccgctgatgctgttcgggtcgtgggcgagctcgtacacgcaccgcgtgcagctggcgctgcggctcaagggcctggagttcgactacgtggaggaggacctggggaacaagagcgacgagctgctgcgccacaaccccgtccacaagaaggtgcccgtgctcgtccacggcggccgcgcgctcccggagtccgtcattatcctccagtaccttgacgacgcctggccggagacccgcccgctgctccccgccgacgccttcgaccgcgcgctcgcgcggttctggtgccacttcgccgacgacaagctcgggccggcggtgggcgcggtgttcgcgtcgacgggggagggccaggaggcggcggtgcggcaggtgcacgagaacctggccctgatcgagtccgagctccgcgacggcgcgttccggggccgccgcttcttcggcggcgacgaggtgggcctgctggacgtcgtcctgggctgcggctcctactggctcgccgtgttcgaggaggtgaccggggtgcgcctcgtggacgccgacgccttcccgcgcttccacgcctggctgcgcgacttcgaggccctggacgaggtccgggagaccatccccgcggtggaccgcctgctcgagtacgcgcgcggcctccgccacatgctgctcggcctcgcgggggccggcgccggcgccggcgcggacgcgccctccaccgacgcccccgccgcaccgccggcctcggctgacatcgccgtcgacatttgaacgcagggcgtcgtcgcgccgggcgtctgccagcgccgtccggctagccatcagtagctagtacgtagtaccagtatagtttgcagagtcgattgcgccatgtgtggtggctgcgtgcctgtgcctgcctgccggcctggcctggagtgcggttctgctgccgccacagttaattggcccagtttgtctagctgtcgagttttttttttttcaactctctctgtctctctccgactcttcccttctttttgataaagttcgtccctgcagttaaatctctgtttgctgcgacttgttcttcttgtgtgtgagagtgggacgaaatctcgtgtgtttgtatgtggcagtttggctcgcttgttgaatgtaagcca

SEQ ID NO: 35760 - protein, 267 aa, Zea mays subsp. mays
MEKTSESAIPPAASPLMLFGSWASSYTHRVQLALRLKGLEFDYVEEDLGNKSDELLRHNPVHKKVPVLVHGGRALPESVIILQYLDDAWPETRPLLPADAFDRALARFWCHFADDKLGPAVGAVFASTGEGQEAAVRQVHENLALIESELRDGAFRGRRFFGGDEVGLLDVVLGCGSYWLAVFEEVTGVRLVDADAFPRFHAWLRDFEALDEVRETIPAVDRLLEYARGLRHMLLGLAGAGAGAGADAPSTDAPAAPPASADIAVDI

SEQ ID NO: 35761 - protein, 251 aa, Zea mays subsp. mays
MLFGSWASSYTHRVQLALRLKGLEFDYVEEDLGNKSDELLRHNPVHKKVPVLVHGGRALPESVIILQYLDDAWPETRPLLPADAFDRALARFWCHFADDKLGPAVGAVFASTGEGQEAAVRQVHENLALIESELRDGAFRGRRFFGGDEVGLLDVVLGCGSYWLAVFEEVTGVRLVDADAFPRFHAWLRDFEALDEVRETIPAVDRLLEYARGLRHMLLGLAGAGAGAGADAPSTDAPAAPPASADIAVDI

SEQ ID NO: 35762 - DNA, 936 bp, Zea mays subsp. mays
gccccgtcccaaatccccctgtcccgctaggattcccccgaaaccctcccccaaaaccccagagcggagaagagcgcaagatgttcggcttcgggcaccacggccaccacggccagaacccgccggcgcacggcggcgtgcaccagcccaccttcaagatcttctgcaaggccgacgaggggtactgcctcaccgtccgcgacggcaacgtggtgctggcccccgccaacccgcgcgacgagcaccagcactggtacaaggacatgcgcttcagcacccaggtcaaggacgaggagggcaaccctgcgttcgccctcgtcaacaaggccactggggctcgccatcaagcactccctcggccagtcccacccggtgaagctggtgccgttcaacccggagtaccaggacgagtcggtgctgtggacggagagcggcgacgtgggcaagggcttccgctgcatccgcatggtgaacaacatccgcctcaacttcgacgccttccacggcggacaagggccacggcggcgtgcgcgacggcaccaacatcgtgctctggaagtggtgcgagggcgacaaccagcgctggaagatcgtcccctggtaaatgtgctgttctgtggctgcactggtcatcaccatgatctggagctttgaaggcatagccacctgtggtcagcaactgctgccgtgttgctagaataaagttggtggcgatcgatcgatcgatctttggtgatgggtgtccctccctgtgtgtttgtgtttagttccagtcgtttgtgaggaagtcagttatgtttgagtgagaggggtacttcgctcttcggttaactctgtacttgtcatgaggagagttttcatacccggagtgtagaaccctgtactgtactcggatccttcctttttcatccaagtgggttttattttatcaaccgc

SEQ ID NO: 35763 - protein, 212 aa, Zea mays subsp. mays
PVPNPPVPLGFPRNPPPKPQSGEERKMFGFGHHGHHGQNPPAHGGVHQPTFKIFCKADEGYCLTVRDGNVVLAPANPRDEHQHWYKDMRFSTQVKDEEGNPAFALVNKATGARHQALPRPVPPGEAGAVQPGVPGRVGAVDGERRRGQGLPLHPHGEQHPPQLRRLPRRTRATAACATAPTSCSGSGARATTSAGRSSPGKCAVLWLHWSSP

SEQ ID NO: 35764 - protein, 186 aa, Zea mays subsp. mays
MFGFGHHGHHGQNPPAHGGVHQPTFKIFCKADEGYCLTVRDGNVVLAPANPRDEHQHWYKDMRFSTQVKDEEGNPAFALVNKATGARHQALPRPVPPGEAGAVQPGVPGRVGAVDGERRRGQGLPLHPHGEQHPPQLRRLPRRTRATAACATAPTSCSGSGARATTSAGRSSPGKCAVLWLHWSSP

SEQ ID NO: 35765 - protein, 125 aa, Zea mays subsp. mays
MRFSTQVKDEEGNPAFALVNKATGARHQALPRPVPPGEAGAVQPGVPGRVGAVDGERRRGQGLPLHPHGEQHPPQLRRLPRRTRATAACATAPTSCSGSGARATTSAGRSSPGKCAVLWLHWSSP

SEQ ID NO: 35766 - DNA, 1313 bp, Zea mays subsp. mays
atcgcccgctgctcctctatccctttactgctgctgctactaccttaagctatcactatcatggccttgatgctgctagcgcgcaacctgcgctcccgccgccgcccaccgctcgccgccgccgcggcgttctcgtcggccgcggcggaggcggagagggcgatacgggacgggccgcggaacgactggagccggcccgagatccaggccgtctacgactcaccgctcctcgacctcctctttcacggggctcaggtccacagaaatgtccataaattcagagaagtgcagcaatgcacacttctttcaatcaagactggtggatgcagtgaagattgttcttactgtcctcagtcatcaagatacaacactggattgaaggcccaaaaattgatgaacaaagatgctgtcttggaagcagcaaaaaaggcaaaagagtctgggagcacccgtttttgcatgggagctgcatggagagaaaccattggcaggaaatcaaacttcaaccagattcttgaatatgtcaaggaaataaggggtatggacatggaggtctgttgcacactaggcatgatagagaaacaacaagctgaagaactcaagaaggctggacttacagcatataatcataacctagatacatcaagagagtattatcccaacattattaccacaagatcatatgatgatagactgcagactcttgagcatgtccgtgaagctggaataagcatctgctcaggtggaatcattggtcttggtgaagcagaggaggaccgggtagggttgttgcataccctagctaccttgcctacacacccagagagcgttcctattaatgcattggttgctgtaaaaggcacacctcttgaggaccagaagcctgtagagatctgggaaatgatccgcatgatcgccactgctcggatcacgatgccaaaggcaatggtgaggctttcagcaggccgagtacggttctcgatgccagaacaagcgctgtgcttcctcgctggggccaactccatctttgccggcgagaaacttctcacaaccgcaaacaacgactttgatgcggaccaggcgatgttcaagatccttggcctgatccccaaggctccaagctttggcgaggaagaggcgtctgcggcggctcccacagaatccgagaggtctgagcaagctgcttcgatgtagaatatatacatatcattaccgattatccgtatcacggttggggcgaaactagaactaccgttgtagctagagcattggattgtagaaaccacaacatttcattattttgtaattgcttg

SEQ ID NO: 35767 - protein, 377 aa, Zea mays subsp. mays
MALMLLARNLRSRRRPPLAAAAAFSSAAAEAERAIRDGPRNDWSRPEIQAVYDSPLLDLLFHGAQVHRNVHKFREVQQCTLLSIKTGGCSEDCSYCPQSSRYNTGLKAQKLMNKDAVLEAAKKAKESGSTRFCMGAAWRETIGRKSNFNQILEYVKEIRGMDMEVCCTLGMIEKQQAEELKKAGLTAYNHNLDTSREYYPNIITTRSYDDRLQTLEHVREAGISICSGGIIGLGEAEEDRVGLLHTLATLPTHPESVPINALVAVKGTPLEDQKPVEIWEMIRMIATARITMPKAMVRLSAGRVRFSMPEQALCFLAGANSIFAGEKLLTTANNDFDADQAMFKILGLIPKAPSFGEEEASAAAPTESERSEQAASM

SEQ ID NO: 35768 - protein, 374 aa, Zea mays subsp. mays
MLLARNLRSRRRPPLAAAAAFSSAAAEAERAIRDGPRNDWSRPEIQAVYDSPLLDLLFHGAQVHRNVHKFREVQQCTLLSIKTGGCSEDCSYCPQSSRYNTGLKAQKLMNKDAVLEAAKKAKESGSTRFCMGAAWRETIGRKSNFNQILEYVKEIRGMDMEVCCTLGMIEKQQAEELKKAGLTAYNHNLDTSREYYPNIITTRSYDDRLQTLEHVREAGISICSGGIIGLGEAEEDRVGLLHTLATLPTHPESVPINALVAVKGTPLEDQKPVEIWEMIRMIATARITMPKAMVRLSAGRVRFSMPEQALCFLAGANSIFAGEKLLTTANNDFDADQAMFKILGLIPKAPSFGEEEASAAAPTESERSEQAASM

SEQ ID NO: 35769 - protein, 266 aa, Zea mays subsp. mays
MNKDAVLEAAKKAKESGSTRFCMGAAWRETIGRKSNFNQILEYVKEIRGMDMEVCCTLGMIEKQQAEELKKAGLTAYNHNLDTSREYYPNIITTRSYDDRLQTLEHVREAGISICSGGIIGLGEAEEDRVGLLHTLATLPTHPESVPINALVAVKGTPLEDQKPVEIWEMIRMIATARITMPKAMVRLSAGRVRFSMPEQALCFLAGANSIFAGEKLLTTANNDFDADQAMFKILGLIPKAPSFGEEEASAAAPTESERSEQAASM

SEQ ID NO: 35770 - DNA, 586 bp, Zea mays subsp. mays
aaaaccctaaacccaggacccaggtttatcggtgaggcgagccgcgagtggaactgtggaagcgtcgagcttttttcttctttgtcttgctgcgcaagaagaagggaaacgagaggagggcggcgatggcgaagaggctgctcccgtcgctgaaccgggtgctggtggagaagctggtgcagcccaagaagaccgccggcggcatcctcctcccggaaacatccaagcagctgaatgctgctaaagtggtggctgttggccctggtgagcgcgacaaggcaggcaatctgatcccagttgctctgaaggaaggcgacactgttcttctgcccgagtatggtggatctgaagtcaagcttgcggctgataaagagtacctcctcttcagagaggatgacattttgggcacacttgtggactgattcagatcgcgggcaagcgggtggtgagatgcgtaggatttgaagctgggaacaaactccagaaagaactgtgccctgtcgtgatgtcataaatttgtggtgaaacatcatatcatgaggataaaacttgttgcttttttgtgatgcaattgagaaaactttcg

SEQ ID NO: 35771 - protein, 98 aa, Zea mays subsp. mays
MAKRLLPSLNRVLVEKLVQPKKTAGGILLPETSKQLNAAKVVAVGPGERDKAGNLIPVALKEGDTVLLPEYGGSEVKLAADKEYLLFREDDILGTLVD

SEQ ID NO: 35772 - protein, 50 aa, Zea mays subsp. mays
KTLNPGPRFIGEASREWNCGSVELFSSLSCCARRRETRGGRRWRRGCSRR

SEQ ID NO: 35773 - DNA, 779 bp, Zea mays subsp. mays
  misc_feature (408)..(408): n is a, c, g, or t
  misc_feature (537)..(537): n is a, c, g, or t
  misc_feature (555)..(555): n is a, c, g, or t
  misc_feature (574)..(574): n is a, c, g, or t
  misc_feature (600)..(600): n is a, c, g, or t
  misc_feature (663)..(663): n is a, c, g, or t
aaccaaacgctaatttattagctctactagaggagcccacagccgtttttcccgtccacagccctcagcccaccacaaacgcgcctccgtaccatccgtcgccgccggcgcaccgcgatggctgcctccgccacggccgcgaggcctctcgccgggaccgccgtcccgctcccgctctcgacgcggacgcggcctgccagggtcgccttgctctccctgattcctcctgctccggcccagcgccttgctctcaggcgtggcgcgtggctctcacccccggagcgcagccggtcggtgcggtgcctggcggctatgagcccggagatgcgggcaacgctggacaaggtcgtaggatccagcaaggtggtgctgttcatgaagggcaccaaggacttcccgcagtgcggnttctcccacaccgtcgtgcagatcctgcgctcgctcgacgtgcccttcgagacgctcgacgtgctcgccaacgaggcgctccggcaggggctcaaggagtactccagctggcccaccttcccgcagctntacatcgacggcgagttnttcggtggatgtgacatcnccgttgaggcatacaagagtggaganctgcaggaaactctagagaaagcaatgtgctcatagagaaaagaaattagaaccaggagtgcncgacatacagttaatcaaaatgttatagtatttgctgtacaattcaggcaatgttaagctggagataccaaagttgtaggcaatccatgtccaaatgctcagtgcacttggtttgg

SEQ ID NO: 35774 - protein, 188 aa, Zea mays subsp. mays
  misc_feature (136)..(136): Xaa can be any naturally occurring amino acid
  misc_feature (179)..(179): Xaa can be any naturally occurring amino acid
  misc_feature (185)..(185): Xaa can be any naturally occurring amino acid
PNANLLALLEEPTAVFPVHSPQPTTNAPPYHPSPPAHRDGCLRHGREASRRDRRPAPALDADAACQGRLALPDSSCSGPAPCSQAWRVALTPGAQPVGAVPGGYEPGDAGNAGQGRRIQQGGAVHEGHQGLPAVRXLPHRRADPALARRALRDARRARQRGAPAGAQGVLQLAHLPAAXHRRRVXRWM

SEQ ID NO: 35775 - protein, 172 aa, Zea mays subsp. mays
  misc_feature (97)..(97): Xaa can be any naturally occurring amino acid
  misc_feature (140)..(140): Xaa can be any naturally occurring amino acid
  misc_feature (146)..(146): Xaa can be any naturally occurring amino acid
  misc_feature (153)..(153): Xaa can be any naturally occurring amino acid
  misc_feature (161)..(161): Xaa can be any naturally occurring amino acid
MAASATAARPLAGTAVPLPLSTRTRPARVALLSLIPPAPAQRLALRRGAWLSPPERSRSVRCLAAMSPEMRATLDKVVGSSKVVLFMKGTKDFPQCXFSHTVVQILRSLDVPFETLDVLANEALRQGLKEYSSWPTFPQXYIDGEXFGGCDIXVEAYKSGXLQETLEKAMCS

SEQ ID NO: 35776 - protein, 107 aa, Zea mays subsp. mays
  misc_feature (32)..(32): Xaa can be any naturally occurring amino acid
  misc_feature (75)..(75): Xaa can be any naturally occurring amino acid
  misc_feature (81)..(81): Xaa can be any naturally occurring amino acid
  misc_feature (88)..(88): Xaa can be any naturally occurring amino acid
  misc_feature (96)..(96): Xaa can be any naturally occurring amino acid
MSPEMRATLDKVVGSSKVVLFMKGTKDFPQCXFSHTVVQILRSLDVPFETLDVLANEALRQGLKEYSSWPTFPQXYIDGEXFGGCDIXVEAYKSGXLQETLEKAMCS

SEQ ID NO: 35777 - DNA, 1834 bp, Zea mays subsp. mays
tgattctattgtgagtggagatggattctgtgagaagttggttccagaagttccagccgagagacaaatcgaagaggccagtggtggctgccagacatggaaaagatccaggaaagcccccgatggacgatgccccttctagtgcgacgaaacagagggttgccgctgcaaaacagtacattgagaaccactacaagacccagatgaagtccctgcaagataggaaagagaggcgctggatgttggagagaaaattacaagatgccgaagttcctgtagaagagcaaaataacattcttaagcatttggagaaaaaagagactgaatatatgcgcttgcagagacacaagatgggagttgaagattttgaacttttgactattattgggagaggtgcattcggagaggtgcgtctttgtagagagaaggtctctaagaatgtttatgcaatgaaaaagctcaagaaatctgaaatgcttcgtaggggccaggtagaacatgtcaaagctgaaaggaaccttcttgctgaagttgatagtgcttacatagttaagctctattattctttccaagacgaagagttcttatatctcatcatggaatacctttcctggtggagacatgatgactttacttatgcgcaaagacacactaacagaagatgaagctagattttatattgcagaaactgtgcttgccatcgagtctattcacaagcacaactatgttcatcgggatatcaaaccagataatcttttgttagatcgcagtggtcacctgaagttttctgacttcggtttgtgtaaacctttggacagcagtaatttccctaatttgaatgaaccagattatatgtctggaaaagttaccacacctttgcctgataccactcggttaagcaacccttctgcaccaaggcgtacacagcaggagcaattgtcacactggcaaaagaaccgtcggatgttggcatactcaacagtcggtacacctgattatattgctccagaagtgctactgaagaaaggatatggaacggagtgtgactggtggtcccttggtgctattatgtatgaaatgctagttggttaccctccattttattcagaggacccaatgtctacttgcagaaagattgtgaactggagaagtcacttgaaattccctgaagaggcaaagcttcctcctgaagctaagactctcatcagcaagcttttgtgtaatgttgagcatcgacttggtacaaaaggagcccatgaaataaaagctcatccatggttcggaggtgttcagtgggagaagttgtatcagatgaaagctgctttcataccagaagttaatggagagttggatactcagaattttgagaatttcgaggagattggaactcaaattcaaagttcatccaagtcaggcccttggagaaagatgcttccatccaaagatgcaaactttgttgggtatacgtacaagaactttgaaattgtgaatgatgatgaagtggcaggaattgcagagttgaagaaaaagagttccaaaccaaagcgaccaaccatcaagacaatgtttgagaggatggacgaagaggagcctgttcaagggagtttcttaagtatgttgcccccggagggccaaccttcgtcccactccagcgttccacaggaaaaataccaacctcgccgtaaataggatatggaggtttggaaagtaaagcataggaaagtaaaacaagaaaaaaaaatcgtctgctgccttttgatctgttccctgtctaagttttgtaaatcctaaccaatgcgttctttagtcaaatgcttaaaaaaatctctccggc

SEQ ID NO: 35778 - protein, 355 aa, Zea mays subsp. mays
MMTLLMRKDTLTEDEARFYIAETVLAIESIHKHNYVHRDIKPDNLLLDRSGHLKFSDFGLCKPLDSSNFPNLNEPDYMSGKVTTPLPDTTRLSNPSAPRRTQQEQLSHWQKNRRMLAYSTVGTPDYIAPEVLLKKGYGTECDWWSLGAIMYEMLVGYPPFYSEDPMSTCRKIVNWRSHLKFPEEAKLPPEAKTLISKLLCNVEHRLGTKGAHEIKAHPWFGGVQWEKLYQMKAAFIPEVNGELDTQNFENFEEIGTQIQSSSKSGPWRKMLPSKDANFVGYTYKNFEIVNDDEVAGIAELKKKSSKPKRPTIKTMFERMDEEEPVQGSFLSMLPPEGQPSSHSSVPQEKYQPRRK

SEQ ID NO: 35779 - protein, 354 aa, Zea mays subsp. mays
MTLLMRKDTLTEDEARFYIAETVLAIESIHKHNYVHRDIKPDNLLLDRSGHLKFSDFGLCKPLDSSNFPNLNEPDYMSGKVTTPLPDTTRLSNPSAPRRTQQEQLSHWQKNRRMLAYSTVGTPDYIAPEVLLKKGYGTECDWWSLGAIMYEMLVGYPPFYSEDPMSTCRKIVNWRSHLKFPEEAKLPPEAKTLISKLLCNVEHRLGTKGAHEIKAHPWFGGVQWEKLYQMKAAFIPEVNGELDTQNFENFEEIGTQIQSSSKSGPWRKMLPSKDANFVGYTYKNFEIVNDDEVAGIAELKKKSSKPKRPTIKTMFERMDEEEPVQGSFLSMLPPEGQPSSHSSVPQEKYQPRRK

SEQ ID NO: 35780 - protein, 350 aa, Zea mays subsp. mays
MRKDTLTEDEARFYIAETVLAIESIHKHNYVHRDIKPDNLLLDRSGHLKFSDFGLCKPLDSSNFPNLNEPDYMSGKVTTPLPDTTRLSNPSAPRRTQQEQLSHWQKNRRMLAYSTVGTPDYIAPEVLLKKGYGTECDWWSLGAIMYEMLVGYPPFYSEDPMSTCRKIVNWRSHLKFPEEAKLPPEAKTLISKLLCNVEHRLGTKGAHEIKAHPWFGGVQWEKLYQMKAAFIPEVNGELDTQNFENFEEIGTQIQSSSKSGPWRKMLPSKDANFVGYTYKNFEIVNDDEVAGIAELKKKSSKPKRPTIKTMFERMDEEEPVQGSFLSMLPPEGQPSSHSSVPQEKYQPRRK

SEQ ID NO: 35781 - DNA, 1017 bp, Zea mays subsp. mays
atgcatcccatccccattcccatccatagagctgcgggcggcctgcgctgcatgcagccaacaagctcatcagctcaccgtacctaggaggacgaccgagcagctaaggtagtagtagctagctagccagtgatggcgggctacaaagcgcagggcggggcgctcgtcgtcgtcctggctgtcgccgcgctcttcgcggcggcagcgatggcgatggcggtggacgacgagcacatgtaccactggaagtgcttcaagtcgtgcacggggaactgccgcaacgaggacgcctttgacgacgacgacgacgtcgtcgtcgcccgccactccgagggctcctcccacgtcgtcgctgccgtctccggcggcaagtgcaaggacaggtgcctcagcgagtgcttcgaggacctgccggccctctgctaccaccagtgcgtcgccaccaactgcctctgctacccaccctttagcaacgagaaagtgatgtgcctgaagagctgctgcaacaagtgcttccaccacggcccgccgcctgccccgaagccgaggccgccaatgcctggtcctccgaagccgcctgccccggcgaagcccaagccaccgccgacgccgacgccgaggccgccagcgccaaagccaccgacgcccaggccgccgccgccgccaaagaagccgtgtccctgcccccccggcagcgacgaggtcaaggccagcgaaaacaactgatacgtacgatggatcggccagtcgtcgttgtcgtcgtctcagaataacttcatatactatagcacttgacttcgcaagtgtacgtgtgtgggtacgtcggcacatcaagtaggccccactatacgacgcgacgcatatatgtacgcaatgggagtacgtgccacttttacgtacttcattgctgctaccaaggaaaaggaaggaaagcaatgctagctccgttgctgtaaatgatgcatgtactgatagttatacataaatgaatgaatgcatgtatatgttgatgtactg

SEQ ID NO: 35782 - protein, 197 aa, Zea mays subsp. mays
MAGYKAQGGALVVVLAVAALFAAAAMAMAVDDEHMYHWKCFKSCTGNCRNEDAFDDDDDVVVARHSEGSSHVVAAVSGGKCKDRCLSECFEDLPALCYHQCVATNCLCYPPFSNEKVMCLKSCCNKCFHHGPPPAPKPRPPMPGPPKPPAPAKPKPPPTPTPRPPAPKPPTPRPPPPPKKPCPCPPGSDEVKASENN

SEQ ID NO: 35783 - protein, 172 aa, Zea mays subsp. mays
MAMAVDDEHMYHWKCFKSCTGNCRNEDAFDDDDDVVVARHSEGSSHVVAAVSGGKCKDRCLSECFEDLPALCYHQCVATNCLCYPPFSNEKVMCLKSCCNKCFHHGPPPAPKPRPPMPGPPKPPAPAKPKPPPTPTPRPPAPKPPTPRPPPPPKKPCPCPPGSDEVKASENN

SEQ ID NO: 35784 - protein, 170 aa, Zea mays subsp. mays
MAVDDEHMYHWKCFKSCTGNCRNEDAFDDDDDVVVARHSEGSSHVVAAVSGGKCKDRCLSECFEDLPALCYHQCVATNCLCYPPFSNEKVMCLKSCCNKCFHHGPPPAPKPRPPMPGPPKPPAPAKPKPPPTPTPRPPAPKPPTPRPPPPPKKPCPCPPGSDEVKASENN

SEQ ID NO: 35785 - DNA, 435 bp, Zea mays subsp. mays
  misc_feature (190)..(190): n is a, c, g, or t
  misc_feature (219)..(220): n is a, c, g, or t
  misc_feature (270)..(270): n is a, c, g, or t
  misc_feature (272)..(272): n is a, c, g, or t
gacagggaggggtcatccatccatcagaccatcacccatggacaaccttaaggagcagcggggccacgatgccgcgggcgccaacagcggcgtctggatgacggtgccggcgttcggggactgggacaccaagaacggcgcgctgccggactactccatggacttctccaagatccgcgagatgcgcaanagaaacaagaaggagctctcccgcgccannctcggcggcgacgacgacctcctcgcccacgctcacgcccagaagccgcngnaacagcgcccagcccaagctcggccgcccctgccccgccgccgaccgccgaccgctccacgcccgcgaccactccccaacgggagggaagaagttcctgagctacttccagtgctgtatcaaggcctgaagaggagctgccgcaatgctatgtcttgtgtgcc

SEQ ID NO: 35786 - protein, 144 aa, Zea mays subsp. mays
  misc_feature (63)..(63): Xaa can be any naturally occurring amino acid
  misc_feature (73)..(73): Xaa can be any naturally occurring amino acid
  misc_feature (90)..(91): Xaa can be any naturally occurring amino acid
TGRGHPSIRPSPMDNLKEQRGHDAAGANSGVWMTVPAFGDWDTKNGALPDYSMDFSKIREMRXRNKKELSRAXLGGDDDLLAHAHAQKPXXQRPAQARPPLPRRRPPTAPRPRPLPNGREEVPELLPVLYQGLKRSCRNAMSCV

SEQ ID NO: 35787 - protein, 132 aa, Zea mays subsp. mays
  misc_feature (51)..(51): Xaa can be any naturally occurring amino acid
  misc_feature (61)..(61): Xaa can be any naturally occurring amino acid
  misc_feature (78)..(79): Xaa can be any naturally occurring amino acid
MDNLKEQRGHDAAGANSGVWMTVPAFGDWDTKNGALPDYSMDFSKIREMRXRNKKELSRAXLGGDDDLLAHAHAQKPXXQRPAQARPPLPRRRPPTAPRPRPLPNGREEVPELLPVLYQGLKRSCRNAMSCV

SEQ ID NO: 35788 - protein, 112 aa, Zea mays subsp. mays
  misc_feature (31)..(31): Xaa can be any naturally occurring amino acid
  misc_feature (41)..(41): Xaa can be any naturally occurring amino acid
  misc_feature (58)..(59): Xaa can be any naturally occurring amino acid
MTVPAFGDWDTKNGALPDYSMDFSKIREMRXRNKKELSRAXLGGDDDLLAHAHAQKPXXQRPAQARPPLPRRRPPTAPRPRPLPNGREEVPELLPVLYQGLKRSCRNAMSCV

SEQ ID NO: 35789 - DNA, 2490 bp, Zea mays subsp. mays
gtcctatcctctccctcgccatcctcgtctccgcctccgccgctccccctcggtccccgccccacctcccgttctctccctccttggatagggttagagactgagttcacccgcacgcgcgcgagccatggtctccttcacctgttcccaggtcggcgcgacggcagcgggcggagcctcgcccttcatcggctaccggtggcggagcggccccgggggagccactccgtcgagctccctcttcgttggccggcggctggcagcggtgcagatgcgcgcgccatctcgcggggcccgcgggggctccgcgctgcgggtcacgtgcgagaaggtggtggggatcgacctgggcaccaccaactccgcggtcgccgccatggagggcggcaagccgaccgtcgtcaccaacgccgagggcgcgcgcaccacgccttccgtggtggcgtacaccaagaccggggagcgcctggtggggcagattgctaagcgccaggcggtcgtgaaccccgagaacaccttcttctctgtcaagcgcttcatcggccgcaagatggctgaggtcgacgacgaggccaagcaggtctcgtacggcgttgtcaaggacgagaacggcaacgtcaagctcgactgccccgctatcggcaaacagttcgctgccgaggagatctccgcgcaggttttgaggaagttggtggatgatgcatctaagtttcttaatgagaaaatcacaaaagcagtggttacagtcccagcatatttcaatgattcacaaaggacagcaactaaagatgctggccgcattgcaggactggaagttctccgtattattaatgaaccaactgctgcatcgttggcctatggtttcgagaagaaaaataatgaaacaattctagtgtttgatttgggaggcggaacctttgatgtatctgtattggaagttggtgatggtgtgtttgaggtgctttccacatctggtgacacacaccttggtggtgatgacttcgataagagaatagtagattggcttgctagcaacttcaagaaagatgaacgtattgatcttctgaaggataaacaagcccttcagaggcttactgaggcagcagagaaagctaagatggaactgtcaacgctgacacaggcaaatattagcctaccattcattactgctactgctgatgggccaaaacacatcgaggcaaccctctcgagagccaaattcgaggaactatgttcagaccttatagacaggcttaaaactcctgttaataatgcactgagagatgccaagttgtctctcagtgatctggatgaagttattcttgtgggtggatccacccgaatccctgcagttcaagaacttgtgaggaagcttactgacaaggatcccaatgttacggtcaaccctgatgaggttgtttctcttggggcagctgtgcagggcggggttttggcaggagatgtgaaagatgtcgttcttctggatgttactccattatctcttggtttggagacattgggtggagtgatgacaaagattatccccaggaataccacactgccaacctcaaaatcggaggtattctcaacagctgcagatggacagacgagcgttgagattaatgttctccagggagaaagagagtttgttagggacaacaagtcccttggaagcttccggttggacggaatccctcctgcacctcgtggtgtcccacaaattgaagtgaagtttgatattgatgcaaatggtatcctctcagttgctgccattgataagggcactggaaagaaacaggacatcaccatcactggtgctagtacgctacctaaggatgaggttgagagaatggtagaagaagccgataagtttgccaaggaggacaaagagaagagagatgcaatcgacaccaaaaaccaggcggactcagtggtctaccagactgagaagcaactgaaggagcttggcgacaaagtccccgctcctgtgaaagagaaggtggatgtgaagctccaggagctcaaagacgccatttctggtggatcaacacagagtatgaaagatgccatggctgctctgaaccaggaggtgatgcagattggccaggcaatgtataaccagcctggtgccagtgctgctgggcctactcctggtgctgaggccggacctacgcctggtaccggaccaacgcagaatgatggggatgtcattgacgcagacttcacagatagcaattgaggggtgattgatgcatggccatgtgttgagcaaggttggcgttaaggagtgaacaaattgttccttttttgtgttgggattgttactataggctatctagcatggagttgatagagatagtttttcgcgaacttctcctgtgattgactcaacaattagctgaatgctatataaagtcgaaaggagcgcataaggtttttattcaatttgtagctgattaattgaattgttgcaataaaggtgttgaattg

SEQ ID NO: 35790 - protein, 703 aa, Zea mays subsp. mays
MVSFTCSQVGATAAGGASPFIGYRWRSGPGGATPSSSLFVGRRLAAVQMRAPSRGARGGSALRVTCEKVVGIDLGTTNSAVAAMEGGKPTVVTNAEGARTTPSVVAYTKTGERLVGQIAKRQAVVNPENTFFSVKRFIGRKMAEVDDEAKQVSYGVVKDENGNVKLDCPAIGKQFAAEEISAQVLRKLVDDASKFLNEKITKAVVTVPAYFNDSQRTATKDAGRIAGLEVLRIINEPTAASLAYGFEKKNNETILVFDLGGGTFDVSVLEVGDGVFEVLSTSGDTHLGGDDFDKRIVDWLASNFKKDERIDLLKDKQALQRLTEAAEKAKMELSTLTQANISLPFITATADGPKHIEATLSRAKFEELCSDLIDRLKTPVNNALRDAKLSLSDLDEVILVGGSTRIPAVQELVRKLTDKDPNVTVNPDEVVSLGAAVQGGVLAGDVKDVVLLDVTPLSLGLETLGGVMTKIIPRNTTLPTSKSEVFSTAADGQTSVEINVLQGEREFVRDNKSLGSFRLDGIPPAPRGVPQIEVKFDIDANGILSVAAIDKGTGKKQDITITGASTLPKDEVERMVEEADKFAKEDKEKRDAIDTKNQADSVVYQTEKQLKELGDKVPAPVKEKVDVKLQELKDAISGGSTQSMKDAMAALNQEVMQIGQAMYNQPGASAAGPTPGAEAGPTPGTGPTQNDGDVIDADFTDSN

SEQ ID NO: 35791 - protein, 655 aa, Zea mays subsp. mays
MRAPSRGARGGSALRVTCEKVVGIDLGTTNSAVAAMEGGKPTVVTNAEGARTTPSVVAYTKTGERLVGQIAKRQAVVNPENTFFSVKRFIGRKMAEVDDEAKQVSYGVVKDENGNVKLDCPAIGKQFAAEEISAQVLRKLVDDASKFLNEKITKAVVTVPAYFNDSQRTATKDAGRIAGLEVLRIINEPTAASLAYGFEKKNNETILVFDLGGGTFDVSVLEVGDGVFEVLSTSGDTHLGGDDFDKRIVDWLASNFKKDERIDLLKDKQALQRLTEAAEKAKMELSTLTQANISLPFITATADGPKHIEATLSRAKFEELCSDLIDRLKTPVNNALRDAKLSLSDLDEVILVGGSTRIPAVQELVRKLTDKDPNVTVNPDEVVSLGAAVQGGVLAGDVKDVVLLDVTPLSLGLETLGGVMTKIIPRNTTLPTSKSEVFSTAADGQTSVEINVLQGEREFVRDNKSLGSFRLDGIPPAPRGVPQIEVKFDIDANGILSVAAIDKGTGKKQDITITGASTLPKDEVERMVEEADKFAKEDKEKRDAIDTKNQADSVVYQTEKQLKELGDKVPAPVKEKVDVKLQELKDAISGGSTQSMKDAMAALNQEVMQIGQAMYNQPGASAAGPTPGAEAGPTPGTGPTQNDGDVIDADFTDSN

SEQ ID NO: 35792 - protein, 620 aa, Zea mays subsp. mays
MEGGKPTVVTNAEGARTTPSVVAYTKTGERLVGQIAKRQAVVNPENTFFSVKRFIGRKMAEVDDEAKQVSYGVVKDENGNVKLDCPAIGKQFAAEEISAQVLRKLVDDASKFLNEKITKAVVTVPAYFNDSQRTATKDAGRIAGLEVLRIINEPTAASLAYGFEKKNNETILVFDLGGGTFDVSVLEVGDGVFEVLSTSGDTHLGGDDFDKRIVDWLASNFKKDERIDLLKDKQALQRLTEAAEKAKMELSTLTQANISLPFITATADGPKHIEATLSRAKFEELCSDLIDRLKTPVNNALRDAKLSLSDLDEVILVGGSTRIPAVQELVRKLTDKDPNVTVNPDEVVSLGAAVQGGVLAGDVKDVVLLDVTPLSLGLETLGGVMTKIIPRNTTLPTSKSEVFSTAADGQTSVEINVLQGEREFVRDNKSLGSFRLDGIPPAPRGVPQIEVKFDIDANGILSVAAIDKGTGKKQDITITGASTLPKDEVERMVEEADKFAKEDKEKRDAIDTKNQADSVVYQTEKQLKELGDKVPAPVKEKVDVKLQELKDAISGGSTQSMKDAMAALNQEVMQIGQAMYNQPGASAAGPTPGAEAGPTPGTGPTQNDGDVIDADFTDSN

SEQ ID NO: 35793 - DNA, 233 bp, Zea mays subsp. mays
attcccagttcccacggcacgatggcctccgccgaaatccccaactccagccccgacgccaccaaccccgcccccgccgccgccgccgccgccgccaccggccccgacctctcctcttcgccgccgccgctcccgccgcgcaagcgccgcctttcgccttccccaccaccaacgcggtccgcgtcacgctctcggtccccccgctcccgctccccgcacggccgacgctcgcg

SEQ ID NO: 35794 - protein, 77 aa, Zea mays subsp. mays
SQFPRHDGLRRNPQLQPRRHQPRPRRRRRRRHRPRPLLFAAAAPAAQAPPFAFPTTNAVRVTLSVPPLPLPARPTLA

SEQ ID NO: 35795 - protein, 77 aa, Zea mays subsp. mays
IPSSHGTMASAEIPNSSPDATNPAPAAAAAAATGPDLSSSPPPLPPRKRRLSPSPPPTRSASRSRSPRSRSPHGRRS

SEQ ID NO: 35796 - protein, 77 aa, Zea mays subsp. mays
FPVPTARWPPPKSPTPAPTPPTPPPPPPPPPPPAPTSPLRRRRSRRASAAFRLPHHQRGPRHALGPPAPAPRTADAR

SEQ ID NO: 35797 - protein, 70 aa, Zea mays subsp. mays
MASAEIPNSSPDATNPAPAAAAAAATGPDLSSSPPPLPPRKRRLSPSPPPTRSASRSRSPRSRSPHGRRS

SEQ ID NO: 35798 - DNA, 674 bp, Zea mays subsp. mays
aacaggcgcacaccgacaagcgcagcgatggcggccgcgggggacggacagacgccgccgacgccgcaggagccggagccagtggcgggagcggcggctggaggcggcgtgatcgcgaagctggaagaggagtggcggaaggcaaaggagcacgcgcagacctacccgtacgtgtggggctcctacatcctcgtctacggcggcctcggcgcctacctcgcctggcgctggcgtaagctccgccgcaccgaggaccgcgtccgcgttcttcaagaacgcctccgcaagctctctgcggccgaggagtcgcaggctgcctctgccaccggctccgtttccactccctcgacccctcccctgccgcaggagtcggcctctggggccgcaaagccggcttctagaccgtgaaggagtaagcttccttttttttttccagcttcttggcatgacggattacaaatttacagagcgattcatcgtttgagctcgctgctgtgcttggttccttacttggttggtgatcctagttcagaagtagaggtggaggaatataatacaagtgctgagaggttggtgattctctcattgtcatctaatcgtttgggggaagctcaaaatcttgtacatcgtgtgtggtcattcccacgaaggatctggatttactgttgatgtct

SEQ ID NO: 35799 - protein, 135 aa, Zea mays subsp. mays
NRRTPTSAAMAAAGDGQTPPTPQEPEPVAGAAAGGGVIAKLEEEWRKAKEHAQTYPYVWGSYILVYGGLGAYLAWRWRKLRRTEDRVRVLQERLRKLSAAEESQAASATGSVSTPSTPPLPQESASGAAKPASRP

SEQ ID NO: 35800 - protein, 126 aa, Zea mays subsp. mays
MAAAGDGQTPPTPQEPEPVAGAAAGGGVIAKLEEEWRKAKEHAQTYPYVWGSYILVYGGLGAYLAWRWRKLRRTEDRVRVLQERLRKLSAAEESQAASATGSVSTPSTPPLPQESASGAAKPASRP

SEQ ID NO: 35801 - protein, 77 aa, Zea mays subsp. mays
QAHTDKRSDGGRGGRTDAADAAGAGASGGSGGWRRRDREAGRGVAEGKGARADLPVRVGLLHPRLRRPRRLPRLALA

SEQ ID NO: 35802 - DNA, 2442 bp, Zea mays subsp. mays
  misc_feature (539)..(539): n is a, c, g, or t
  misc_feature (659)..(660): n is a, c, g, or t
  misc_feature (2409)..(2411): n is a, c, g, or t
  misc_feature (2432)..(2433): n is a, c, g, or t
aatagcctctacgctctaccgcatccttccacaaaaccctttcttccttccgccgtcgccgccgccgccgcgaccggctaaacccttcatttcgccgcagcgacgaccacccgccgcgggccaactatggcgcccgttgcggctcccatacgcgacctgcttacctctttcagcccgggcgcggacttcctcgcgctctcttctggggacggccgcatcaaggtatgggacgccgtgcggagccggctgcagaccgagtttgctgacatccctgcagtggaggcggtcgcggtcgctgagtcgaagcgcggccacctcgccctcgattacacctgcatgaagtgggtacagctttccagtaagaagaagaggaaggctgggagctcattgattgtgcttggtacaggcagtggagatggtgcttgcacttgatgttgccgcgggacattggaagtggaaggtcagcgattgccaccctgggggtgtgacagctgtagaatactcgaaacatgggcggaatgtgtacacggcatgtgctnatggcatggtctgtaggattgatgcctctaatggggctgttgttggaaaatttaaatcttcttcaaaggcaatatctgcattagctgtgtcatcagatggaaatatgttggcaacagcanntggccagttgaggacctttgacacttccagcaacaaaaaaattaaaaaattctctggacatccagttgctgtgaggagcatggtctttagcaatgatagccaatatgttttgtcatctggagttggtgaacgctatattgccatttggaagctgggcagtggtaaaacccagagctcaaactgtattctgtcgatggagcacccagcaatgtctgtggactgtaaatgttcggacaaaggagaaatatacattctggctatttctgagattggtgtctgctatttctggtctgcaaatgttgtggatgacctgcgtaataagaagcccaccaagatcatattatctgagtcatctgtgtcaacagctcatcaagcattatcgatatttgctgcaaaacttcaaggagtggatgggcctaattctgcccatgtcctactggcttatgggtctgtagtgaaaccatcttttgataaacttttggtttgttatggtacagatattagtttgggcatttctcaagatggagttctcttgccaaatactcaaaccaccatggcaaagaaaggccaatctgtgaaaaagcatgaaactgtctttgctctagaccgagccaatgctgaagatgccatccttcctcttccaaaactccatacacaggaaaagaaaggaaacatggtgtaacaaaacccagtggcgatgttgagcctgagattcatagtgacctcaccactacaagatctattcataaaagagttcctgtgcaaagaattgaagatgacagcacatgcatcgaggatatgatgagggagtgtggcatcattgaaactagagtagatgagagcatgaagggccatgctggtataccctttaacattttgtctggtctttttggtgatggcagcataaaattcgatgccaatttacccagtaagaagattcgaggtcatctaagatcattaaaacctggagatgcttgcaaacttcttgataaattagtatctgcatggaaaacgagatctggtagcacggaacttgtattgcgttggatatactgcctgttagtcattcatggccgttttatctgctccgaggaatcgattaacaacctggagaagatgtgtgcagaaagatacacagttactgaagatttgctgaagctttctgggcggcttcggttaataacagcacaggtcgacaaggctgctagtaacatgtctgagccgacatcaggggagatgcaggatgctgctttccagtctgacgaagaggaggaagatgaagatgttgatgaaacagtattcggtcaagattcagattcgtcacagaatagcggcaccggcgacgatgcaaagtagactcactgctggtattcatcattatggtgattgtattgtttttaattaaattgccaagcttgatttttgtcaaggcgacgctggaaggttgcacagaattttgatagtgtctctggtttcattttgaaagcactcgaagttgtctcctcctttacccctttttttccttatatacgacggcaattggttaaagttacatacccgaaggttgtccttgcacataaaaaaaaaaaaaaaaaaaaaaaaaaaaaaaaaaaaaaaaaaaaaaaaaaaaaaaaaaaaaaaaaaaaaaaaaaaaaaaaaaaaaaaaaaaaaaaaaaaaaaaaaaaaaaaaaaaaaaaaaaaaaaaaaaaaaaaaaaaaaaaaaaaaaaaaaaaaaaaaaattttttttnnnccccccccccccggggggggnnccccccccc

SEQ ID NO: 35803 - protein, 308 aa, Zea mays subsp. mays
  misc_feature (42)..(42): Xaa can be any naturally occurring amino acid
  misc_feature (82)..(82): Xaa can be any naturally occurring amino acid
MVLALDVAAGHWKWKVSDCHPGGVTAVEYSKHGRNVYTACAXGMVCRIDASNGAVVGKFKSSSKAISALAVSSDGNMLATAXGQLRTFDTSSNKKIKKFSGHPVAVRSMVFSNDSQYVLSSGVGERYIAIWKLGSGKTQSSNCILSMEHPAMSVDCKCSDKGEIYILAISEIGVCYFWSANVVDDLRNKKPTKIILSESSVSTAHQALSIFAAKLQGVDGPNSAHVLLAYGSVVKPSFDKLLVCYGTDISLGISQDGVLLPNTQTTMAKKGQSVKKHETVFALDRANAEDAILPLPKLHTQEKKGNMV

SEQ ID NO: 35804 - protein, 265 aa, Zea mays subsp. mays
  misc_feature (39)..(39): Xaa can be any naturally occurring amino acid
MVCRIDASNGAVVGKFKSSSKAISALAVSSDGNMLATAXGQLRTFDTSSNKKIKKFSGHPVAVRSMVFSNDSQYVLSSGVGERYIAIWKLGSGKTQSSNCILSMEHPAMSVDCKCSDKGEIYILAISEIGVCYFWSANVVDDLRNKKPTKIILSESSVSTAHQALSIFAAKLQGVDGPNSAHVLLAYGSVVKPSFDKLLVCYGTDISLGISQDGVLLPNTQTTMAKKGQSVKKHETVFALDRANAEDAILPLPKLHTQEKKGNMV

SEQ ID NO: 35805 - protein, 232 aa, Zea mays subsp. mays
  misc_feature (6)..(6): Xaa can be any naturally occurring amino acid
MLATAXGQLRTFDTSSNKKIKKFSGHPVAVRSMVFSNDSQYVLSSGVGERYIAIWKLGSGKTQSSNCILSMEHPAMSVDCKCSDKGEIYILAISEIGVCYFWSANVVDDLRNKKPTKIILSESSVSTAHQALSIFAAKLQGVDGPNSAHVLLAYGSVVKPSFDKLLVCYGTDISLGISQDGVLLPNTQTTMAKKGQSVKKHETVFALDRANAEDAILPLPKLHTQEKKGNMV

SEQ ID NO: 35806 - DNA, 2722 bp, Zea mays subsp. mays
agacaaccaaacgaaccctcccggagcagcaaagcataggcgctcgagcgctccctcccgagctcctccgcctcacggtcacgcctcgtgtccccccaccccctcctcctcctcctcggccggccgcctcacgccgtcacctccgctcggcgagtctcggctccgaccgctgccgccacgtgcgacctcccctactcctgagagatctgcggggctcggcatggggtgaccagatcgggccgctgctcggtgctttccagctgaattttgcccgcagctcgtgtcggaggcagcgaagatggcggaggccggcgtggcacgcggctcagggagcgctggcgatgctttgttcagggaactctggcatgcttgtgctgggccgttggtcacagtgcctcgccaaggcgagctggtttattacttcccccagggtcatatggaacagcttgaagcgtctacagatcaacaacttgatcagcacttgcctttgtttaatctaccgcacaagatcctctgcaaggtggtcaatgtagaacttagagctgaaactgattctgatgaagtttatgctcaaattatgctgcaaccacaaacagagcaaagtgagcccaccagcccagatcctgaaccacctgagcctgaaagatgcaacattcattccttctgcaagaccttgactgcttcagatacaagtacccatggtctctctgtcctcaggaggcatgctgaagaatgtttgccccaactggacatgactcagaatccaccgtggcaagaactagtggctaaagatctccatggaaatgaatggcatttccgtcacatctttcgagggcaaccaaggaggcatctacttacgacaggctggagtgtttttgttagctcaaaaagattggttgcgggtgacgcgtttatcttcttgagaggtgagaacggagagctgcgagtcggggtaaggaggctcatgagacaactaaataacatgccgtcttcggttatctcaagccacagcatgcatcttggagtcctagcaactgcatctcatgccatctccactggaactctattttctgttttctacaaacccagaacaagtagatctgaatttgtcgttagtgtaaacaagtacctcgaagctaagaatcacaagatgtctgttggtatgaggtttaaaatgagatttgagggtgatgaatcccctgaaagaagattcagtgggataattattggtatgggatgcatgccagctaactcaacatctccatgggctaactctgaatggagatcattgaaggtccaatgggacgagccttctgctattctgcgtccagatagagtttcaccatgggaagtagaaccccttaatcgaacaaatccacagccacctcaacctcctttacggaataagcgagcacggcctcctgcttcaccttcgattgctccagaacttgctccagtttttggtttttggaagtccccagctgagcctgcccaagctttctcattctcaggactgcagcgaactcaggagctataccattcaagccccagttcaatgttctcatcgtcgttgaatgtgggattcaatccaaagtacgagggtcccactccaaacaccaaccatttgtactggacaatgagagagacaagaactgaatcctactccgctagcatcaacaaagctccaactgaaaagaagcaagaatccactacttctggctgcagattgttcggtatcgagataggttcttctgcagtgtcacccgtggttactgttgctagcgtcgggcatgatcctccgccacctgctctctcagtagacgctgaatctgaccagctgtcacagccgtcccatgccaacaaagcaacggatgccccagcggcaagcagcgatcgctctcctaacgagacagagagccggcaagccaggagctgcaccaaggtaatcatgcaaggggtggcggttggcagggcggtggacttgacgaggctagatgggtacgatgacctccgccgcaagttggaggagatgttcgatatcccgggagagctttccgccagcctcaataaatggaaggtgatctacacagatgacgaggacgatatgatgctggtcggggacgatccatggagtgaattttgcaggatggtaaaaaggatatacatttattcctacgaggaggccaagtctttgactcccaaggcgaagctgccggccatcggtggtgacaccggcgtcaagccggacccaagtaaactgtcagcagaatctgacgtgccacagagcgactccgacaacagtgctcccgtttctgctgataaggactgatggacgctagctcggccgtaccttctctttatgttggccatgggaggccagtgcagtgcccatgctccttgagactgctaagaattgatcatctgttccatctgcctcggcttggaccagcgaggatggccgggagggagtgcatgccgctccgtgcgtgtttcgtttgccgtgtttggtaggagccatggcttgttgccggctacttgggttctgtagactgttacactgactgctgccgtctcacctggccgtcggcgcgggccgccccctctcacctctctagtaatatactagggcttatgtacacacagctgttttggtagtggcatatgtatatcgtcggtcatgttgcttgcgacatttagcatcctccgtagctgctatttcctc

SEQ ID NO: 35807 - protein, 676 aa, Zea mays subsp. mays
MAEAGVARGSGSAGDALFRELWHACAGPLVTVPRQGELVYYFPQGHMEQLEASTDQQLDQHLPLFNLPHKILCKVVNVELRAETDSDEVYAQIMLQPQTEQSEPTSPDPEPPEPERCNIHSFCKTLTASDTSTHGLSVLRRHAEECLPQLDMTQNPPWQELVAKDLHGNEWHFRHIFRGQPRRHLLTTGWSVFVSSKRLVAGDAFIFLRGENGELRVGVRRLMRQLNNMPSSVISSHSMHLGVLATASHAISTGTLFSVFYKPRTSRSEFVVSVNKYLEAKNHKMSVGMRFKMRFEGDESPERRFSGIIIGMGCMPANSTSPWANSEWRSLKVQWDEPSAILRPDRVSPWEVEPLNRTNPQPPQPPLRNKRARPPASPSIAPELAPVFGFWKSPAEPAQAFSFSGLQRTQELYHSSPSSMFSSSLNVGFNPKYEGPTPNTNHLYWTMRETRTESYSASINKAPTEKKQESTTSGCRLFGIEIGSSAVSPVVTVASVGHDPPPPALSVDAESDQLSQPSHANKATDAPAASSDRSPNETESRQARSCTKVIMQGVAVGRAVDLTRLDGYDDLRRKLEEMFDIPGELSASLNKWKVIYTDDEDDMMLVGDDPWSEFCRMVKRIYIYSYEEAKSLTPKAKLPAIGGDTGVKPDPSKLSAESDVPQSDSDNSAPVSADKD

SEQ ID NO: 35808 - protein, 630 aa, Zea mays subsp. mays
MEQLEASTDQQLDQHLPLFNLPHKILCKVVNVELRAETDSDEVYAQIMLQPQTEQSEPTSPDPEPPEPERCNIHSFCKTLTASDTSTHGLSVLRRHAEECLPQLDMTQNPPWQELVAKDLHGNEWHFRHIFRGQPRRHLLTTGWSVFVSSKRLVAGDAFIFLRGENGELRVGVRRLMRQLNNMPSSVISSHSMHLGVLATASHAISTGTLFSVFYKPRTSRSEFVVSVNKYLEAKNHKMSVGMRFKMRFEGDESPERRFSGIIIGMGCMPANSTSPWANSEWRSLKVQWDEPSAILRPDRVSPWEVEPLNRTNPQPPQPPLRNKRARPPASPSIAPELAPVFGFWKSPAEPAQAFSFSGLQRTQELYHSSPSSMFSSSLNVGFNPKYEGPTPNTNHLYWTMRETRTESYSASINKAPTEKKQESTTSGCRLFGIEIGSSAVSPVVTVASVGHDPPPPALSVDAESDQLSQPSHANKATDAPAASSDRSPNETESRQARSCTKVIMQGVAVGRAVDLTRLDGYDDLRRKLEEMFDIPGELSASLNKWKVIYTDDEDDMMLVGDDPWSEFCRMVKRIYIYSYEEAKSLTPKAKLPAIGGDTGVKPDPSKLSAESDVPQSDSDNSAPVSADKD

SEQ ID NO: 35809 - protein, 583 aa, Zea mays subsp. mays
MLQPQTEQSEPTSPDPEPPEPERCNIHSFCKTLTASDTSTHGLSVLRRHAEECLPQLDMTQNPPWQELVAKDLHGNEWHFRHIFRGQPRRHLLTTGWSVFVSSKRLVAGDAFIFLRGENGELRVGVRRLMRQLNNMPSSVISSHSMHLGVLATASHAISTGTLFSVFYKPRTSRSEFVVSVNKYLEAKNHKMSVGMRFKMRFEGDESPERRFSGIIIGMGCMPANSTSPWANSEWRSLKVQWDEPSAILRPDRVSPWEVEPLNRTNPQPPQPPLRNKRARPPASPSIAPELAPVFGFWKSPAEPAQAFSFSGLQRTQELYHSSPSSMFSSSLNVGFNPKYEGPTPNTNHLYWTMRETRTESYSASINKAPTEKKQESTTSGCRLFGIEIGSSAVSPVVTVASVGHDPPPPALSVDAESDQLSQPSHANKATDAPAASSDRSPNETESRQARSCTKVIMQGVAVGRAVDLTRLDGYDDLRRKLEEMFDIPGELSASLNKWKVIYTDDEDDMMLVGDDPWSEFCRMVKRIYIYSYEEAKSLTPKAKLPAIGGDTGVKPDPSKLSAESDVPQSDSDNSAPVSADKD

SEQ ID NO: 35810 - DNA, 502 bp, Zea mays subsp. mays
  misc_feature (493)..(493): n is a, c, g, or t
agagccgtaccaatccccatcgccccagaccacagcgcgacagtgagtacagcagcagcagctgagagcgtgcgaagcaggagggaggacaagaagaagccgatggcggttgtgagcggcagcggcgggaggctgaacccctgggcggagcccttcgttccttccggggcgcggtaccgcggcctgcggaccatggaggcgacgccggagcaggaggtggaggacttctcccccgagtggtggcgcctggtgtccgcctccccggccttccgcgaccgctggctgcgcgagtacggcgcgctcggcctactcgacgccgaggacgacctggacgacgacgtcgacagcttcctccccgacgacttcttctcgcccccggccccgcgccacgagagcgagcgggaggacgccgcgggcaggagggcgggcgagggcttgaggtggcggcgtggggcatcgacaggtggtggagggcgcacggtgggcgccgganaccccgagg

SEQ ID NO: 35811 - protein, 167 aa, Zea mays subsp. mays
  misc_feature (165)..(165): Xaa can be any naturally occurring amino acid
RAVPIPIAPDHSATVSTAAAAESVRSRREDKKKPMAVVSGSGGRLNPWAEPFVPSGARYRGLRTMEATPEQEVEDFSPEWWRLVSASPAFRDRWLREYGALGLLDAEDDLDDDVDSFLPDDFFSPPAPRHESEREDAAGRRAGEGLRWRRGASTGGGGRTVGAGXPE

SEQ ID NO: 35812 - protein, 133 aa, Zea mays subsp. mays
  misc_feature (131)..(131): Xaa can be any naturally occurring amino acid
MAVVSGSGGRLNPWAEPFVPSGARYRGLRTMEATPEQEVEDFSPEWWRLVSASPAFRDRWLREYGALGLLDAEDDLDDDVDSFLPDDFFSPPAPRHESEREDAAGRRAGEGLRWRRGASTGGGGRTVGAGXPE

SEQ ID NO: 35813 - protein, 103 aa, Zea mays subsp. mays
  misc_feature (101)..(101): Xaa can be any naturally occurring amino acid
MEATPEQEVEDFSPEWWRLVSASPAFRDRWLREYGALGLLDAEDDLDDDVDSFLPDDFFSPPAPRHESEREDAAGRRAGEGLRWRRGASTGGGGRTVGAGXPE

SEQ ID NO: 35814 - DNA, 842 bp, Zea mays subsp. mays
  misc_feature (179)..(179): n is a, c, g, or t
  misc_feature (559)..(559): n is a, c, g, or t
  misc_feature (834)..(834): n is a, c, g, or t
aacgcgtccagctccctctcggcctcgcaccagctcatcccagctccgccctcacccttcccttgccctcctcccaccgcctctcccccaatccctcccaccaccaccagattcgcctcgcctcctcgacgcccctccctcacccttgatgccacgcccccctcccatggcgccacgcncgcgcccctccccacccgcccgagccgcgacgctgaccctcctcctcccgctcctcctcctcgcctctccgtccctcccctccgccgccgctgccccctcgccgccgacggtgcccgccacgcagcggcaggccgcgtccgcgtccgacgccccgtcccctcctccccctccggcgcagcagcacccgcggaggcaccgccaccggcactggaagcaccggccgccgcccccgcacccgccgccgccgcccaggcggcgtcggctcaacttcggggagcggctcgggatcgccttcgccggcgtggctatcgcaatgcaggtcgtcctcggcgcttcctcgcgctgcgcgcgtggcagctgcggcggctcgacaaggccnaggtgtcctcctccacgcccctcacctgaccaccgtctccccgcccgaagttcgtcgtgtgcatcagtcaggtccgtggtttatttgtgatctgatctgatgctgctgtaaacgaatccatggtgtagtagctgcgcgtgtccgtgttcggcaccattctttccgttctgttgtactaccctgtacaatctgcttctgctccgtgcaggctctagttgagaggcttgtgtgtgttatgagagttgtgctgcttctttggttgttaacgtgcctcncctgatcc

SEQ ID NO: 35815 - protein, 215 aa, Zea mays subsp. mays
  misc_feature (60)..(60): Xaa can be any naturally occurring amino acid
  misc_feature (186)..(186): Xaa can be any naturally occurring amino acid
TRPAPSRPRTSSSQLRPHPSLALLPPPLPQSLPPPPDSPRLLDAPPSPLMPRPPPMAPRXRPSPPARAATLTLLLPLLLLASPSLPSAAAAPSPPTVPATQRQAASASDAPSPPPPPAQQHPRRHRHRHWKHRPPPPHPPPPPRRRRLNFGERLGIAFAGVAIAMQVVLGASSRCARGSCGGSTRXRCPPPRPSPDHRLPARSSSCASVRSVVYL

SEQ ID NO: 35816 - protein, 195 aa, Zea mays subsp. mays
  misc_feature (60)..(60): Xaa can be any naturally occurring amino acid
  misc_feature (187)..(187): Xaa can be any naturally occurring amino acid
NASSSLSASHQLIPAPPSPFPCPPPTASPPIPPTTTRFASPPRRPSLTLDATPPSHGATXAPLPTRPSRDADPPPPAPPPRLSVPPLRRRCPLAADGARHAAAGRVRVRRPVPSSPSGAAAPAEAPPPALEAPAAAPAPAAAAQAASAQLRGAARDRLRRRGYRNAGRPRRFLALRAWQLRRLDKAXVSSSTPLT

SEQ ID NO: 35817 - protein, 166 aa, Zea mays subsp. mays
  misc_feature (11)..(11): Xaa can be any naturally occurring amino acid
  misc_feature (137)..(137): Xaa can be any naturally occurring amino acid
MPRPPPMAPRXRPSPPARAATLTLLLPLLLLASPSLPSAAAAPSPPTVPATQRQAASASDAPSPPPPPAQQHPRRHRHRHWKHRPPPPHPPPPPRRRRLNFGERLGIAFAGVAIAMQVVLGASSRCARGSCGGSTRXRCPPPRPSPDHRLPARSSSCASVRSVVYL

SEQ ID NO: 35818 - DNA, 1406 bp, Zea mays subsp. mays
  misc_feature (534)..(534): n is a, c, g, or t
  misc_feature (659)..(659): n is a, c, g, or t
agttcaggctgatgctgcatttgctgcaaaagagtattacatagcagcatccttctatgcaaagataaattacatcctgtcgtttgaggagatcagcctgaaatttatatcaataggtgagcaggatgctctcagaactttcttattgagaaggctcgataacctcaccaaagaggacaagatgcagattacgatgatctcaacttgggctactgagctgtacttagacaagattaatcgtctcctattggaggataccactgtcaccattataaattcagtagcagagcctaatagctctgaatatcgttcgatagtaaatgaattccgtgcttttcttagtgacagcaaagatgtattagatgaagcaacaacaatgaaactactggaaagttacggaagagtggatgagcttgtgtactttgccggtttgaaggagcagtatgaaattgtagttcatcattacattcagcaaggagaagcaagaaaagcattggaagtgcttcaacggcgcaatgttcctgtagaccttgngtataaatttgctccagatttgatcatgttagatgcttatgagactgttgaatcatggatgatggcgagaaacaggttgaatccagggaaactcataccagcaatgatgcgttatgtgaagcganccacatgcaaagaatgaaacacatgaagttatcaaatacttggaattttgtgtgaaagatttgaacaatgtggaccctggagtgcataatctattgctatctctatatgccaagaaggaggatgaatcccagcttttgcaatttctcgacacaaaatttggtaaaggacaaacaaatggccctgacttcttttacgatccaaagtatgctctccgcctatgtcttcaagagaagagaatgcgtgcttgtgttcgtatttatagcatgatgtccatgcatgcggaagctgtggcacttgctttgaaggtggatttggaacttgcaaaggcagaagctgacaaagtagaagacgatgaagagcttaggaagaagctgtggcttaaggttgctaaacatgtcatcgagcaagagaaaggtgtcaagagagagaatataaagaaagcaatagaattcctttcggagaccaataacttgttaaagattgaggatatcttaccattcttcccagacttcgtattgattgacgatttcaaagaggaaatatgcaaatctctgaaggactacaacagccagatttagcagctcaagcaggagatggatgatgccacacgtggggcagataatatcagaagtgatattggtgccctcgctcagagatatacagtaattgaccgtgagcaggattgtggggtttgccggcgcaaaatattgactgttggagggttgcaccaggtagggagaagctat

SEQ ID NO: 35819 - protein, 224 aa, Zea mays subsp. mays
  misc_feature (178)..(178): Xaa can be any naturally occurring amino acid
  misc_feature (220)..(220): Xaa can be any naturally occurring amino acid
VQADAAFAAKEYYIAASFYAKINYILSFEEISLKFISIGEQDALRTFLLRRLDNLTKEDKMQITMISTWATELYLDKINRLLLEDTTVTIINSVAEPNSSEYRSIVNEFRAFLSDSKDVLDEATTMKLLESYGRVDELVYFAGLKEQYEIVVHHYIQQGEARKALEVLQRRNVPVDLXYKFAPDLIMLDAYETVESWMMARNRLNPGKLIPAMMRYVKRXTCKE

SEQ ID NO: 35820 - protein, 164 aa, Zea mays subsp. mays
  misc_feature (118)..(118): Xaa can be any naturally occurring amino acid
  misc_feature (160)..(160): Xaa can be any naturally occurring amino acid
MQITMISTWATELYLDKINRLLLEDTTVTIINSVAEPNSSEYRSIVNEFRAFLSDSKDVLDEATTMKLLESYGRVDELVYFAGLKEQYEIVVHHYIQQGEARKALEVLQRRNVPVDLXYKFAPDLIMLDAYETVESWMMARNRLNPGKLIPAMMRYVKRXTCKE

SEQ ID NO: 35821 - protein, 160 aa, Zea mays subsp. mays
  misc_feature (114)..(114): Xaa can be any naturally occurring amino acid
  misc_feature (156)..(156): Xaa can be any naturally occurring amino acid
MISTWATELYLDKINRLLLEDTTVTIINSVAEPNSSEYRSIVNEFRAFLSDSKDVLDEATTMKLLESYGRVDELVYFAGLKEQYEIVVHHYIQQGEARKALEVLQRRNVPVDLXYKFAPDLIMLDAYETVESWMMARNRLNPGKLIPAMMRYVKRXTCKE

SEQ ID NO: 35822 - DNA, 2116 bp, Zea mays subsp. mays
  misc_feature (1610)..(1610): n is a, c, g, or t
aacacaagaagaaactgacggaggagcggagcggagccgagccacggccagtgccaggagcgaaaataaaaaggggtaggagttcctcctccccaacctcacaagtaaagcagcagcagcagaccttcttgacctagcaagcaatggggccgccgttcctcgccgtcgccgtcatcgtcgccttcctggccgccgccgcgcaggccgccgaccccttcgccttcttcgactgggacgtctcctacatcaccgcctcccctctcggcgtcccgcagcaggtcattgcagtcaacaagcagttcccaggccctatcatgaacgtcactaccaactacaatgtggtcgtcaatgtgctcaacagcttagacgagcccctgctcatcacttgggatgggatccagcagcgcaagaattgctggcaggatggggttctcggcaccacctgccccataccgccaggttggaactggacctacaacttccaggtcaaggaccagattggcagcttcttctacttcccaccccttggtatgcagcgtgccgcgggggggttcggaggtatcactgtcaacaaccgcgcggtcatctcggtcccattcgacacgcccgatggggacatcacgctcttcatcggggactggtacaagatgaaccacacgcacctgaggaagatgctcgacgacggcaaggaactggggatgccagacggtgttttgatgaatggcaaggggccatataggtataatgactcgctagtgccagatggcattgagcacgagactatcaaagttgagccaggaaaaacataccgtttccgtgtccacaatgttggtgtctccacaagcttgaacttacggattcagaatcacaacatggcccttgttgaaacagaaggttcatacacgatgaagcagaattttactaatctcgacatccacgtgggccagtcttactcatttctggtcactatggatcagaacgcaagcagtgattattacatcgtggccagtgctaggtttgtgaacgaatcgctttggaccagagtcaccggtgttgcaattttgcaatattcaaattcaaagggaaaagcatctggtcctcttcctgatccaccaaatgatgagtatgacaaaactttttcaatgaaccaggcacgttccatcaggatgaacgtgagcactggtgctgctcgtccgaatcctcaaggatcatttcactatgggtctatcaatgtgagccaagtttacaagctgaggaatgaaccacctgttatcatcaatgggaagaaacggactacactgagtggtatctcttattccccacccgacactcctctaaggttggcagatctgtacgacaagaaggatgtctacacacttgacttccctacaatgccaattgatggaccgccagtgatcagaacatctgtcattaactccacatacaagaactttttggaaattgtatttcagaacaatgactcaactgtccagacctaccacattgatggatatgcattctgggttgtaggaatggactatggcgagtggactgagaatagccgtgggacttacaacaagtgggatggtgtttctcgttgcacgactcangtgtttccgggagcatggactgctgtgatgctgtcacttgacagcccaggattttggaatgtacggacagaaaacctggacacgtggtatctgggtcaggagacttacatcagggtggtggatccaaatggaggctataatgttactgagatggtggctccagacaacatgctctactgtggcctcctcaaggataaacagaaggctcagaagcctcatggttcgaggtcatcagcctctgcagcaaaactgaactatcatgtgctcgcggctttggtctctttggtggtagccttggtgttgggccattgacaagaactgcctccagcttgtggtcagctgctgtttgcaggttgattaggcgtttgacagaaatactgttagtaggtcagtcgaattcgtaggttccattcatgatttgtctggcaattgagaaaaaaaaatgctgtgccattgcgcatcttcgtccatcggaattgattaacatgctgaagaactgtgcagtt

SEQ ID NO: 35823 - protein, 592 aa, Zea mays subsp. mays
  misc_feature (489)..(489): Xaa can be any naturally occurring amino acid
MGPPFLAVAVIVAFLAAAAQAADPFAFFDWDVSYITASPLGVPQQVIAVNKQFPGPIMNVTTNYNVVVNVLNSLDEPLLITWDGIQQRKNCWQDGVLGTTCPIPPGWNWTYNFQVKDQIGSFFYFPPLGMQRAAGGFGGITVNNRAVISVPFDTPDGDITLFIGDWYKMNHTHLRKMLDDGKELGMPDGVLMNGKGPYRYNDSLVPDGIEHETIKVEPGKTYRFRVHNVGVSTSLNLRIQNHNMALVETEGSYTMKQNFTNLDIHVGQSYSFLVTMDQNASSDYYIVASARFVNESLWTRVTGVAILQYSNSKGKASGPLPDPPNDEYDKTFSMNQARSIRMNVSTGAARPNPQGSFHYGSINVSQVYKLRNEPPVIINGKKRTTLSGISYSPPDTPLRLADLYDKKDVYTLDFPTMPIDGPPVIRTSVINSTYKNFLEIVFQNNDSTVQTYHIDGYAFWVVGMDYGEWTENSRGTYNKWDGVSRCTTXVFPGAWTAVMLSLDSPGFWNVRTENLDTWYLGQETYIRVVDPNGGYNVTEMVAPDNMLYCGLLKDKQKAQKPHGSRSSASAAKLNYHVLAALVSLVVALVLGH

SEQ ID NO: 35824 - protein, 535 aa, Zea mays subsp. mays
  misc_feature (432)..(432): Xaa can be any naturally occurring amino acid
MNVTTNYNVVVNVLNSLDEPLLITWDGIQQRKNCWQDGVLGTTCPIPPGWNWTYNFQVKDQIGSFFYFPPLGMQRAAGGFGGITVNNRAVISVPFDTPDGDITLFIGDWYKMNHTHLRKMLDDGKELGMPDGVLMNGKGPYRYNDSLVPDGIEHETIKVEPGKTYRFRVHNVGVSTSLNLRIQNHNMALVETEGSYTMKQNFTNLDIHVGQSYSFLVTMDQNASSDYYIVASARFVNESLWTRVTGVAILQYSNSKGKASGPLPDPPNDEYDKTFSMNQARSIRMNVSTGAARPNPQGSFHYGSINVSQVYKLRNEPPVIINGKKRTTLSGISYSPPDTPLRLADLYDKKDVYTLDFPTMPIDGPPVIRTSVINSTYKNFLEIVFQNNDSTVQTYHIDGYAFWVVGMDYGEWTENSRGTYNKWDGVSRCTTXVFPGAWTAVMLSLDSPGFWNVRTENLDTWYLGQETYIRVVDPNGGYNVTEMVAPDNMLYCGLLKDKQKAQKPHGSRSSASAAKLNYHVLAALVSLVVALVLGH

SEQ ID NO: 35825 - protein, 463 aa, Zea mays subsp. mays
  misc_feature (360)..(360): Xaa can be any naturally occurring amino acid
MQRAAGGFGGITVNNRAVISVPFDTPDGDITLFIGDWYKMNHTHLRKMLDDGKELGMPDGVLMNGKGPYRYNDSLVPDGIEHETIKVEPGKTYRFRVHNVGVSTSLNLRIQNHNMALVETEGSYTMKQNFTNLDIHVGQSYSFLVTMDQNASSDYYIVASARFVNESLWTRVTGVAILQYSNSKGKASGPLPDPPNDEYDKTFSMNQARSIRMNVSTGAARPNPQGSFHYGSINVSQVYKLRNEPPVIINGKKRTTLSGISYSPPDTPLRLADLYDKKDVYTLDFPTMPIDGPPVIRTSVINSTYKNFLEIVFQNNDSTVQTYHIDGYAFWVVGMDYGEWTENSRGTYNKWDGVSRCTTXVFPGAWTAVMLSLDSPGFWNVRTENLDTWYLGQETYIRVVDPNGGYNVTEMVAPDNMLYCGLLKDKQKAQKPHGSRSSASAAKLNYHVLAALVSLVVALVLGH

SEQ ID NO: 35826 - DNA, 1320 bp, Zea mays subsp. mays
atccctcctaccacatccgttccccttcccttccctcctctcgcgcgccggctccacgcagatccaggagatatgcctcgctatgatgaccgctatggaggcacgcgcttgtatgttggcagattggccactcgtactcgttcccgcgatttagaacatctgtttggcagatatggaagaatacgagaagtggagttgaagcgtgactatgcatttattgagttcagtgatcatcgcgatgctgatgaggctcgataccagctagatggcagggatgttgatgggagtcgtattgttgttgagtctgctaaaggggtcccacgtggttcaggtggctcacgtgaatatatggggagaggccctccaccaggtacaggtcgttgtttcaactgtggagttgatggtcactgggcaagagactgtaaagctggtgactggaaaaacaaatgctaccgttgtggagaaaggggccatatagaaagaaattgccagaacagtcctaggagtctcaggcgagagagaagttactcacggtccccatctccccgccgtggacggggccgcagtcgaagctatggcaggagcaggagccggagtcggagctatagtcgatcaagatccctgtctagatctcctaggggaggtcgtcgtgaccgtgacgataggagatcaaggagtcctagctatagcaggagccccatgcgatctgcctcgccaccagtaaaggaaaaggagcgcagccccgcacctgatggaagcaggagcccaaggagtcgcagcccccaggatcaggtgatgagcccaccaccaaaggataatggcgaaggcaatggctcagaccgtggcggcagccccagagggagggagaacagcaggagctgcagccgcagccgcagtccatctggtagtaaccgcagccctgcggccaatggacgtagccggagtcctggaggtgagcggagcccgagtcctggaggtgagcggagcccgagtcctagaggtgagcggagcccgagtcctagggctgaccgtagcccaagccccaatggcaatggtaacaatgatgctgctgctgatgtcgatgctgatgctgctgcccgcagtggctcccccactggaagcaagtcaccctgagcgctggcggtcccagattgtggtggtgcttctcaatgcaatgggcaatcgtattgctattttttgctaccatatcgaagacacaatagctacatcattttcttctctgaaacaaggactttattttgcttgctttgagatatgactcttaccctctcatggataatatatatatgatatgatgct

SEQ ID NO: 35827 - protein, 377 aa, Zea mays subsp. mays
IPPTTSVPLPFPPLARRLHADPGDMPRYDDRYGGTRLYVGRLATRTRSRDLEHLFGRYGRIREVELKRDYAFIEFSDHRDADEARYQLDGRDVDGSRIVVESAKGVPRGSGGSREYMGRGPPPGTGRCFNCGVDGHWARDCKAGDWKNKCYRCGERGHIERNCQNSPRSLRRERSYSRSPSPRRGRGRSRSYGRSRSRSRSYSRSRSLSRSPRGGRRDRDDRRSRSPSYSRSPMRSASPPVKEKERSPAPDGSRSPRSRSPQDQVMSPPPKDNGEGNGSDRGGSPRGRENSRSCSRSRSPSGSNRSPAANGRSRSPGGERSPSPGGERSPSPRGERSPSPRADRSPSPNGNGNNDAAADVDADAAARSGSPTGSKSP

SEQ ID NO: 35828 - protein, 353 aa, Zea mays subsp. mays
MPRYDDRYGGTRLYVGRLATRTRSRDLEHLFGRYGRIREVELKRDYAFIEFSDHRDADEARYQLDGRDVDGSRIVVESAKGVPRGSGGSREYMGRGPPPGTGRCFNCGVDGHWARDCKAGDWKNKCYRCGERGHIERNCQNSPRSLRRERSYSRSPSPRRGRGRSRSYGRSRSRSRSYSRSRSLSRSPRGGRRDRDDRRSRSPSYSRSPMRSASPPVKEKERSPAPDGSRSPRSRSPQDQVMSPPPKDNGEGNGSDRGGSPRGRENSRSCSRSRSPSGSNRSPAANGRSRSPGGERSPSPGGERSPSPRGERSPSPRADRSPSPNGNGNNDAAADVDADAAARSGSPTGSKSP

SEQ ID NO: 35829 - protein, 261 aa, Zea mays subsp. mays
MGRGPPPGTGRCFNCGVDGHWARDCKAGDWKNKCYRCGERGHIERNCQNSPRSLRRERSYSRSPSPRRGRGRSRSYGRSRSRSRSYSRSRSLSRSPRGGRRDRDDRRSRSPSYSRSPMRSASPPVKEKERSPAPDGSRSPRSRSPQDQVMSPPPKDNGEGNGSDRGGSPRGRENSRSCSRSRSPSGSNRSPAANGRSRSPGGERSPSPGGERSPSPRGERSPSPRADRSPSPNGNGNNDAAADVDADAAARSGSPTGSKSP

SEQ ID NO: 35830 - DNA, 1980 bp, Zea mays subsp. mays
ctcacgggcggcggctcgcgtgtcccgccagctagccgcacactttcctctctttcagtttcgcttcgcagacttcgcttgcgcttcacccaaccttaaccgcaacggttcccgtgcggagtttttattatgaatgaatgaatacgaattcagagcacgagcgccgttgattggccgctactagtactaccagctaggccactgctcctctgctacccgctaacctcgcgccggagtcgtcgcccacgatggcctaccgatccgcagtgctcttgcccgccctcctactggccgtcgccgtcgtcgtggcctccgccgccgccggggacgggaggtggcgggaggagcaggcgcgggaccgggtgccgcgggtgccggggcaggccttcaacaccagcttcgcgcagtacgccgggtacgtgaccgtcagcgagcagcgcggcgctgcgctcttctactggttctttgaggccgagaaggacccggggtccaagcccctcgtgctctggctcaacggagggcctggatgctcgtccattgcttttggacttggagaagaagtaggacctttccatgttaacgcagatgggaagggggtccatgtcaatccttattcttggaacaaagttgcaaatttactgttccttgattcacctgttggtgttggttactcatattcaaacacctctgatgatgctttaaaaaatggggatgcaagaactgccacggattcattggcattcttactgaagtggcttgaacgctttcctcaatacaaggaacgcgaattttatttgacaggggagagttatgctggtcactatgttcctcaactggctcaagccataaaaaggcaccatgaggctactggtgacaaatcaattaatctaaagggctatatggtagggaatgctctcactgatgatttccatgaccactatggaatatttcaattcatgtggactactggcctgatctctgatcaaacatacaagctgctgaatgttttctgtgactacgagtccttcgtgcattcgtctccacagtgtgataagattatggatattgctagcactgaagctggaaacattgattcatatagcatcttcacacctacatgtcatgcatcttttgcctcttcaaagaacaaagtgatgaaaaggctacattctgctggaaaaatgggagaacagtatgatccatgcactgagaagcattcaactgtatacttcaatctagctgaggttcagaaggcacttcatgttaatacagtcattggaaaatcaaaatgggagacttgcagtgaagctgttaatactcattggggggattgcgaaagatctgtgctgcatatctatcatgaacttatacagtatggcctccgtatatgggtgttcagtggagatacagatgcagtgattccagtgacttcaactagatacagcatcgatgctctcaagcttccaacaataactccatggcatgcttggtacgacgatgacggtgaggtcggtggatggacccaagggtacaggggactcaattttgtgaccgtgaggggagcaggtcacgaagtccctcttcatcgacccaaacaggccctcacgctaatcaaatcgttcttgactgggagcccaatgcctgtgcaatccagcacacacagcaacatgtaatccgtgttgttgcaactgattcacgagatgaatgaacatcccgaagcacccaagtcagccagttgtccaacccggcttgttctgcaacttgctgtagttgtttatgtatcagagctaccggtgccggttaccgcagcagccgtgcttttgtcggccctgttggtgcttgttgcagtaccagttatcccctaaggcaggggacagaaactgcggaatagtttttgtttgcattgacgtgacagcactgtaatcttaaacatcgtaccatagtcctttctatgacaaaggtgtggtttctgatgtctgc

SEQ ID NO: 35831 - protein, 474 aa, Zea mays subsp. mays
MAYRSAVLLPALLLAVAVVVASAAAGDGRWREEQARDRVPRVPGQAFNTSFAQYAGYVTVSEQRGAALFYWFFEAEKDPGSKPLVLWLNGGPGCSSIAFGLGEEVGPFHVNADGKGVHVNPYSWNKVANLLFLDSPVGVGYSYSNTSDDALKNGDARTATDSLAFLLKWLERFPQYKEREFYLTGESYAGHYVPQLAQAIKRHHEATGDKSINLKGYMVGNALTDDFHDHYGIFQFMWTTGLISDQTYKLLNVFCDYESFVHSSPQCDKIMDIASTEAGNIDSYSIFTPTCHASFASSKNKVMKRLHSAGKMGEQYDPCTEKHSTVYFNLAEVQKALHVNTVIGKSKWETCSEAVNTHWGDCERSVLHIYHELIQYGLRIWVFSGDTDAVIPVTSTRYSIDALKLPTITPWHAWYDDDGEVGGWTQGYRGLNFVTVRGAGHEVPLHRPKQALTLIKSFLTGSPMPVQSSTHSNM

SEQ ID NO: 35832 - protein, 257 aa, Zea mays subsp. mays
MVGNALTDDFHDHYGIFQFMWTTGLISDQTYKLLNVFCDYESFVHSSPQCDKIMDIASTEAGNIDSYSIFTPTCHASFASSKNKVMKRLHSAGKMGEQYDPCTEKHSTVYFNLAEVQKALHVNTVIGKSKWETCSEAVNTHWGDCERSVLHIYHELIQYGLRIWVFSGDTDAVIPVTSTRYSIDALKLPTITPWHAWYDDDGEVGGWTQGYRGLNFVTVRGAGHEVPLHRPKQALTLIKSFLTGSPMPVQSSTHSNM

SEQ ID NO: 35833 - protein, 238 aa, Zea mays subsp. mays
MWTTGLISDQTYKLLNVFCDYESFVHSSPQCDKIMDIASTEAGNIDSYSIFTPTCHASFASSKNKVMKRLHSAGKMGEQYDPCTEKHSTVYFNLAEVQKALHVNTVIGKSKWETCSEAVNTHWGDCERSVLHIYHELIQYGLRIWVFSGDTDAVIPVTSTRYSIDALKLPTITPWHAWYDDDGEVGGWTQGYRGLNFVTVRGAGHEVPLHRPKQALTLIKSFLTGSPMPVQSSTHSNM

SEQ ID NO: 35834 - DNA, 1185 bp, Zea mays subsp. mays
  misc_feature (302)..(302): n is a, c, g, or t
  misc_feature (484)..(484): n is a, c, g, or t
  misc_feature (580)..(586): n is a, c, g, or t
  misc_feature (594)..(594): n is a, c, g, or t
  misc_feature (696)..(697): n is a, c, g, or t
ctacctctctctagatccactctcccccccaccacgccgaccagacaccgactctccatggaaggcgcccagatccactctctctccgccgaccacgcaccaactctccatggaagggtgcgaaccacgccgaccccaacctcggctctccatggaagggcgcggtccacgccgaccccgacctcggctctccagggaagggtgtggtccacgccgaccccgacccggccaccacgtggctctccatggaaggcgctcagatccactctctcgatccaaccaccgcggcgcgccccaacctnggcgctccatggaagggcgtggtccacgccgacctcgacccgggcttaccacatcaacggtccaacggcgacatggagaggccgacaccggtgagaaagtcccacacatcaacggtggacctgctcatctagacggagggggcatcgcaagagtcgcaacagccgaccgcatcagtcgtcgnaggcgctcaggacgccccagctcgctgcttttgtctccgcgcagcttacccgatggtcaagccacgccgagcaacgtctcaaagaataagagtccnnnnnnnacgttggntaggtgatgttcctgcatggcaccggggaggtcaccgtcaccatcggctgcaacagcttctctgcacagcccctccacccggaggaaccaactatgaatccnncaataacaagagaacaattggctgatctggtggcgaaggagttacatctatgctaaccatggaggaaccgactatgattgaatcctacaataacaagagaacagttggctgatctggtggcgaaggagttacattttcgctaaccatgctcaaggtcattggggatggtggttatccaaacggcccctatgacaaggatgatcaatcaatgaggccttgtgtcgataattataataacaactttgtgaaacatggttttgccccatctttgcagcatcatattgtcctatagtattgtaattgataagtgtttgagcatgaagcaggttaggtggtgtttttcccctacgaattacgcaatcacatatagattgtttttatgggtttttagccatgtactgtagtgaatctttattactggcatacaacatttcccaacagttttaataatgagcaataaactgatatgtatttactggtttggtggt

SEQ ID NO: 35835 - protein, 199 aa, Zea mays subsp. mays
  misc_feature (101)..(101): Xaa can be any naturally occurring amino acid
  misc_feature (161)..(161): Xaa can be any naturally occurring amino acid
  misc_feature (193)..(195): Xaa can be any naturally occurring amino acid
  misc_feature (198)..(198): Xaa can be any naturally occurring amino acid
YLSLDPLSPPPRRPDTDSPWKAPRSTLSPPTTHQLSMEGCEPRRPQPRLSMEGRGPRRPRPRLSREGCGPRRPRPGHHVALHGRRSDPLSRSNHRGAPQPXRSMEGRGPRRPRPGLTTSTVQRRHGEADTGEKVPHINGGPAHLDGGGIARVATADRISRXRRSGRPSSLLLSPRSLPDGQATPSNVSKNKSXXXTLXR

SEQ ID NO: 35836 - protein, 163 aa, Zea mays subsp. mays
  misc_feature (65)..(65): Xaa can be any naturally occurring amino acid
  misc_feature (125)..(125): Xaa can be any naturally occurring amino acid
  misc_feature (157)..(159): Xaa can be any naturally occurring amino acid
  misc_feature (162)..(162): Xaa can be any naturally occurring amino acid
MEGCEPRRPQPRLSMEGRGPRRPRPRLSREGCGPRRPRPGHHVALHGRRSDPLSRSNHRGAPQPXRSMEGRGPRRPRPGLTTSTVQRRHGEADTGEKVPHINGGPAHLDGGGIARVATADRISRXRRSGRPSSLLLSPRSLPDGQATPSNVSKNKSXXXTLXR

SEQ ID NO: 35837 - protein, 149 aa, Zea mays subsp. mays
  misc_feature (51)..(51): Xaa can be any naturally occurring amino acid
  misc_feature (111)..(111): Xaa can be any naturally occurring amino acid
  misc_feature (143)..(145): Xaa can be any naturally occurring amino acid
  misc_feature (148)..(148): Xaa can be any naturally occurring amino acid
MEGRGPRRPRPRLSREGCGPRRPRPGHHVALHGRRSDPLSRSNHRGAPQPXRSMEGRGPRRPRPGLTTSTVQRRHGEADTGEKVPHINGGPAHLDGGGIARVATADRISRXRRSGRPSSLLLSPRSLPDGQATPSNVSKNKSXXXTLXR

SEQ ID NO: 35838 - DNA, 1505 bp, Zea mays subsp. mays
  misc_feature (1438)..(1438): n is a, c, g, or t
aaacagaggaaagaaaaaaccgtcagagcgacgttagtcggctcagctgtagtgtagttgcaggtgttcgccggcacacgcgcgtggccgcgaaccctagatgacgccggcgaacggcgccccagcgcgggcagcggaggcgggcccccacgaggtggagtcggaggccgacgcgttccggcgccaggtcgacgacctcgtctcgaagaccgacgtgctggagcggcgggtgaaagaggtggcggacttctacgatggcaaaaagcacggaagcggcgggaggaagggtggtggtggtggcaggtatggggcatcctcgaggggaatgccggaccttatgcgccagttcggcgtgcttttgaaagagatcacctctcataaagatgcatggccatttctggagccggtggatgttgtaactctacagcttcctgactatcacaacattattacccaacctatggacttctctaccatccaaaagaaaatggaaaggaaggatggtacttgttacaccaatgttagagaaatatgttctgatgttcgattaatttttgccaatgcgatgaagtacaatgatgatcaaaatgtcatccacttgatggctaaatcattgcttgagaaatttgaagagaagtggctccattttcttcctaaagttgagagtgaggaaaaaagacaaaaggaggaggaatcaaagggtgttgcagccacaaatacttctcgagaagttgcaattgtaaaattagcaaaagacactgatgatgagctaaatcagatcaacaggaagctggaagagctccggaaaatggtggttcacagatgcaggaaaatgacgacagatgagaagaggaagctgggtgcagttatctgtcacttgtctccagatgatcttagcaaggcgctagagattgtcgcacaagacaatcctagcttccagactaaagcagaagaagtggatcttgatatggatgcccagagcgagacaactctatggaggctgaaattctttgtgagggaagcgctggaacgacaggccaacgttgcctctgggaagatggacgaaaacgccaagagaaagagggagatatgcaatgctctggccaaaaccacctcgagacggatcaagaagcagccctagccatcttccatatatttcactcgcgtcctctgattgtttagaagttctttttttgatactagccaccagctttgtgaaacgttttcctgcatttttttgtggagatgtgtatatagtagtatagtgcactgtccagtccagtaacaagtgatttcgtgtgtaaccatgagctggtcgcattcgcgtcccctctgatccaacaacaaacattgtctcacaatgtgattgattgtagaagcaagcttttgtcacagggcgatgttgctcacttgtggaatcagatgatgcatacatttngtaactgttcattcattctccaccttggcttgaaaattaaggtgagaaggcctgcggatttacatgc

SEQ ID NO: 35839 - protein, 346 aa, Zea mays subsp. mays
MTPANGAPARAAEAGPHEVESEADAFRRQVDDLVSKTDVLERRVKEVADFYDGKKHGSGGRKGGGGGRYGASSRGMPDLMRQFGVLLKEITSHKDAWPFLEPVDVVTLQLPDYHNIITQPMDFSTIQKKMERKDGTCYTNVREICSDVRLIFANAMKYNDDQNVIHLMAKSLLEKFEEKWLHFLPKVESEEKRQKEEESKGVAATNTSREVAIVKLAKDTDDELNQINRKLEELRKMVVHRCRKMTTDEKRKLGAVICHLSPDDLSKALEIVAQDNPSFQTKAEEVDLDMDAQSETTLWRLKFFVREALERQANVASGKMDENAKRKREICNALAKTTSRRIKKQP

SEQ ID NO: 35840 - protein, 271 aa, Zea mays subsp. mays
MPDLMRQFGVLLKEITSHKDAWPFLEPVDVVTLQLPDYHNIITQPMDFSTIQKKMERKDGTCYTNVREICSDVRLIFANAMKYNDDQNVIHLMAKSLLEKFEEKWLHFLPKVESEEKRQKEEESKGVAATNTSREVAIVKLAKDTDDELNQINRKLEELRKMVVHRCRKMTTDEKRKLGAVICHLSPDDLSKALEIVAQDNPSFQTKAEEVDLDMDAQSETTLWRLKFFVREALERQANVASGKMDENAKRKREICNALAKTTSRRIKKQP

SEQ ID NO: 35841 - protein, 267 aa, Zea mays subsp. mays
MRQFGVLLKEITSHKDAWPFLEPVDVVTLQLPDYHNIITQPMDFSTIQKKMERKDGTCYTNVREICSDVRLIFANAMKYNDDQNVIHLMAKSLLEKFEEKWLHFLPKVESEEKRQKEEESKGVAATNTSREVAIVKLAKDTDDELNQINRKLEELRKMVVHRCRKMTTDEKRKLGAVICHLSPDDLSKALEIVAQDNPSFQTKAEEVDLDMDAQSETTLWRLKFFVREALERQANVASGKMDENAKRKREICNALAKTTSRRIKKQP

SEQ ID NO: 35842 - DNA, 1025 bp, Zea mays subsp. mays
cgcttcctctgtctctgtctcgtcgtctcccccatctggccatctccggctagggtttgccctcccaccacgtccgaggtctagctcgtctccgccactgccggaccaaggatgtcgcaagagcaaggtatggaggagccgccgccgcaggcggtaggcgaggcacaatcggccgccgatgtccccatgagcgaggccgcagcggtggaggatgaggatgaggaacccgtcatgggggaggggcagggcggtgaaagcggggccgccgatgccgttgattccgtcaaggcttcagtgaagcccgaagcagagggcgcggaggaaggggacagagaggagcttaatggtggcccgacggcggatttgactgacgaggttgtgaaattggagaacggggatggccccgtgccggtgggtggctccgcggatgagtgcggagctggagatggcggtgttgataagggcctggttggtcagaatgagcctgttgtgaaccagcttgtgctggtgcaggctgaggaggagctggcattgtctaagatctcaaacagttccttcatgttcgattacaccactgggggtgatgactcagggactgaggaggagcaggctgccttcatgaaggagctggagcgtttccacagggagaaaatgttggagttcaagccccctaagttttatggtgaaggattgaattgcctcaaattgtggagacaagttactggattgggtggctatgatcaggtgacatcatgcaagctgtggcgtcaagtgggagagtcattcaaacctccaaagacatgtacaactgtttcatggactttccgtaacttctatgagaaggcactccttgaatatgagaaacacaaaatcgaaacaggagagttccaactagcttcatctgctctaccagatcgagttggttctgagagccaggtgggtggaagccacgtatctggttctggaagagccagaagagaatctgcaactcgtgcaatgcaaggctggcattctcaccgcctact

SEQ ID NO: 35843 - protein, 304 aa, Zea mays subsp. mays
MSQEQGMEEPPPQAVGEAQSAADVPMSEAAAVEDEDEEPVMGEGQGGESGAADAVDSVKASVKPEAEGAEEGDREELNGGPTADLTDEVVKLENGDGPVPVGGSADECGAGDGGVDKGLVGQNEPVVNQLVLVQAEEELALSKISNSSFMFDYTTGGDDSGTEEEQAAFMKELERFHREKMLEFKPPKFYGEGLNCLKLWRQVTGLGGYDQVTSCKLWRQVGESFKPPKTCTTVSWTFRNFYEKALLEYEKHKIETGEFQLASSALPDRVGSESQVGGSHVSGSGRARRESATRAMQGWHSHRL

SEQ ID NO: 35844 - protein, 298 aa, Zea mays subsp. mays
MEEPPPQAVGEAQSAADVPMSEAAAVEDEDEEPVMGEGQGGESGAADAVDSVKASVKPEAEGAEEGDREELNGGPTADLTDEVVKLENGDGPVPVGGSADECGAGDGGVDKGLVGQNEPVVNQLVLVQAEEELALSKISNSSFMFDYTTGGDDSGTEEEQAAFMKELERFHREKMLEFKPPKFYGEGLNCLKLWRQVTGLGGYDQVTSCKLWRQVGESFKPPKTCTTVSWTFRNFYEKALLEYEKHKIETGEFQLASSALPDRVGSESQVGGSHVSGSGRARRESATRAMQGWHSHRL

SEQ ID NO: 35845 - protein, 279 aa, Zea mays subsp. mays
MSEAAAVEDEDEEPVMGEGQGGESGAADAVDSVKASVKPEAEGAEEGDREELNGGPTADLTDEVVKLENGDGPVPVGGSADECGAGDGGVDKGLVGQNEPVVNQLVLVQAEEELALSKISNSSFMFDYTTGGDDSGTEEEQAAFMKELERFHREKMLEFKPPKFYGEGLNCLKLWRQVTGLGGYDQVTSCKLWRQVGESFKPPKTCTTVSWTFRNFYEKALLEYEKHKIETGEFQLASSALPDRVGSESQVGGSHVSGSGRARRESATRAMQGWHSHRL

SEQ ID NO: 35846 - DNA, 1921 bp, Zea mays subsp. mays
gcacgagaccattacctagaacatcctaatcgaaaaacgccgaatgcaccctaagaaaacaccggagggcatgtgccttgtgtgcgcaccagatcagccgaatcgtttctgttgaagaagccatggaatcgcgccgcctcttcctcactcgccgcctctccatctcctccggcgcccagtccagcgccgctttcatcgccgacgaaatctatgccctcctcaccacacgatctttccgggcttccgttaaccgcacggaactgttcatacgctccaaatccgtcacagcctccggcgtcgccgagatgtaccgctcggtggccgttgcaggcccacctgggcagcccctttacctcggccgcgcggcctccgtgctggtcgaggcatccgcgcgcgcggccctccccgacggcgcgctgcggctgctggacctcctcatactcacgcccaaggcgccgctgccgtcgggcgcctcctgcggccacctcatggcgaagctcttctcactcgggcgccacgcggatgcgcgccgcgtgttcgagaccctcggcgatcgccagcgccgcgatgcggtcaccacggtttggagagtcgggagagcggctgacgccgtcaaggtgttcggcgaaacggcggccacgaccacggcgccaaaatattccagtgaccggtatgttaccatgaatatgatgactgactgcctgatgaagggagatctggaggctgcttggaagttgcggacccagatggtggaggcgggcatgaaactacagaagcaccaccagaaaatgctgcaaatgctggaaaaagtcctggtgtgcccagacaacaacaagcggaacgtgcttatcgaagtctgcgtcaaggcaggcggcatggacgaggccgtccattggctccggcagatgggctacgatggcatggaacctcccagtgctcactcctacaacttggtgatcgccgggctctggaaggccggcaggggtgacgacgctgtcaaggtgttcggcgagatgacagacatgctcgtggcgccgaatcatttcacatatactgtcatgatcaatggccacttgaagagactgagcagtgttttgtcctcgaggaagaacgagaatggagatctggaggctgcgctcgccctgctggatcagatggtgcgggatggcttcaagccacacgaatacacctgccatttgctgatggcagaacactgcttagctgaatggctgggagacgttacagctttacataagatcgctcatggcagcctgcttgagttcctatctagaaccaacgaagataagttactggccatcattgaggaatctgcgaagaacggtgctgctgcagcgggtaatgtttgtactacctttctcgaggagctttgcaggattcagaaagtttcactcgcagagaaggtgctgcggacatttgcggaggcagggttggtcccgacgacagagatgtacaacattgtcattgacgggtattgcaagaccagggacctccaaggggcgttcttgttgtgtcgccagatggaatcacatgatcagcttgtacctaatgaagccacctacaagtctctgctgctggccgtgcgcaacgacacaacaagcatcatctactgggaggacgtggttgagttgtttgagaagaatggaattagtactgatgcgctgaactccggcagtcctgctgcatacggattcaagtataggtacagtctagtaactagaaagtttaaggaattggcgagcaagctattttagaatctgcagaatggatattttcattgctgatctacactcttagcttaaactattaaacatatgctcgatgatgcagcatgtattctttcttaagaacttgtggaaccttgtttgctcgatggctacattcagattgaggggcttgttct

SEQ ID NO: 35847 - protein, 549 aa, Zea mays subsp. mays
MESRRLFLTRRLSISSGAQSSAAFIADEIYALLTTRSFRASVNRTELFIRSKSVTASGVAEMYRSVAVAGPPGQPLYLGRAASVLVEASARAALPDGALRLLDLLILTPKAPLPSGASCGHLMAKLFSLGRHADARRVFETLGDRQRRDAVTTVWRVGRAADAVKVFGETAATTTAPKYSSDRYVTMNMMTDCLMKGDLEAAWKLRTQMVEAGMKLQKHHQKMLQMLEKVLVCPDNNKRNVLIEVCVKAGGMDEAVHWLRQMGYDGMEPPSAHSYNLVIAGLWKAGRGDDAVKVFGEMTDMLVAPNHFTYTVMINGHLKRLSSVLSSRKNENGDLEAALALLDQMVRDGFKPHEYTCHLLMAEHCLAEWLGDVTALHKIAHGSLLEFLSRTNEDKLLAIIEESAKNGAAAAGNVCTTFLEELCRIQKVSLAEKVLRTFAEAGLVPTTEMYNIVIDGYCKTRDLQGAFLLCRQMESHDQLVPNEATYKSLLLAVRNDTTSIIYWEDVVELFEKNGISTDALNSGSPAAYGFKYRYSLVTRKFKELASKLF

SEQ ID NO: 35848 - protein, 488 aa, Zea mays subsp. mays
MYRSVAVAGPPGQPLYLGRAASVLVEASARAALPDGALRLLDLLILTPKAPLPSGASCGHLMAKLFSLGRHADARRVFETLGDRQRRDAVTTVWRVGRAADAVKVFGETAATTTAPKYSSDRYVTMNMMTDCLMKGDLEAAWKLRTQMVEAGMKLQKHHQKMLQMLEKVLVCPDNNKRNVLIEVCVKAGGMDEAVHWLRQMGYDGMEPPSAHSYNLVIAGLWKAGRGDDAVKVFGEMTDMLVAPNHFTYTVMINGHLKRLSSVLSSRKNENGDLEAALALLDQMVRDGFKPHEYTCHLLMAEHCLAEWLGDVTALHKIAHGSLLEFLSRTNEDKLLAIIEESAKNGAAAAGNVCTTFLEELCRIQKVSLAEKVLRTFAEAGLVPTTEMYNIVIDGYCKTRDLQGAFLLCRQMESHDQLVPNEATYKSLLLAVRNDTTSIIYWEDVVELFEKNGISTDALNSGSPAAYGFKYRYSLVTRKFKELASKLF

SEQ ID NO: 35849 - protein, 427 aa, Zea mays subsp. mays
MAKLFSLGRHADARRVFETLGDRQRRDAVTTVWRVGRAADAVKVFGETAATTTAPKYSSDRYVTMNMMTDCLMKGDLEAAWKLRTQMVEAGMKLQKHHQKMLQMLEKVLVCPDNNKRNVLIEVCVKAGGMDEAVHWLRQMGYDGMEPPSAHSYNLVIAGLWKAGRGDDAVKVFGEMTDMLVAPNHFTYTVMINGHLKRLSSVLSSRKNENGDLEAALALLDQMVRDGFKPHEYTCHLLMAEHCLAEWLGDVTALHKIAHGSLLEFLSRTNEDKLLAIIEESAKNGAAAAGNVCTTFLEELCRIQKVSLAEKVLRTFAEAGLVPTTEMYNIVIDGYCKTRDLQGAFLLCRQMESHDQLVPNEATYKSLLLAVRNDTTSIIYWEDVVELFEKNGISTDALNSGSPAAYGFKYRYSLVTRKFKELASKLF

SEQ ID NO: 35850 - DNA, 1446 bp, Zea mays subsp. mays
ggctgccgcatttattatattggtttggtacttggtagtttggtgacgctgaggcctcgtccccgatcagacttgttcggcctcttcgacggcgtgcccgtctccccgggctcattcgccatgcattcctcagcctccgcgagaggaggacgagggctcctcttgccggcggctgcggcggcggttgtggtgctactgttgggtgcagtggcgccagcggcgggttgctatccgcgcgtgttcaacttcggggactctctggcggacacgggcaactacccgttcgtctatggcaacgactcagccaagctccggccaccctacggcgagaccttcttccaccgcgccaccgggcgcgcctccaacgggcgcctcgtggtcgacttcatcgcggacacgctcggcctcccgttcgtgcgaccgtatctgagcggacggagcgcggaggacttcgcgggcggggccaacttcgccgtgggcggcgccacggcgctcagcccggacttcttccgtgcaagggggttccacaacatgggaaaccgagtggacctcgacatggagatgaagtggttccgcggcctgctcgacctactctgccccggcaacctcgccggttgctcggatatgatgaaccaatctctcttcttagttggagaaatcgggggcaatgactacaacggacctcttctttctggagttcccttcgaggaaattcgcgccatcactccgagtgttgttgcgaaaatttcttctacaatcagcgaattgattcagctaggagccaagactcttgtggttccaggaaaccttcctattggatgtgtcccaaaatatctgatgatattcaagagcaataagaaagaggattatgatccacagacaggttgtcttagatggatgaacgagttctcacagtaccacaacaagcttcttgtggagcagctcaagaagcttcgcaggctccatcctggagtaaccatcatctatgctgattactatggagctgctatggaaatattcctttcccctgaacgatatgggatcgaatatcccctagtggcttgctgtggtgcagaaggaccctacggtgtgtccccaactacaagctgtggattgggagaatataagctgtgcgataatccagaaaggtatggatcatgggatggcctccatccaacagaatctgcatacaaggtcatcgctatgggcctgctactaggttcctatacaagaccgccaatcgcttccaccaccacttcatgtccacagcttatggagctcggctcttctgctgaatacaaacgcctctacgacctgtaataatttatgtaattatattttattgtatgtactccctcgcccacttcaataagtcccattttgcgagtacatgtactttgtaacttttaactaataacttatcaaactagctactatatatttgtt

SEQ ID NO: 35851 - protein, 439 aa, Zea mays subsp. mays
GCRIYYIGLVLGSLVTLRPRPRSDLFGLFDGVPVSPGSFAMHSSASARGGRGLLLPAAAAAVVVLLLGAVAPAAGCYPRVFNFGDSLADTGNYPFVYGNDSAKLRPPYGETFFHRATGRASNGRLVVDFIADTLGLPFVRPYLSGRSAEDFAGGANFAVGGATALSPDFFRARGFHNMGNRVDLDMEMKWFRGLLDLLCPGNLAGCSDMMNQSLFLVGEIGGNDYNGPLLSGVPFEEIRAITPSVVAKISSTISELIQLGAKTLVVPGNLPIGCVPKYLMIFKSNKKEDYDPQTGCLRWMNEFSQYHNKLLVEQLKKLRRLHPGVTIIYADYYGAAMEIFLSPERYGIEYPLVACCGAEGPYGVSPTTSCGLGEYKLCDNPERYGSWDGLHPTESAYKVIAMGLLLGSYTRPPIASTTTSCPQLMELGSSAEYKRLYDL

SEQ ID NO: 35852 - protein, 399 aa, Zea mays subsp. mays
MHSSASARGGRGLLLPAAAAAVVVLLLGAVAPAAGCYPRVFNFGDSLADTGNYPFVYGNDSAKLRPPYGETFFHRATGRASNGRLVVDFIADTLGLPFVRPYLSGRSAEDFAGGANFAVGGATALSPDFFRARGFHNMGNRVDLDMEMKWFRGLLDLLCPGNLAGCSDMMNQSLFLVGEIGGNDYNGPLLSGVPFEEIRAITPSVVAKISSTISELIQLGAKTLVVPGNLPIGCVPKYLMIFKSNKKEDYDPQTGCLRWMNEFSQYHNKLLVEQLKKLRRLHPGVTIIYADYYGAAMEIFLSPERYGIEYPLVACCGAEGPYGVSPTTSCGLGEYKLCDNPERYGSWDGLHPTESAYKVIAMGLLLGSYTRPPIASTTTSCPQLMELGSSAEYKRLYDL

SEQ ID NO: 35853 - protein, 262 aa, Zea mays subsp. mays
MGNRVDLDMEMKWFRGLLDLLCPGNLAGCSDMMNQSLFLVGEIGGNDYNGPLLSGVPFEEIRAITPSVVAKISSTISELIQLGAKTLVVPGNLPIGCVPKYLMIFKSNKKEDYDPQTGCLRWMNEFSQYHNKLLVEQLKKLRRLHPGVTIIYADYYGAAMEIFLSPERYGIEYPLVACCGAEGPYGVSPTTSCGLGEYKLCDNPERYGSWDGLHPTESAYKVIAMGLLLGSYTRPPIASTTTSCPQLMELGSSAEYKRLYDL

SEQ ID NO: 35854 - DNA, 500 bp, Zea mays subsp. mays
aactccaaattccccatctcgcttgctgtgtactcgcgctccagctcaccatttctcctctcccttcccttccctaagcatctcagcgaatccaatcgatccgaaggcgatggaccagcagggtgcgggcggggacgtggaggtgccggcggggctggggctgacggcggcggagtacgagcagctgcgtccgacggtggacgcgcaccaccgctacgccgtgggggagggccaatgctcctcgctgctggcgcagcgcatccacgcgccgccggccgccgtctgggccatcgtccgccgcttcgactgcccgcaggtgtacaagcacttcatccgcagctgcgcggtccggctggacccggacgccggcgacgccctccgccccggccgcctccgcgaggtgtgcgtcatctcgggcctccccgccagcaccagcaccgagcgcctggaccacctcgacgacgccgccagggtgttcggcttctccatcaccgggggcg

SEQ ID NO: 35855 - protein, 166 aa, Zea mays subsp. mays
TPNSPSRLLCTRAPAHHFSSPFPSLSISANPIDPKAMDQQGAGGDVEVPAGLGLTAAEYEQLRPTVDAHHRYAVGEGQCSSLLAQRIHAPPAAVWAIVRRFDCPQVYKHFIRSCAVRLDPDAGDALRPGRLREVCVISGLPASTSTERLDHLDDAARVFGFSITGG

SEQ ID NO: 35856 - protein, 166 aa, Zea mays subsp. mays
NSKFPISLAVYSRSSSPFLLSLPFPKHLSESNRSEGDGPAGCGRGRGGAGGAGADGGGVRAAASDGGRAPPLRRGGGPMLLAAGAAHPRAAGRRLGHRPPLRLPAGVQALHPQLRGPAGPGRRRRPPPRPPPRGVRHLGPPRQHQHRAPGPPRRRRQGVRLLHHRG

SEQ ID NO: 35857 - protein, 130 aa, Zea mays subsp. mays
MDQQGAGGDVEVPAGLGLTAAEYEQLRPTVDAHHRYAVGEGQCSSLLAQRIHAPPAAVWAIVRRFDCPQVYKHFIRSCAVRLDPDAGDALRPGRLREVCVISGLPASTSTERLDHLDDAARVFGFSITGG

SEQ ID NO: 35858 - DNA, 649 bp, Zea mays subsp. mays
attttttttttaatgaagaggttcgtgcacgcactgtgttcaacgcaattccaattttctatccgagtgatgagtgactgtgcacatacatcgtactacaggtgggacccgcttactagatcagattctaacatcctgttcgtggagtcgtctcggcggcggcggaacaagccgggaacctaccgcaaagggcgccaccgatgctaaagccacagacgtcgtggacagcttccctccctctccttctcatccgccgctgctcgagaaccgcggccagtccatctcctgccggtgaccggccgctctcctttgtcccggtctgcaagcggcggatgagcacgctggcgcatcccaggtttgcccctctccctacggagcaaactgaatcccaaacagatggcggggctgcacggtaccagttccggctggtctcttacaacatcttggcccaggtttatgttaagagtacgctttttcctcattccccatctgcgtgcctcaagtggaaatctcgatcgggagctattcttacagaactaaagagctttgatgctgacttcatgtgcatacaggagttggatgaatatgataccttctataagaaaaacatggaaaactctggatattcaagtatttacattcagcgatc

SEQ ID NO: 35859 - protein, 149 aa, Zea mays subsp. mays
MLKPQTSWTASLPLLLIRRCSRTAASPSPAGDRPLSFVPVCKRRMSTLAHPRFAPLPTEQTESQTDGGAARYQFRLVSYNILAQVYVKSTLFPHSPSACLKWKSRSGAILTELKSFDADFMCIQELDEYDTFYKKNMENSGYSSIYIQR

SEQ ID NO: 35860 - protein, 105 aa, Zea mays subsp. mays
MSTLAHPRFAPLPTEQTESQTDGGAARYQFRLVSYNILAQVYVKSTLFPHSPSACLKWKSRSGAILTELKSFDADFMCIQELDEYDTFYKKNMENSGYSSIYIQR

SEQ ID NO: 35861 - DNA, 748 bp, Zea mays subsp. mays
  misc_feature (558)..(558): n is a, c, g, or t
  misc_feature (650)..(650): n is a, c, g, or t
  misc_feature (677)..(677): n is a, c, g, or t
  misc_feature (712)..(713): n is a, c, g, or t
agaggcccagcccacggtcagtgtcacctctgctatttcttcacccgtccgttcacctgcgttcatccggcctacgttaaaatctctccatcccggcgacgactggcgacagccgctgccggcctactccaggtccccaggtctacgtcggacccttcgccgcggcgaacaccaccagatggcgagcacggggcggtcgatgctgctgtcactgctcctcttcgcagtgacgctgtcgctgctggagatgtacagggccaagttcgcctcgtcggagctcatgaccattgccggtggattcgtctgctccctcctattcctgctactcctcacctttattggaaactatcaagaagctagtggagatagaactgggtggggtgcagttgttgtagcacaacttgtagctcttattgtagccggcactgtccaccgtgtctgtatcacaacatgcttcctgttttccgctggactcctttacgaggttgacaagctctctggcatgatccttgcgaggagtgagtctaaggtgaggcggcactaagcacagaagcagcncagagagatgatacattgatatttttatgtaagatgacatattttgtatgtcaaactggagtgttggttcgcgttggccatcaggccttttntgctagccatataggggctctggattntggattactggtgcgtttgcaccgaggtcacactnngatgtttgtctaatcaattgattgggtgatttacc

SEQ ID NO: 35862 - protein, 180 aa, Zea mays subsp. mays
EAQPTVSVTSAISSPVRSPAFIRPTLKSLHPGDDWRQPLPAYSRSPGLRRTLRRGEHHQMASTGRSMLLSLLLFAVTLSLLEMYRAKFASSELMTIAGGFVCSLLFLLLLTFIGNYQEASGDRTGWGAVVVAQLVALIVAGTVHRVCITTCFLFSAGLLYEVDKLSGMILARSESKVRRH

SEQ ID NO: 35863 - protein, 121 aa, Zea mays subsp. mays
MASTGRSMLLSLLLFAVTLSLLEMYRAKFASSELMTIAGGFVCSLLFLLLLTFIGNYQEASGDRTGWGAVVVAQLVALIVAGTVHRVCITTCFLFSAGLLYEVDKLSGMILARSESKVRRH

SEQ ID NO: 35864 - protein, 119 aa, Zea mays subsp. mays
RGPAHGQCHLCYFFTRPFTCVHPAYVKISPSRRRLATAAAGLLQVPRSTSDPSPRRTPPDGEHGAVDAAVTAPLRSDAVAAGDVQGQVRLVGAHDHCRWIRLLPPIPATPHLYWKLSRS

SEQ ID NO: 35865 - DNA, 2974 bp, Zea mays subsp. mays
  misc_feature (2612)..(2612): n is a, c, g, or t
  misc_feature (2654)..(2654): n is a, c, g, or t
  misc_feature (2680)..(2680): n is a, c, g, or t
  misc_feature (2697)..(2697): n is a, c, g, or t
  misc_feature (2703)..(2703): n is a, c, g, or t
  misc_feature (2717)..(2717): n is a, c, g, or t
  misc_feature (2731)..(2731): n is a, c, g, or t
  misc_feature (2761)..(2762): n is a, c, g, or t
  misc_feature (2770)..(2771): n is a, c, g, or t
  misc_feature (2823)..(2823): n is a, c, g, or t
  misc_feature (2856)..(2856): n is a, c, g, or t
  misc_feature (2872)..(2873): n is a, c, g, or t
  misc_feature (2914)..(2914): n is a, c, g, or t
  misc_feature (2917)..(2917): n is a, c, g, or t
  misc_feature (2929)..(2929): n is a, c, g, or t
  misc_feature (2962)..(2962): n is a, c, g, or t
tcctaatcaaaaaaactaaaaaaaaagccaaaatggcggggggaggtcgtcgtctcccctccctgcgatcccctccatccgcgacgccatctcggccacttcatgatcactagggtttcgctcttctacccataagccctcgtcccgatgcgctggtggaagcgctcctcctccccctcctgccccgcctcctcatcctcagcatcgacccccgcttcccccgcccgcgcctccaccccccgtctcatcggcggttggggtagcggccctagctcacgccgcgatggcagcggggccagcaacgatccgcagccgcggctgatcagagcgcggcggatgcgctacgtcgtcgatgacctcgaggtcggggtctccgcgctcggcgtggactctccggcgaggagggacgcggcggcgggggtttgcgcttgagacagtgagctccgcgccgatctcgtggtctccgagcaacatggaggtggcgccggcgagatcctcgtcgacccccgtgctgctgccgcatccgctgccccttccaggcgagggggaatcgccgtgccgcgggccggggaggccgcttccgccaccggtgccaaggatgctcgacggggaggggaaagggcctgcagcggacgctcccggtgttttagagactgggagccaaaggatgacgccgttactcgcacggagagtggcggtccaaactctaccaaaggctcatgagcacaacgactttcggttaaatgggactacctgttgtcagcggagaaaggcttttaaagagaagttccaggataagaactgtgatgaaactttgaacttcagattgaacattcctgctaaaagtgctccaagcagtgggttttcaagccctgtacaaagtcctcgaagactgagtaatgtagatttctcatctgctgcaatctctatccaagataccaatgtatggtcagcacgatctctctggtcttctgatgcgatgggatcttcacctccttgtgattcacctgacaagtttgcaggtggtcaggagcgttctcctctctctagtccactgagaagtccagttttaaaatcaagaaacccaagtgcacctccatcaccaatgcatccaaagttgttcccggagaaccatgtttctcgccctgatggcaatggaagtgctagttttcacccattaccgctccctcctgcttctgtaagcccaaagcagacaaatgctagccaccagttagttccaaaagctgagatgccttcggtggctggtcaatggcagaaaggaaaactcttgggtagtggcacctttggatgcgtgtatgaggccaccaataggcacactggagctctttgtgccatgaaagaggtgaatataattccagatgatgctaaatcagtcgagtctctgaagcaattggaacaggaaattaagtttcttagtcaatttaagcatgaaaatattgtgcagtactatggcagtgaaactatcgaagatagattctacatatacctggagtatgttcatcctggttcaatccataagtatgttcatcaacactgtggatcgctgacagaagcagtcatccgtaacttcacacgtcatattctcaagggtcttgcttttttacatagccaaaagattatgcatagggatatcaaaggggcaaatttgttagttgatattaacggtgtagtgaaattggctgacttcggaatggcaaagcatttgagtactgcagctcctaatctttcattgaagggaacaccatactggatggctcctgaggttgttcgggctacactcgataaaagtgcaggttatgatcttctgttgatatttggagccttggctgcacaatcattgagatgtttacaggaaagccaccttggagtggtcttgaagggccggctgcaatgtttaaggtgttgcgcacggacccaccaattccagataacctgtcccctgaagggaaggattttctgagatgctgcttcaagagaaaccctactgagcgaccaacagcaaacaagttgctcgaacacccatttatccaaactttgaaccactacagcccacatagcgttgtacattcattttcgggaattaaatctccagatactgtgcacagcagtgcaagagataaagtaccctggaaaagtgattcatatatgagagggaaacatgcaaatggtgaaacaagcagtgctcggtcgtcagagtcattggcttatcggttgatgacacccctacccaacttgggaaccaatagtttgtcacctccacctttgagttcggcctccagttctggctctgcagcacatacaccgaacagtatgcatttttcagtcccataccatcagcctagtcctttgccaaagcctaacgggaaggaagcaataaatttggtttcccattgaataacagcatgccacctatcacaacatctgggcaaagtccacataaacagcgcaagtgtatccgtccctagcgtctgacccttgtactgccagtaatagctaacaattttctgggtcgtgtaaaaataatttccatgtaagggcttgttcggttattcctaatacacatggattggatgggattggaaaaaattganaagaagtttgacttgtttgggattcaaacccatccaatcccnctcaatccacatggattaagagctanccgaacaagccctaaanagatcnccgtgatatgatcncagggaaatgctgntaaatgagggagctttgtgaaatctgttgnnccgtttgnnttctgggaaactgattggattgcccatgtaacatatttttattagggtgtanctgtaggtgaaactaatggtcaagattgtgccnacaaataggacattanngttgtagctgtagcgtgttgttgatgctgtgtaatgatcanacntgatgtaatcantattgatttttttttggggaaggtaataatgcncgtcaattggcg

SEQ ID NO: 35866 - protein, 542 aa, Zea mays subsp. mays
MTSRSGSPRSAWTLRRGGTRRRGFALETVSSAPISWSPSNMEVAPARSSSTPVLLPHPLPLPGEGESPCRGPGRPLPPPVPRMLDGEGKGPAADAPGVLETGSQRMTPLLARRVAVQTLPKAHEHNDFRLNGTTCCQRRKAFKEKFQDKNCDETLNFRLNIPAKSAPSSGFSSPVQSPRRLSNVDFSSAAISIQDTNVWSARSLWSSDAMGSSPPCDSPDKFAGGQERSPLSSPLRSPVLKSRNPSAPPSPMHPKLFPENHVSRPDGNGSASFHPLPLPPASVSPKQTNASHQLVPKAEMPSVAGQWQKGKLLGSGTFGCVYEATNRHTGALCAMKEVNIIPDDAKSVESLKQLEQEIKFLSQFKHENIVQYYGSETIEDRFYIYLEYVHPGSIHKYVHQHCGSLTEAVIRNFTRHILKGLAFLHSQKIMHRDIKGANLLVDINGVVKLADFGMAKHLSTAAPNLSLKGTPYWMAPEVVRATLDKSAGYDLLLIFGALAAQSLRCLQESHLGVVLKGRLQCLRCCARTHQFQITCPLKGRIF

SEQ ID NO: 35867 - protein, 502 aa, Zea mays subsp. mays
MEVAPARSSSTPVLLPHPLPLPGEGESPCRGPGRPLPPPVPRMLDGEGKGPAADAPGVLETGSQRMTPLLARRVAVQTLPKAHEHNDFRLNGTTCCQRRKAFKEKFQDKNCDETLNFRLNIPAKSAPSSGFSSPVQSPRRLSNVDFSSAAISIQDTNVWSARSLWSSDAMGSSPPCDSPDKFAGGQERSPLSSPLRSPVLKSRNPSAPPSPMHPKLFPENHVSRPDGNGSASFHPLPLPPASVSPKQTNASHQLVPKAEMPSVAGQWQKGKLLGSGTFGCVYEATNRHTGALCAMKEVNIIPDDAKSVESLKQLEQEIKFLSQFKHENIVQYYGSETIEDRFYIYLEYVHPGSIHKYVHQHCGSLTEAVIRNFTRHILKGLAFLHSQKIMHRDIKGANLLVDINGVVKLADFGMAKHLSTAAPNLSLKGTPYWMAPEVVRATLDKSAGYDLLLIFGALAAQSLRCLQESHLGVVLKGRLQCLRCCARTHQFQITCPLKGRIF

SEQ ID NO: 35868 - protein, 460 aa, Zea mays subsp. mays
MLDGEGKGPAADAPGVLETGSQRMTPLLARRVAVQTLPKAHEHNDFRLNGTTCCQRRKAFKEKFQDKNCDETLNFRLNIPAKSAPSSGFSSPVQSPRRLSNVDFSSAAISIQDTNVWSARSLWSSDAMGSSPPCDSPDKFAGGQERSPLSSPLRSPVLKSRNPSAPPSPMHPKLFPENHVSRPDGNGSASFHPLPLPPASVSPKQTNASHQLVPKAEMPSVAGQWQKGKLLGSGTFGCVYEATNRHTGALCAMKEVNIIPDDAKSVESLKQLEQEIKFLSQFKHENIVQYYGSETIEDRFYIYLEYVHPGSIHKYVHQHCGSLTEAVIRNFTRHILKGLAFLHSQKIMHRDIKGANLLVDINGVVKLADFGMAKHLSTAAPNLSLKGTPYWMAPEVVRATLDKSAGYDLLLIFGALAAQSLRCLQESHLGVVLKGRLQCLRCCARTHQFQITCPLKGRIF

SEQ ID NO: 35869 - DNA, 2288 bp, Zea mays subsp. mays
accttctagaatatcaggatcgccagcgccgccgcatcgagtggccctgtggcccatggacaagctccgcgtccaccggtgcaccggcgacgcggtcgagtggtccccctctcccatcgtcgcgctcgccgcctctccctgcgcctcccaggtcgccgccgcgcgtgaagacggctcgctcgagctctggctcgtctccccgggctccgtcggctggcacaaccagctcactatacaaggcaacgccgcgtcgagggtcacatcactggtgtgggggcggagaggtggagcgaccggccggctgctctcgtccagcattgatgggtcggtgtccgaatgggatctctttcacctgcagcaaaagactgttctagatactgttggagttccaatctggcaaatggccatcgagcctttggatgatgctaaaaatactgaaaataatagctcagagtttgctgtcaatggtcatacaaaccaaaatgactccagcgattctgactttagtaacattgatgatggtgacaactctgaggatgaagatggttctaccaacacaagatcttcatatcatgtgaatgatttccagcgaatggctcttgcatgtgatgatggttctgtacgattgtttaacgtgcctgaatcaggtgcattgacttactatagatttcttcccagagtgagcgggcggtctctcagcgtgacatggagtagtaacaccaaatttgtattttctggcagcagtgacggtttaatcagatgctgggattcaacatctttccatgaaatgtatcgtattactgctggattaggaggggctggtacctcacctgaactttgcatctggacactattgttctgaggtgtggaactattgttagtggagatagtaccgggagtgtacagttttgggatagccgccatggaacacttctgcaagctcactcctatcataaaggcgacgtgaatgcactaacaactgtgcctggtgagaacagggtattttccgcagggtccgatggccaggtaattttatacaaaatatcaaaagatgaatttggtgctagtaaaaatgtggtcaaagagcaagttcacaaatgggtctacgtgggatatgtgagagctcacactcatgatgtaagggcactgaccatggctgtacctatctgtagagaagatacatcacctgaggaaaagttggttaagattcgccggcgtgaaaaacatgaatttagttaccacaaatgggctcatcttggtgttccaatgcttatatctggtggtgatgacaccaagctgtttgcatattcggcaagagagtttactcagtttgcacctcataatttctgccctgcacctcaacgccctttgataaagatggctagggatagcacagtcaatggagattctgtaatgcttgtccagtctccaaactgtttggatattttacttgtgacagttcagaacaaattgacgactccaagtacatcatcatctagaggagatgctacagtccgacaacttgctcgtttgaaaagcaaggggtccagaaaaatcatttctagtgctgcctctgccaatggaacacttttggcctattcagatggtgtgagaccctgcctctttgcgctaaggcataagggtggaaagaagtatacccttgacaaattagagctaccaaaaggattgccctgttctcagagtatggtgtttacggttgattcgtccaatttgatacttgcggggcgtaatggaaaaatatatatcattgacattgcaacaagagaaatttcaaatgtatttcaccctacaagaaaggcagatggagcaaaaatctcaagagaatcacctataacgaagatgttcctaagtgcagatgggcaatggctggctgcagttaactgctatggcgatatttatgtatttaatcttgaggtgcaaaggcaacactggttcatatcccgaatgaacggtggttctgttacatctggtggtttttgccccaagaacaacacacttgtgataactacatctaaaaatgaggtgtatgtatttgatgtggaagcaaaacaattaggtgaatggtccaagcgatatacacaccagttgcccagaagtttccaggaattccctggagaggtcattggcttatcatttcctccgcaaagctcatcgtcagttgttgtatacagtaccagggctatgtgcaacatcgatttcggattgccagtcgttgaggatgttggcttgccaaatggatcaggtggaccagcagagaaggcagacgc

SEQ ID NO: 35870 - protein, 378 aa, Zea mays subsp. mays
MAVPICREDTSPEEKLVKIRRREKHEFSYHKWAHLGVPMLISGGDDTKLFAYSAREFTQFAPHNFCPAPQRPLIKMARDSTVNGDSVMLVQSPNCLDILLVTVQNKLTTPSTSSSRGDATVRQLARLKSKGSRKIISSAASANGTLLAYSDGVRPCLFALRHKGGKKYTLDKLELPKGLPCSQSMVFTVDSSNLILAGRNGKIYIIDIATREISNVFHPTRKADGAKISRESPITKMFLSADGQWLAAVNCYGDIYVFNLEVQRQHWFISRMNGGSVTSGGFCPKNNTLVITTSKNEVYVFDVEAKQLGEWSKRYTHQLPRSFQEFPGEVIGLSFPPQSSSSVVVYSTRAMCNIDFGLPVVEDVGLPNGSGGPAEKAD

SEQ ID NO: 35871 - protein, 340 aa, Zea mays subsp. mays
MLISGGDDTKLFAYSAREFTQFAPHNFCPAPQRPLIKMARDSTVNGDSVMLVQSPNCLDILLVTVQNKLTTPSTSSSRGDATVRQLARLKSKGSRKIISSAASANGTLLAYSDGVRPCLFALRHKGGKKYTLDKLELPKGLPCSQSMVFTVDSSNLILAGRNGKIYIIDIATREISNVFHPTRKADGAKISRESPITKMFLSADGQWLAAVNCYGDIYVFNLEVQRQHWFISRMNGGSVTSGGFCPKNNTLVITTSKNEVYVFDVEAKQLGEWSKRYTHQLPRSFQEFPGEVIGLSFPPQSSSSVVVYSTRAMCNIDFGLPVVEDVGLPNGSGGPAEKAD

SEQ ID NO: 35872 - protein, 303 aa, Zea mays subsp. mays
MARDSTVNGDSVMLVQSPNCLDILLVTVQNKLTTPSTSSSRGDATVRQLARLKSKGSRKIISSAASANGTLLAYSDGVRPCLFALRHKGGKKYTLDKLELPKGLPCSQSMVFTVDSSNLILAGRNGKIYIIDIATREISNVFHPTRKADGAKISRESPITKMFLSADGQWLAAVNCYGDIYVFNLEVQRQHWFISRMNGGSVTSGGFCPKNNTLVITTSKNEVYVFDVEAKQLGEWSKRYTHQLPRSFQEFPGEVIGLSFPPQSSSSVVVYSTRAMCNIDFGLPVVEDVGLPNGSGGPAEKAD

SEQ ID NO: 35873 - DNA, 1423 bp, Zea mays subsp. mays
caaccccgcacgcacaactggccgcgccaaggcaaagctagaagaagacaacgcaaagggagaggacagaggaggagcagaggacgatgggcagcggcggcgctaacactgcccccctcctcaccccctacaagatgggaaaattcgatgttacccacagggtagtcctcgcaccactgacgagacagcggtcctacggcaacgttccccagcctcatgccatactgtactatcagcagagggcgactaaaggaggtcttctgatcgctgaggccacgggggtttcagacactgctcaagggtacaaggacactcctggcatttggacccatgagcaagtcgaagcatggaagccgatcgtagacggggttcaccagaaaggagggatatttttctgtcagatttggcacgtagggagagtctccaattccacgtttcagcctaatgggcaggctccaatttcaagcaccgataagccactaaagcctcaagtgagagccaatggtatagacgtggctactttcgcagttcctagacgcttagagactgatgaaatccctttggtcgtcaatgatttcagggtagctgctcgaaatgcgattgaagctggatttgatggtgtcgaaatccatggagctcacggttacctgattgatcagtttctaaaggacggggtcaacgaccgcacagacaaatacggtggcagtctggagaaccgctgccggtttgcactggaagtaactcaagccgtggtcgacgaaattggagctgacaaggtcgggataaggctgtcaccattcgctagctactcggaggcgccggactcggacccggaagctctgggcctgtacatggcgaacgcgctgaacgagttcgggattctctactgccacatcgtggagccgcggatggtgaaactcggtgaaaagttcgaaaccccctacagccttcgcccgataagggacgctttcaggggaacgttcatcgttgccggcggctacggcagggaggatgggaatcgagcgatctccactgggtatgctgatttggtcgcgttcgggcgcttgttcttggctaatcctgacctgcctcggaggttcgaagtagacgctccccttaacaagtacaacagagacacgttttacatccctgatccggttgttggatacactgactacccatttctttcgtcagatgtataaatgttctcttttcagcaatctgctttttagattgtgtagtaactggttggtgtaccagtaaattattagaggaataaaccattggtctgaatgcctcattctcatatatatggacaaaagcaatatgatcgttgtaattgtgcctcaaatcttatagttgtaaaaaatattgtgaagaagctcagtcagttgtcattgtaaaaaatattgtgaagaagctc

SEQ ID NO: 35874 - protein, 371 aa, Zea mays subsp. mays
MGSGGANTAPLLTPYKMGKFDVTHRVVLAPLTRQRSYGNVPQPHAILYYQQRATKGGLLIAEATGVSDTAQGYKDTPGIWTHEQVEAWKPIVDGVHQKGGIFFCQIWHVGRVSNSTFQPNGQAPISSTDKPLKPQVRANGIDVATFAVPRRLETDEIPLVVNDFRVAARNAIEAGFDGVEIHGAHGYLIDQFLKDGVNDRTDKYGGSLENRCRFALEVTQAVVDEIGADKVGIRLSPFASYSEAPDSDPEALGLYMANALNEFGILYCHIVEPRMVKLGEKFETPYSLRPIRDAFRGTFIVAGGYGREDGNRAISTGYADLVAFGRLFLANPDLPRRFEVDAPLNKYNRDTFYIPDPVVGYTDYPFLSSDV

SEQ ID NO: 35875 - protein, 355 aa, Zea mays subsp. mays
MGKFDVTHRVVLAPLTRQRSYGNVPQPHAILYYQQRATKGGLLIAEATGVSDTAQGYKDTPGIWTHEQVEAWKPIVDGVHQKGGIFFCQIWHVGRVSNSTFQPNGQAPISSTDKPLKPQVRANGIDVATFAVPRRLETDEIPLVVNDFRVAARNAIEAGFDGVEIHGAHGYLIDQFLKDGVNDRTDKYGGSLENRCRFALEVTQAVVDEIGADKVGIRLSPFASYSEAPDSDPEALGLYMANALNEFGILYCHIVEPRMVKLGEKFETPYSLRPIRDAFRGTFIVAGGYGREDGNRAISTGYADLVAFGRLFLANPDLPRRFEVDAPLNKYNRDTFYIPDPVVGYTDYPFLSSDV

SEQ ID NO: 35876 - DNA, 556 bp, Zea mays subsp. mays
agtctaatcactattgcagtcggcttctctaatactgggccactggtttcgctccgcacttccgccgctatggccgccgcaaccttctccgccgccggccgccggctcctctccaccgccgcggcagcggcagagaaaaccgagctccccgtccctatcgcccgtcttcgccagctcgcccgcgctggccgcctcgacgacatcgacgcgactctcgcgcccctgttcccttcccaccccgtcgccgcgctctcggccctctccacggtgggcctccccgaccgcgcctccgcgctgctcggcaccatgacgtcgcccaataccgcgcacctgaacgcggtcctcggtccactcctccgccgccgccgcctggccgggctcgtgccctcaatcctcgccgcgcatgcctctgtcccgcgggacgccgtcacggacagcatcctcaccaagtcgctctgcctcacctcgggcgccgactccgcgctccacctcctccggaagccttcgtcgggagcgccgccgtcgctccagctcttcacaaccatcatcgactcct

SEQ ID NO: 35877 - protein, 185 aa, Zea mays subsp. mays
SLITIAVGFSNTGPLVSLRTSAAMAAATFSAAGRRLLSTAAAAAEKTELPVPIARLRQLARAGRLDDIDATLAPLFPSHPVAALSALSTVGLPDRASALLGTMTSPNTAHLNAVLGPLLRRRRLAGLVPSILAAHASVPRDAVTDSILTKSLCLTSGADSALHLLRKPSSGAPPSLQLFTTIIDS

SEQ ID NO: 35878 - protein, 162 aa, Zea mays subsp. mays
MAAATFSAAGRRLLSTAAAAAEKTELPVPIARLRQLARAGRLDDIDATLAPLFPSHPVAALSALSTVGLPDRASALLGTMTSPNTAHLNAVLGPLLRRRRLAGLVPSILAAHASVPRDAVTDSILTKSLCLTSGADSALHLLRKPSSGAPPSLQLFTTIIDS

SEQ ID NO: 35879 - DNA, 1517 bp, Zea mays subsp. mays
agccacacaagcaaagaacttggccccgcctcccgtctcttaccgcacatgcgcgtcgggccgcgtcgacatagctgcttgccgccgacacccgcagccgcaatggccgtcgcccacgcgccgccgcgccggggcgtgctccccctcctgctcgtcgccgcgctcgtggcggcgttgccggccacctgcgccgcggccaggagcaagaagtcgtacacggccatcttcagcttcggggactcgctctccgacgccggcaacctcatcgtcaacggcacgcccaaggcgctcaccaccgcgcgccctccctacgggatgaccttcttccgcaagcccaccggccgctgctccaacggccgcctcgtcgtcgacttcctggccgagcatttcgggctgccactgccgccaccgtcgcaggccaagggcaaggacttcaagaagggcgccaacttcgccatcaccggcgcgacggccctggagtactccttcttcaaggcgcacggcatcgaccagcgcatctggaacaccggctccatcaacacccagatcggctggctccaggacatgaagccgtccctctgtaaatcggagcaagactgcaaggattacttcagcaaatccctgttcgtcgtcggggagttcgggggcaacgactacaacgcgccgctcttctccggcgtcccattttctgatgtcaagacttacgtgccccttgttgcaaaggctatcgccaatggcgttgagaaactgatcgagcttggggcaacagacctcctggtgcctggcgttctcccaattggctgcttcccgttgtacctgacgctgtacaacaccagcagcaaagcagattacaacgcccggaccgggtgccttcggaggtacaaccgcctggccttccaccacaacagggagctgaagcagcagcttgacgagcttcagaagaagtaccccaagacgaagatcatgtatggagattacttcaaggctgcactgcagtttgtcgtcaaccctgggaaatttggtttcagcacggctttgcaagcgtgctgcggcgccggagggcagggcaactacaacttcaacctgaagaagaagtgtggcgagcagggcgcgagcgtgtgctccaacccgtcgtcgtacgtgagctgggatggcatccacatgaccgaagctgcgtacagaaaggtcgccgatggctggttgaatggcccgtatgctcagcccccaattctcaagtcatgatcgagattactaggctgtgcgtaacaccgccgcagctgcatgctgcggctagagatatatatgaggagtgtttcaggcaatagatatgctaagttatggtaaagctatttggtctgttcattggaagatctgtataaactgcgccggtatagatatgttcccagctgaaatggctctagcacagatgtgcatggcatgttctctgattcttttcatttgttctaaaaaaatattgcggcagtaatatgagttgataaaagtaactaaatttctgc

SEQ ID NO: 35880 - protein, 413 aa, Zea mays subsp. mays
SHTSKELGPASRLLPHMRVGPRRHSCLPPTPAAAMAVAHAPPRRGVLPLLLVAALVAALPATCAAARSKKSYTAIFSFGDSLSDAGNLIVNGTPKALTTARPPYGMTFFRKPTGRCSNGRLVVDFLAEHFGLPLPPPSQAKGKDFKKGANFAITGATALEYSFFKAHGIDQRIWNTGSINTQIGWLQDMKPSLCKSEQDCKDYFSKSLFVVGEFGGNDYNAPLFSGVPFSDVKTYVPLVAKAIANGVEKLIELGATDLLVPGVLPIGCFPLYLTLYNTSSKADYNARTGCLRRYNRLAFHHNRELKQQLDELQKKYPKTKIMYGDYFKAALQFVVNPGKFGFSTALQACCGAGGQGNYNFNLKKKCGEQGASVCSNPSSYVSWDGIHMTEAAYRKVADGWLNGPYAQPPILKS

SEQ ID NO: 35881 - protein, 397 aa, Zea mays subsp. mays
MRVGPRRHSCLPPTPAAAMAVAHAPPRRGVLPLLLVAALVAALPATCAAARSKKSYTAIFSFGDSLSDAGNLIVNGTPKALTTARPPYGMTFFRKPTGRCSNGRLVVDFLAEHFGLPLPPPSQAKGKDFKKGANFAITGATALEYSFFKAHGIDQRIWNTGSINTQIGWLQDMKPSLCKSEQDCKDYFSKSLFVVGEFGGNDYNAPLFSGVPFSDVKTYVPLVAKAIANGVEKLIELGATDLLVPGVLPIGCFPLYLTLYNTSSKADYNARTGCLRRYNRLAFHHNRELKQQLDELQKKYPKTKIMYGDYFKAALQFVVNPGKFGFSTALQACCGAGGQGNYNFNLKKKCGEQGASVCSNPSSYVSWDGIHMTEAAYRKVADGWLNGPYAQPPILKS

SEQ ID NO: 35882 - protein, 379 aa, Zea mays subsp. mays
MAVAHAPPRRGVLPLLLVAALVAALPATCAAARSKKSYTAIFSFGDSLSDAGNLIVNGTPKALTTARPPYGMTFFRKPTGRCSNGRLVVDFLAEHFGLPLPPPSQAKGKDFKKGANFAITGATALEYSFFKAHGIDQRIWNTGSINTQIGWLQDMKPSLCKSEQDCKDYFSKSLFVVGEFGGNDYNAPLFSGVPFSDVKTYVPLVAKAIANGVEKLIELGATDLLVPGVLPIGCFPLYLTLYNTSSKADYNARTGCLRRYNRLAFHHNRELKQQLDELQKKYPKTKIMYGDYFKAALQFVVNPGKFGFSTALQACCGAGGQGNYNFNLKKKCGEQGASVCSNPSSYVSWDGIHMTEAAYRKVADGWLNGPYAQPPILKS

SEQ ID NO: 35883 - DNA, 1160 bp, Zea mays subsp. mays
attccccccgaaccgcaaagcggagtccggattgcagttgcttcggcccatccggccgtcacatcagccacacgccgccgcgccagtcgccgcacgagggggcccgtgatgccgaagaagatgggcgtgaactccaaggcggaggcggcccgcgaccgccgctccgccgcggaggccgaccgccgcgaccgccaggagcgcgccaaggaggagcagtactgggccgaggctgagggccccaagtcccgcgctgcgcgccgccgtgaggaggacgccgagaagcgcgccgaggccgcggctcgcaaggccgagaaccgccgcctcgccgaggcagaggccgccgccgtcgccgcttccgcatcggcgccgtccaaggccgccgcgcgcaaggcgtcccgcgttgccgctccgccccccaaggttaccgaggccgagctcgtgcgcctccgaggaggagcggctccgcctcgagcgggaggcagaggccgccaagaagcgcgccgcgcgggtcgccgaggaggaggagtacgagcgcgtagtcctcgtcgaaaacactaacagggatgattccctcatcgaggccaggtcggttgaggaggctatcgcgcggatgtcggtcgtggatccgcaggcgtccctgccccgctgacaagcatcctgagcgtcgcctcaagtcgacctttaaggcatttgaagaggcagagctccctaagctgaaggaagaaaagccaggtctaacgctgcaccaatacaaagacatgatatggaaactgtggaagaagtccccagacaaccctcttaaccaggctgctgactgaattttgcaaccctactgaatcttatgtaaaggccaaccttcaaacagcactggattggtgaattgtgttggtacctttttcttggagtggatgcgcaccaaaccttgaatcagaaaggtgttccagtctcggctaataatttccaaatcactggagtgtatactgtgggaggtgctcttgtttagactcgactagtcgagtttcctttttgtgtttagtatgatggttgggcacgtgctggtaccgaacgtgcttcactcattatagtattttgattcttgaacaaattgtgtgttgggctaaaccatgatatatctatccattgagttacgaaggccgcct

SEQ ID NO: 35884 - protein, 185 aa, Zea mays subsp. mays
IPPEPQSGVRIAVASAHPAVTSATRRRASRRTRGPVMPKKMGVNSKAEAARDRRSAAEADRRDRQERAKEEQYWAEAEGPKSRAARRREEDAEKRAEAAARKAENRRLAEAEAAAVAASASAPSKAAARKASRVAAPPPKVTEAELVRLRGGAAPPRAGGRGRQEARRAGRRGGGVRARSPRRKH

SEQ ID NO: 35885 - protein, 149 aa, Zea mays subsp. mays
MPKKMGVNSKAEAARDRRSAAEADRRDRQERAKEEQYWAEAEGPKSRAARRREEDAEKRAEAAARKAENRRLAEAEAAAVAASASAPSKAAARKASRVAAPPPKVTEAELVRLRGGAAPPRAGGRGRQEARRAGRRGGGVRARSPRRKH

SEQ ID NO: 35886 - protein, 145 aa, Zea mays subsp. mays
MGVNSKAEAARDRRSAAEADRRDRQERAKEEQYWAEAEGPKSRAARRREEDAEKRAEAAARKAENRRLAEAEAAAVAASASAPSKAAARKASRVAAPPPKVTEAELVRLRGGAAPPRAGGRGRQEARRAGRRGGGVRARSPRRKH

SEQ ID NO: 35887 - DNA, 958 bp, Zea mays subsp. mays
aaaatttcccccccaatttccctccaccgaagcatcacccaatcagatccgatttcgtagagatgaagccggcagtagaggcggaggctgacgagcgagcggcggaggagatggcacctaagaaggcagcggctgccaagaaagcggccgaggaagttgaggtggaggaggtggtggacggggacgaggcggtcgatggggagggcgacggtgacgaggacgacgatggggaaggcggtgacgaggaggatgatgatgaggaggtggatggggaggagaaggaggcggcaggggttgtggagatctccgacgaagacgacgacgacggtgacggggaggcggacgacgacgacgacgatgacggggatgacgacgacgacgacgacgaggactcagacgacgaggaagaggtcgacggtgaagacgatcaggaggaggagctgggaaccgagtatctggttcagcctcttgggcgggctgaagacgaagagcactcgagcgactttgaaccggaagaaaacggtgagggtgccgacgatgaggagatcgatgaagaggacgatgacggtgaggactctgtgaaggcgcagacctctacgaagaggaagaggtcaggcgacgaagaagaagaagacgacgacgatggggatgatgatggtgacgatgatgacgatgggaggccaccatcaaagcgatagtatggttagctctagttttgtagctgtgtccttgggtgtttggtaggtaggtagtgctgctgatgttggtttagaagaactcatcatcacctgggatatgtgtgtgatttggcttggccgatggatgaatgatgaaggtcttgtacttgttgctgcttctttcatgttgatgaactcgcactgattcactgtacatgctagcttctaattgtctgtctagacagctttatgggtttaactagaatcggatttttttccct

SEQ ID NO: 35888 - protein, 231 aa, Zea mays subsp. mays
NFPPNFPPPKHHPIRSDFVEMKPAVEAEADERAAEEMAPKKAAAAKKAAEEVEVEEVVDGDEAVDGEGDGDEDDDGEGGDEEDDDEEVDGEEKEAAGVVEISDEDDDDGDGEADDDDDDDGDDDDDDDEDSDDEEEVDGEDDQEEELGTEYLVQPLGRAEDEEHSSDFEPEENGEGADDEEIDEEDDDGEDSVKAQTSTKRKRSGDEEEEDDDDGDDDGDDDDDGRPPSKR

SEQ ID NO: 35889 - protein, 211 aa, Zea mays subsp. mays
MKPAVEAEADERAAEEMAPKKAAAAKKAAEEVEVEEVVDGDEAVDGEGDGDEDDDGEGGDEEDDDEEVDGEEKEAAGVVEISDEDDDDGDGEADDDDDDDGDDDDDDDEDSDDEEEVDGEDDQEEELGTEYLVQPLGRAEDEEHSSDFEPEENGEGADDEEIDEEDDDGEDSVKAQTSTKRKRSGDEEEEDDDDGDDDGDDDDDGRPPSKR

SEQ ID NO: 35890 - protein, 195 aa, Zea mays subsp. mays
MAPKKAAAAKKAAEEVEVEEVVDGDEAVDGEGDGDEDDDGEGGDEEDDDEEVDGEEKEAAGVVEISDEDDDDGDGEADDDDDDDGDDDDDDDEDSDDEEEVDGEDDQEEELGTEYLVQPLGRAEDEEHSSDFEPEENGEGADDEEIDEEDDDGEDSVKAQTSTKRKRSGDEEEEDDDDGDDDGDDDDDGRPPSKR

SEQ ID NO: 35891 - DNA, 1100 bp, Zea mays subsp. mays
  misc_feature (579)..(579): n is a, c, g, or t
  misc_feature (620)..(620): n is a, c, g, or t
  misc_feature (854)..(854): n is a, c, g, or t
  misc_feature (902)..(902): n is a, c, g, or t
  misc_feature (929)..(929): n is a, c, g, or t
  misc_feature (955)..(955): n is a, c, g, or t
aacaggtgtcccagccgcgcgccgcacgccctgttgccttctctcgacttcgagagcaccgccgcacggcataacgctcgcacggccgagccccgacattctaccgcactccctccgctgcacccctttccattctaccgccggcgacgccaaagttcttgggcctcctcatcggcgacttttccgccggcgacaggaaacaacgaaccaaaccacttctctgtcgagaggcgtcgcgctcctctcttcgccctctgctgttatttttcttaacccggctttctctcgattgctgcgtaaagttgaagatgaggaagctcaagttccatgagcagaagctcctcaagaggcacaatttcttggagtacaagagggagggcggccaccgcgaggcgctcgtcacacagcgctaccgcctcgtggagagggacgactacaagaagtacaatgggatatgcttaatggtgcaaaagctcgttaacatcataaagcagatggacccaagagaccctttcagaatccagatgacagacttgattctcgataagctgtataatatgggtgtaatttcaacaaaanagagcttgttaaagtgtgagaaactttcagtgagcgccttntgcaggcggagacttgcaacagttatggtgaagctcaagtttgcagagcaccttaaggaggctgtgacgtacatcgaacaggggcatgtgcgtgtcggtccagatgcagtcacggacccagcctttcttgtgaccagaaacatggaggacttcatcacctgggtggattcctcaaagatcaagaggaaggtcatggagtacaatgatgcattagatgattatgatgccatgttntgagaaaataattctgcagaaatttatgtgcccgtcagtaatgtaatnttaagcctgccacatatgggtcttttntgaacaaatctgtgggagttgtcttntgcagggctacttgcatttgtattgcacctgcagatgtgatgcaattttgtggttggttgaaggcacattataaattcatatctgatgtagttgtgcaattgtctttgttaaagagcgggtttgcccggatttcccctagtctgc

SEQ ID NO: 35892 - protein, 182 aa, Zea mays subsp. mays
  misc_feature (91)..(91): Xaa can be any naturally occurring amino acid
  misc_feature (104)..(104): Xaa can be any naturally occurring amino acid
  misc_feature (182)..(182): Xaa can be any naturally occurring amino acid
MRKLKFHEQKLLKRHNFLEYKREGGHREALVTQRYRLVERDDYKKYNGICLMVQKLVNIIKQMDPRDPFRIQMTDLILDKLYNMGVISTKXSLLKCEKLSVSAXCRRRLATVMVKLKFAEHLKEAVTYIEQGHVRVGPDAVTDPAFLVTRNMEDFITWVDSSKIKRKVMEYNDALDDYDAMX

SEQ ID NO: 35893 - protein, 131 aa, Zea mays subsp. mays
  misc_feature (40)..(40): Xaa can be any naturally occurring amino acid
  misc_feature (53)..(53): Xaa can be any naturally occurring amino acid
  misc_feature (131)..(131): Xaa can be any naturally occurring amino acid
MVQKLVNIIKQMDPRDPFRIQMTDLILDKLYNMGVISTKXSLLKCEKLSVSAXCRRRLATVMVKLKFAEHLKEAVTYIEQGHVRVGPDAVTDPAFLVTRNMEDFITWVDSSKIKRKVMEYNDALDDYDAMX

SEQ ID NO: 35894 - protein, 120 aa, Zea mays subsp. mays
  misc_feature (29)..(29): Xaa can be any naturally occurring amino acid
  misc_feature (42)..(42): Xaa can be any naturally occurring amino acid
  misc_feature (120)..(120): Xaa can be any naturally occurring amino acid
MDPRDPFRIQMTDLILDKLYNMGVISTKXSLLKCEKLSVSAXCRRRLATVMVKLKFAEHLKEAVTYIEQGHVRVGPDAVTDPAFLVTRNMEDFITWVDSSKIKRKVMEYNDALDDYDAMX

SEQ ID NO: 35895 - DNA, 1674 bp, Zea mays subsp. mays
aaatcgcggtcactgctccgaagtccgaaccttcatacacatcgtctcgtttccgatttccccaaattcaggccacaggcgctacaggacccaggcaccactcggtcggcggccaccgcgtcgccccgcctgctcgattggggtcgcgtgtgcgataggaagtattgtgttgtgtttgcaacgtgatagcttgtactgggaacaaaggtcaagatgggcgccttggacctacaccttgactttgcttctgctcaacatggacaagccaagttaaaggaatatgccaagagctctctgttgtctgatggaaactacaatacagacaagatcaatggttcaaaccctgatgactatgagaaatttgagaaagggataatgcactatgggtgtccacattatagaaggagatgccgcataagagctccttgctgcaatgaaatttttgattgccgacactgccacaatgaaactaagaattccattaaaattgataaaatgaagaggcatgaacttccacgccatgaagtgcagcaggttgtatgctcattgtgtggcactgaacaggaggtgcgacaagtatgtatcaattgcggtgtttgcatggggaagtacttctgtggtttgtgcaaactcttcgacgatgatgtctctaaacagcagtatcactgcaacggatgtggaatatgtagaatcggagggagggagaatttcttccactgttcaaaatgtggatgttgctattcaattgcgctgaagaatagtcatgcatgtgttgaaggggcgatgcatcatgactgtccaatctgcttcgagtacttgttcgattcgacaaatgatgtttccgtcctgccttgtggtcataccattcatgtaaagtgcctgaaagaaatggaagagcactgccagtttgcatgccccctttgctccaagtcggtttgtgacatgtcgaaggcatgggaaaggctcgacatggagctggcaactctgtctgactcctgtgatcacaaaatggtccgcatattatgcaacgactgcggggcaatatcagatgtgcagttccatttgattgcgcacaagtgccagaattgcaagtcatacaacacccgccagatttgaagtaagaatcgcaagtcacacaacaccgtcagatctgaaatagcaaatcctgtgggggtttctgcatttcttcaagaagcgtgatggactgatggccccttcccgtgagctgctgagcaccgggatgtctggcaagacactcatcactgtatccactccactgggtcctgcggaggcaaacagctcgagattgtatatctgctgctagctgccgcccttcgttatgcataagcctactcttgccgttttactcctgtcgctccgtgattctagtgtaataatgttatatttagtgctgcttcaagcgtacggctgcggttgaacggcggcggcggctgctgagccacagtaccttgctgttgctgagactgcacccagccacagtgcgccgccgccgcagcagcttgtagctggactttatgaaggtgcctttgttccgcaaggaagagttcttggttgcgggtagctattaaggccatctccaatagatgtcctattatatcccttatttcatcctctatttcaaactttatataaatagtattaaatatctcatct

SEQ ID NO: 35896 - protein, 300 aa, Zea mays subsp. mays
MGALDLHLDFASAQHGQAKLKEYAKSSLLSDGNYNTDKINGSNPDDYEKFEKGIMHYGCPHYRRRCRIRAPCCNEIFDCRHCHNETKNSIKIDKMKRHELPRHEVQQVVCSLCGTEQEVRQVCINCGVCMGKYFCGLCKLFDDDVSKQQYHCNGCGICRIGGRENFFHCSKCGCCYSIALKNSHACVEGAMHHDCPICFEYLFDSTNDVSVLPCGHTIHVKCLKEMEEHCQFACPLCSKSVCDMSKAWERLDMELATLSDSCDHKMVRILCNDCGAISDVQFHLIAHKCQNCKSYNTRQI

SEQ ID NO: 35897 - protein, 246 aa, Zea mays subsp. mays
MHYGCPHYRRRCRIRAPCCNEIFDCRHCHNETKNSIKIDKMKRHELPRHEVQQVVCSLCGTEQEVRQVCINCGVCMGKYFCGLCKLFDDDVSKQQYHCNGCGICRIGGRENFFHCSKCGCCYSIALKNSHACVEGAMHHDCPICFEYLFDSTNDVSVLPCGHTIHVKCLKEMEEHCQFACPLCSKSVCDMSKAWERLDMELATLSDSCDHKMVRILCNDCGAISDVQFHLIAHKCQNCKSYNTRQI

SEQ ID NO: 35898 - protein, 206 aa, Zea mays subsp. mays
MKRHELPRHEVQQVVCSLCGTEQEVRQVCINCGVCMGKYFCGLCKLFDDDVSKQQYHCNGCGICRIGGRENFFHCSKCGCCYSIALKNSHACVEGAMHHDCPICFEYLFDSTNDVSVLPCGHTIHVKCLKEMEEHCQFACPLCSKSVCDMSKAWERLDMELATLSDSCDHKMVRILCNDCGAISDVQFHLIAHKCQNCKSYNTRQI

SEQ ID NO: 35899 - DNA, 1533 bp, Zea mays subsp. mays
cctaatcgaaaaactccactcctaaatccaaagcaaatccgaaagcaccacgaaacacggcggcagcagcctgcgtgcctgcctgcctatccaccccctcctccagcctccgcctccgacacccccgcgcgccctcgcgcggacaaagccgtaaggggcagagccgagggaggcggggctgtgccggcctcgcaatgcagcagccggagcctgccgatctgccgggctgggccttccagccacgggcggcgccggcgcctgccgccgcgcgcggggcgcaccaccgccgggccagatctgaggttgccttccgcctgccggacgacctcggcctcggcggcggcgccggccccgatggcgacgccttcgacgagatcggctcggaggacgacctcttctccaccttcatggacatcgagaagatctccacctccgggccctccgaccgcgccgccgagaactcgtctccgccgcgccccaagcaccgccacagcagctccgtcgatggctcgggcttcttcttctcacccggcgccggcggtggcgcggggaaggatgcagcggcgtcgctggctgaggtcttggaggccaagaagtccatgactcccgagcaactggccgagctcgccgccatcgaccccaagcgcgccaagagaattctagccaacagacaatcagcagctagatcaaaagaaagaaaggctcgttatatgacagaccttgagcggaaggtccaaactcttcagactgaagccaccaccctgtcagctcaacttacactatttcagagggacacgaccggactttctacagaaaatgcagagcttaagataaggttacaggccatggaacaacaggctcaactccgtgatgctctgaatgatgcactaaagcaggagctggagaggcttaaacatgctactggtgagatgaccaattccagcgaggcatataacatgagattccaacatgttccatacaattcttccttcttcccgctttcccagcaaaatgcatccccacaccttggtagcacccagctgccactgccgttccacccaccccatcccaacgtgccaaaccaccagatgcgaaacactctcccggacataatgcagcaagagtctctcggacggctgcagggtttggacattgggaaggggcctctggttgtgaagttagagagcagctcgatctctgcaagtgaaagcagcagcaccttctaacgaggcctacaagtgaaaacccaccgtttcagtaggttccattgttcatagtagcctgacatccttgtgctgcttcctgctctgtaagcccatttgttatttaattcattcatttagttgaaattatacgctgtcgcactggctgatcaatcatgttgtagaatggtccaggaacccttcaattatgtttgttttgggctcgtttcctgtttctgtgactggtatcatcagggcatttgggttttggagtgaaattctctagtggtaacaactaaaaaaaaaaagcttatctataccgtcaacctct

SEQ ID NO: 35900 - protein, 343 aa, Zea mays subsp. mays
MQQPEPADLPGWAFQPRAAPAPAAARGAHHRRARSEVAFRLPDDLGLGGGAGPDGDAFDEIGSEDDLFSTFMDIEKISTSGPSDRAAENSSPPRPKHRHSSSVDGSGFFFSPGAGGGAGKDAAASLAEVLEAKKSMTPEQLAELAAIDPKRAKRILANRQSAARSKERKARYMTDLERKVQTLQTEATTLSAQLTLFQRDTTGLSTENAELKIRLQAMEQQAQLRDALNDALKQELERLKHATGEMTNSSEAYNMRFQHVPYNSSFFPLSQQNASPHLGSTQLPLPFHPPHPNVPNHQMRNTLPDIMQQESLGRLQGLDIGKGPLVVKLESSSISASESSSTF

SEQ ID NO: 35901 - protein, 272 aa, Zea mays subsp. mays
MDIEKISTSGPSDRAAENSSPPRPKHRHSSSVDGSGFFFSPGAGGGAGKDAAASLAEVLEAKKSMTPEQLAELAAIDPKRAKRILANRQSAARSKERKARYMTDLERKVQTLQTEATTLSAQLTLFQRDTTGLSTENAELKIRLQAMEQQAQLRDALNDALKQELERLKHATGEMTNSSEAYNMRFQHVPYNSSFFPLSQQNASPHLGSTQLPLPFHPPHPNVPNHQMRNTLPDIMQQESLGRLQGLDIGKGPLVVKLESSSISASESSSTF

SEQ ID NO: 35902 - protein, 208 aa, Zea mays subsp. mays
MTPEQLAELAAIDPKRAKRILANRQSAARSKERKARYMTDLERKVQTLQTEATTLSAQLTLFQRDTTGLSTENAELKIRLQAMEQQAQLRDALNDALKQELERLKHATGEMTNSSEAYNMRFQHVPYNSSFFPLSQQNASPHLGSTQLPLPFHPPHPNVPNHQMRNTLPDIMQQESLGRLQGLDIGKGPLVVKLESSSISASESSSTF

SEQ ID NO: 35903 - DNA, 784 bp, Zea mays subsp. mays
  misc_feature (274)..(275): n is a, c, g, or t
  misc_feature (284)..(284): n is a, c, g, or t
  misc_feature (286)..(286): n is a, c, g, or t
  misc_feature (288)..(288): n is a, c, g, or t
  misc_feature (698)..(701): n is a, c, g, or t
gcccaaatcccccgactcctcgcttcctcccgttccgtcgccgccgcgcgcctcggagaagagatagaggcggccgctgcatcgaccccgcgccacctccgcctgccccccccgcaccgatcgggtttgatcgatggcggcactggcggaggcgctggtgcaggaggtggcgctggaggcggctatggcggaggtgccggtgcaggaggcggctatggtggaggagctggtggtggatacggtggaggtgcaggaggtggcgccggagccggannccttacggngnangagctggtggtggtgccggtggtggctacggcggaggcgctggtggaggctacggtggtggtgctggctctggcggcggcggtggttatggtgctggtggcggaggtggaggtggcatcggcggcggtgtctgaatcagcgtctcacatgcatgcatggtggtgcaagcagaagcaagtgctcgagtgcgtctgacgaactcgctctggtattcccttcgcaggcgtgcgtggacgtggagtcgagcacttgcttctgtggacagcgtcattagcatgtgtgtgctataccgatcgatatccgaatcatactctctgcgtagcgaatagcgatcatagtaataacagaataaggatgctgcaatacgtctaatcagtcatcattatacgatggtttatacggtatatatnnnngcgttggtagcaagctgaaagattactttgtatcgtactattttaatcatattttgtggagataaagaaattattatgagctt

SEQ ID NO: 35904 - protein, 160 aa, Zea mays subsp. mays
  misc_feature (92)..(92): Xaa can be any naturally occurring amino acid
  misc_feature (95)..(96): Xaa can be any naturally occurring amino acid
AQIPRLLASSRSVAAARLGEEIEAAAASTPRHLRLPPPHRSGLIDGGTGGGAGAGGGAGGGYGGGAGAGGGYGGGAGGGYGGGAGGGAGAGXLTXXELVVVPVVATAEALVEATVVVLALAAAVVMVLVAEVEVASAAVSESASHMHAWWCKQKQVLECV

SEQ ID NO: 35905 - protein, 142 aa, Zea mays subsp. mays
  misc_feature (47)..(48): Xaa can be any naturally occurring amino acid
  misc_feature (51)..(52): Xaa can be any naturally occurring amino acid
MAALAEALVQEVALEAAMAEVPVQEAAMVEELVVDTVEVQEVAPEPXXLRXXSWWWCRWWLRRRRWWRLRWWCWLWRRRWLWCWWRRWRWHRRRCLNQRLTCMHGGASRSKCSSASDELALVFPSQACVDVESSTCFCGQRH

SEQ ID NO: 35906 - protein, 139 aa, Zea mays subsp. mays
  misc_feature (91)..(91): Xaa can be any naturally occurring amino acid
  misc_feature (94)..(96): Xaa can be any naturally occurring amino acid
PNPPTPRFLPFRRRRAPRRRDRGGRCIDPAPPPPAPPAPIGFDRWRHWRRRWCRRWRWRRLWRRCRCRRRLWWRSWWWIRWRCRRWRRSRXPYXXXAGGGAGGGYGGGAGGGYGGGAGSGGGGGYGAGGGGGGGIGGGV

SEQ ID NO: 35907 - DNA, 407 bp, Zea mays subsp. mays
gcaagtgtgccatattccagctaggcaaatggcttcttcaaggatacttgctcagcaactccaccagtctctcggaggtggagggggcggtggaggtggaggtggaggaggaggaggaggaggcgggggtggaggaaactagattgccttgttgctcatcacttgtctctgtttcaatcgtttcaatcatctgggatggtggaggtagccgtatctatgttcatgtttatggccaagccatgcatgtttatgcatgcatgtgtgtagtgcaaagatgaataaggacgtcgagctaaatctatgcaaccctcgacgtggtgtgattgtattttgtattttgaatcttgtgaagcatgtgtgtgtgtgtcatgtactcagttatattatgtggtgctctcacattacat

SEQ ID NO: 35908 - protein, 91 aa, Zea mays subsp. mays
KCAIFQLGKWLLQGYLLSNSTSLSEVEGAVEVEVEEEEEEAGVEETRLPCCSSLVSVSIVSIIWDGGGSRIYVHVYGQAMHVYACMCVVQR

SEQ ID NO: 35909 - protein, 51 aa, Zea mays subsp. mays
MHVCSAKMNKDVELNLCNPRRGVIVFCILNLVKHVCVCHVLSYIMWCSHIT

SEQ ID NO: 35910 - protein, 46 aa, Zea mays subsp. mays
QVCHIPARQMASSRILAQQLHQSLGGGGGGGGGGGGGGGGGGGGGN

SEQ ID NO: 35911 - DNA, 446 bp, Zea mays subsp. mays
  misc_feature (274)..(274): n is a, c, g, or t
  misc_feature (425)..(425): n is a, c, g, or t
accatcccatcctccatcgcgagagacaccccatggcgtccttctgccgcgccgccgccgccgccggggcgaggtcagcggcgctccgctcgaggtccccgacggcgagaccgttcttggcggctacgtctcctgtcgcgccgccacgcttccacaggcccctcgtggcggcggcggcggcgctggcgagtctggagtcgctcgtgccgctgcacagcgcggtggccgccgcgcggctgcggtcctgcatcgccgccggctccgcgtcctgganctgcctctcccaaggtttgaccaagcgcatctgaccatggctagggccaaaaaaaatgctaaagagactggctcatgcactagtgcatcactatttcatgtttcagtatctttgtgttgttctgtaagggttatctgtcagcgttcagatnctgattccgttactcgatgga

SEQ ID NO: 35912 - protein, 148 aa, Zea mays subsp. mays
  misc_feature (91)..(91): Xaa can be any naturally occurring amino acid
  misc_feature (142)..(142): Xaa can be any naturally occurring amino acid
PSHPPSRETPHGVLLPRRRRRRGEVSGAPLEVPDGETVLGGYVSCRAATLPQAPRGGGGGAGESGVARAAAQRGGRRAAAVLHRRRLRVLXLPLPRFDQAHLTMARAKKNAKETGSCTSASLFHVSVSLCCSVRVICQRSDXDSVTRW

SEQ ID NO: 35913 - protein, 101 aa, Zea mays subsp. mays
  misc_feature (91)..(91): Xaa can be any naturally occurring amino acid
HPILHRERHPMASFCRAAAAAGARSAALRSRSPTARPFLAATSPVAPPRFHRPLVAAAAALASLESLVPLHSAVAAARLRSCIAAGSASWXCLSQGLTKRI

SEQ ID NO: 35914 - protein, 97 aa, Zea mays subsp. mays
  misc_feature (92)..(92): Xaa can be any naturally occurring amino acid
TIPSSIARDTPWRPSAAPPPPPGRGQRRSARGPRRRDRSWRLRLLSRRHASTGPSWRRRRRWRVWSRSCRCTARWPPRGCGPASPPAPRPGXASPKV

SEQ ID NO: 35915 - protein, 91 aa, Zea mays subsp. mays
  misc_feature (81)..(81): Xaa can be any naturally occurring amino acid
MASFCRAAAAAGARSAALRSRSPTARPFLAATSPVAPPRFHRPLVAAAAALASLESLVPLHSAVAAARLRSCIAAGSASWXCLSQGLTKRI

SEQ ID NO: 35916 - DNA, 360 bp, Zea mays subsp. mays
  misc_feature (347)..(347): n is a, c, g, or t
agctgtacttgttgacggtaaaaaggaccgtttgtttgatgcaggatgtggacggtgccggagccgaaggagatcatcagacggtcgacgctcgaggtggagaagatgagccttgtcgacggcgactgcgctccgaaaagcgccggcgatgcaagagacgttcctggtgaggttccaagaactcaagatgtcatccagacgctggacaggacgatctcgaacctggagatggagctagcgtccgcgaaggcgacgcaggagtccatgctccacggcggcgccggcgccccggtgcccgagcccacggggaagcggaagcacttcatggtcgtcggcgtaaacaccgngttcagcagccgg

SEQ ID NO: 35917 - protein, 105 aa, Zea mays subsp. mays
  misc_feature (101)..(101): Xaa can be any naturally occurring amino acid
MWTVPEPKEIIRRSTLEVEKMSLVDGDCAPKSAGDARDVPGEVPRTQDVIQTLDRTISNLEMELASAKATQESMLHGGAGAPVPEPTGKRKHFMVVGVNTXFSSR

SEQ ID NO: 35918 - protein, 85 aa, Zea mays subsp. mays
  misc_feature (81)..(81): Xaa can be any naturally occurring amino acid
MSLVDGDCAPKSAGDARDVPGEVPRTQDVIQTLDRTISNLEMELASAKATQESMLHGGAGAPVPEPTGKRKHFMVVGVNTXFSSR

SEQ ID NO: 35919 - protein, 55 aa, Zea mays subsp. mays
LYLLTVKRTVCLMQDVDGAGAEGDHQTVDARGGEDEPCRRRLRSEKRRRCKRRSW

SEQ ID NO: 35920 - DNA, 870 bp, Zea mays subsp. mays
  misc_feature (631)..(631): n is a, c, g, or t
  misc_feature (703)..(703): n is a, c, g, or t
  misc_feature (785)..(785): n is a, c, g, or t
agagggggcaaagagcgatggacgccgcggtgcggaaggccgcgggcgccggcatcgcgcgcgcgccggcgctggtgctagcgctggtggcggcgggggcgttcctgatctcctacaacttcttcaccatgctgttccacggcggcggcggaataggcgcggcggtgaccgctgggacgagggaccctgtggtggccatgccagcgtggatgcgcgcggcggcggacaccgaggcgcgacggcggccgttccatgtggcgctcacgcaaatacatcccttctgcttgttccctgggcccagcagcgcggcggcgcacgccgacagcaggcgccttccctggccgccgtcgtcggacgcgcccggcgtcgcccggtacggggagccgcatcagctcctgcagctgcccgttcaaagcggctggatcgacggcgtcggcgtggccgcggccggccaccacgagccgcccttcgtcttgggcaacaacgggggcgcggccgcctttgaagggacgacaagacagcagggctccggcgctcactttgaagctgccgcggcgccgccgccgccagcgttcatagatttcctcggggtcggagccacatgaacgcgcgcgcatgtgcatgcatgctngacttcaccacgcgccttgcagttgcatgtagtgggatctagctaggacaggtagctcgagcagcctctatntagtatctagctagctacctttgccatatatgaggagtaagtacatcgatccaaggcttaggtttaagcttatgtagtagcnctatgtatgtatatgtatgtctgaatgtctctggctagataggaactagtgacggagattgagcttatttatttcggggctttgc

SEQ ID NO: 35921 - protein, 200 aa, Zea mays subsp. mays
RGQRAMDAAVRKAAGAGIARAPALVLALVAAGAFLISYNFFTMLFHGGGGIGAAVTAGTRDPVVAMPAWMRAAADTEARRRPFHVALTQIHPFCLFPGPSSAAAHADSRRLPWPPSSDAPGVARYGEPHQLLQLPVQSGWIDGVGVAAAGHHEPPFVLGNNGGAAAFEGTTRQQGSGAHFEAAAAPPPPAFIDFLGVGAT

SEQ ID NO: 35922 - protein, 195 aa, Zea mays subsp. mays
MDAAVRKAAGAGIARAPALVLALVAAGAFLISYNFFTMLFHGGGGIGAAVTAGTRDPVVAMPAWMRAAADTEARRRPFHVALTQIHPFCLFPGPSSAAAHADSRRLPWPPSSDAPGVARYGEPHQLLQLPVQSGWIDGVGVAAAGHHEPPFVLGNNGGAAAFEGTTRQQGSGAHFEAAAAPPPPAFIDFLGVGAT

SEQ ID NO: 35923 - protein, 167 aa, Zea mays subsp. mays
EGAKSDGRRGAEGRGRRHRARAGAGASAGGGGGVPDLLQLLHHAVPRRRRNRRGGDRWDEGPCGGHASVDARGGGHRGATAAVPCGAHANTSLLLVPWAQQRGGARRQQAPSLAAVVGRARRRPVRGAASAPAAARSKRLDRRRRRGRGRPPRAALRLGQQRGRGRL

SEQ ID NO: 35924 - DNA, 524 bp, Zea mays subsp. mays
  misc_feature (71)..(71): n is a, c, g, or t
ccagacgataagataattgagttccgcaacgttttaattcaaggtggcctcactgtttttgttcggctcancagaggggatgatcagatggctgcctgcgggcagctaggagagcctggaggctatcagctacctctgctccgtgtgcccgagaaatttcaggtcgccttgtgatgctaaacagtgcatacagtaaaaatggtcctgagcagcttgacgaacacacggagtaattggctcggaacgacgattcgatcgtgcaaatcttgcaagttctaccgccttcggaagcttgtgtggacttctgcaatatcgtgcaaatctgaacctgggtacttgtgcgacaacacatttagacatggtcttgcttctgctagtacgtggtgtacccaaaccaaattcggtaagtttattattattattataaattggtatttcctggcaaatcgttgctgtataagacattaacagtgtaacatgctttcacttggtacttggaaaaatatggaatgaacttatcggtg

SEQ ID NO: 35925 - protein, 89 aa, Zea mays subsp. mays
MVLSSLTNTRSNWLGTTIRSCKSCKFYRLRKLVWTSAISCKSEPGYLCDNTFRHGLASASTWCTQTKFGKFIIIIINWYFLANRCCIRH

SEQ ID NO: 35926 - protein, 57 aa, Zea mays subsp. mays
  misc_feature (24)..(24): Xaa can be any naturally occurring amino acid
PDDKIIEFRNVLIQGGLTVFVRLXRGDDQMAACGQLGEPGGYQLPLLRVPEKFQVAL

SEQ ID NO: 35927 - DNA, 1963 bp, Zea mays subsp. mays
gcacgagaccattacctagaacatcctaatcaaaaatacatacatacatagcatccatcacttgtagactggacccttcatcaagagcacaatggaggaagctcacctcacgccggcgacgccatcgccattcttcccactagcagggcctcacaagtacatcgcgctccttctggttgtcctctcatggatcctggtccagaggtggagcctgaggaagcagaaaggcccgagatcatggccagtcatcggcgcaacggtggagcagctgaggaactaccaccggatgcacgactggcttgtcgggtacctgtcacggcacaggacagtgaccgtcgacatgccgttcacttcctacacctacatcgctgacccggtgaatgtcgagcatgtcctcaagactaacttcaccaattaccccaagggaatcgtgtacagatcctacatggacgtgctcctcggtgacggcatcttcaacgccgacggcgagctgtggaggaagcagaggaagacggcgagtttcgagttcgcctccaagaacctgagggatttcagcgccattgtgttcagagagtactccctgaagctgtcgggtatactgagccaggcatccaaggcaggcaaagttgtggacatgcaggaactttacatgaggatgacgctggactccatctgcaaggttgggttcggggtcgagatcggcacgctgtcgccagatctccccgagaacagcttcgcgcaggcgttcgatgccgccaacatcatcatcacgctgcggttcatcgacccgctgtggcgcatcaagaggttcttccacgtcgggtcagaggccctcctagcgcagagcatcaagctcgtggacgagttcacctacagcgtgatccgccggaggaaggccgagatcgtcgaggtccgggccagcggcaaacaggagaagatgaagcacgacatcctgtcacggttcatcgagctgggcgaggccggcgacgacggcggcggcttcggggacgataagagcctccgggacgtggtgctcaacttcgtgatcgccgggcgggacacgacggcgacgacgctgtcgtggttcacgcacatggccatgtcccacccggacgtggccgagaagctgcgccgcgagctgtgcgcgttcgaggcggagcgcgcgcgcgaggagggcgtcacgctcgtgctctgcggcggcgctgacgccgacgacaaggcgttcgccgcccgcgtggcgcagttcgcgggcctcctcacctacgacagcctcggcaagctggtctacctccacgcctgcgtcaccgagacgctccgcctgtaccccgccgtccctcaggaccccaaggggatcctggaggacgacgtgctgccggacgggacgaaggtgagggccggcgggatggtgacgtacgtgccctactcgatggggcggatggagtacaactggggccccgacgcggcgagcttccggccggagcggtggatcaacgaggatggcgcgttccgcaacgcgtcgccgttcaagttcacggcgttccaggcggggccgaggatctgcctgggcaaggactcggcgtacctgcagatgaagatggcgctggccatcctcttccgcttctacagcttccggctgctggaggggcacccggtgcagtaccgcatgatgaccatcctctccatggcgcacggcctcaaggtccgcgtctctagggccgtctgatgtcatggcgatttggatatggatatcgtcccgcttaatccacgacaaataacgctcgtgttacaaatttgcatgcatgcatgtaagggaaagcgatgggtttcattggtggcttggcttaagccttaaaaactccgtcgggtcttgcgaaccaccacatcactagtgttttgtactctactcctcagtggaagtgtagtgacagcatacaagttcatcatatatattatcctctttctt

SEQ ID NO: 35928 - protein, 543 aa, Zea mays subsp. mays
MEEAHLTPATPSPFFPLAGPHKYIALLLVVLSWILVQRWSLRKQKGPRSWPVIGATVEQLRNYHRMHDWLVGYLSRHRTVTVDMPFTSYTYIADPVNVEHVLKTNFTNYPKGIVYRSYMDVLLGDGIFNADGELWRKQRKTASFEFASKNLRDFSAIVFREYSLKLSGILSQASKAGKVVDMQELYMRMTLDSICKVGFGVEIGTLSPDLPENSFAQAFDAANIIITLRFIDPLWRIKRFFHVGSEALLAQSIKLVDEFTYSVIRRRKAEIVEVRASGKQEKMKHDILSRFIELGEAGDDGGGFGDDKSLRDVVLNFVIAGRDTTATTLSWFTHMAMSHPDVAEKLRRELCAFEAERAREEGVTLVLCGGADADDKAFAARVAQFAGLLTYDSLGKLVYLHACVTETLRLYPAVPQDPKGILEDDVLPDGTKVRAGGMVTYVPYSMGRMEYNWGPDAASFRPERWINEDGAFRNASPFKFTAFQAGPRICLGKDSAYLQMKMALAILFRFYSFRLLEGHPVQYRMMTILSMAHGLKVRVSRAV

SEQ ID NO: 35929 - protein, 478 aa, Zea mays subsp. mays
MHDWLVGYLSRHRTVTVDMPFTSYTYIADPVNVEHVLKTNFTNYPKGIVYRSYMDVLLGDGIFNADGELWRKQRKTASFEFASKNLRDFSAIVFREYSLKLSGILSQASKAGKVVDMQELYMRMTLDSICKVGFGVEIGTLSPDLPENSFAQAFDAANIIITLRFIDPLWRIKRFFHVGSEALLAQSIKLVDEFTYSVIRRRKAEIVEVRASGKQEKMKHDILSRFIELGEAGDDGGGFGDDKSLRDVVLNFVIAGRDTTATTLSWFTHMAMSHPDVAEKLRRELCAFEAERAREEGVTLVLCGGADADDKAFAARVAQFAGLLTYDSLGKLVYLHACVTETLRLYPAVPQDPKGILEDDVLPDGTKVRAGGMVTYVPYSMGRMEYNWGPDAASFRPERWINEDGAFRNASPFKFTAFQAGPRICLGKDSAYLQMKMALAILFRFYSFRLLEGHPVQYRMMTILSMAHGLKVRVSRAV

SEQ ID NO: 35930 - protein, 460 aa, Zea mays subsp. mays
MPFTSYTYIADPVNVEHVLKTNFTNYPKGIVYRSYMDVLLGDGIFNADGELWRKQRKTASFEFASKNLRDFSAIVFREYSLKLSGILSQASKAGKVVDMQELYMRMTLDSICKVGFGVEIGTLSPDLPENSFAQAFDAANIIITLRFIDPLWRIKRFFHVGSEALLAQSIKLVDEFTYSVIRRRKAEIVEVRASGKQEKMKHDILSRFIELGEAGDDGGGFGDDKSLRDVVLNFVIAGRDTTATTLSWFTHMAMSHPDVAEKLRRELCAFEAERAREEGVTLVLCGGADADDKAFAARVAQFAGLLTYDSLGKLVYLHACVTETLRLYPAVPQDPKGILEDDVLPDGTKVRAGGMVTYVPYSMGRMEYNWGPDAASFRPERWINEDGAFRNASPFKFTAFQAGPRICLGKDSAYLQMKMALAILFRFYSFRLLEGHPVQYRMMTILSMAHGLKVRVSRAV

SEQ ID NO: 35931 - DNA, 804 bp, Zea mays subsp. mays
  misc_feature (62)..(62): n is a, c, g, or t
  misc_feature (359)..(359): n is a, c, g, or t
  misc_feature (388)..(388): n is a, c, g, or t
  misc_feature (414)..(414): n is a, c, g, or t
ggtgttccacgattcctcctctcacgttcgaagaccatttcttgttctttggacgaccatcngctgacagtgttaagactacagtcttcttcttcttcggcgtagttttttccccggcttgaaaaatgggtctatccttcggaaagttgttcagcaagctctttgcaaagaaagagatgcgtatcctcatggtgggtctcgatgcagctggtgagactacgatcttgtacaagctcaagcttggatagatcgtgactacaattccaaccattggtttcaatgtggagactgtggaatacaagaacattagctttaccgtgtgggatgtcgggggtcaagacaagattcgtccaatgtgnaggcactacttccagaacactcagggacntatctttgtggtggacagcaatgatngtgaccgtgttgtggaagccagagatgagcttcacagaatgttgaacgaagatgagttgagaaatgctgtgcttctcgtttttgctaacaagcaagatcttccaaatgcgatgaacgccgctgagataaccgataagcttggacttcactctctccgtcaacgacactggtacatacagagcacatgtgctacctccggagaagggctttatgagggacttgactggctctctaacaacatcgcaaacaaggcttaggagaacaacgtgtggtttggtttttaatcgaggagagtcttgtattattccttatatcttttgttctttcgtctccaactcttatcatttcatactctttgtttttgggtataataatttacaagtttttttt

SEQ ID NO: 35932 - protein, 105 aa, Zea mays subsp. mays
  misc_feature (2)..(2): Xaa can be any naturally occurring amino acid
  misc_feature (12)..(12): Xaa can be any naturally occurring amino acid
  misc_feature (21)..(21): Xaa can be any naturally occurring amino acid
MXRHYFQNTQGXIFVVDSNDXDRVVEARDELHRMLNEDELRNAVLLVFANKQDLPNAMNAAEITDKLGLHSLRQRHWYIQSTCATSGEGLYEGLDWLSNNIANKA

SEQ ID NO: 35933 - protein, 72 aa, Zea mays subsp. mays
MLNEDELRNAVLLVFANKQDLPNAMNAAEITDKLGLHSLRQRHWYIQSTCATSGEGLYEGLDWLSNNIANKA

SEQ ID NO: 35934 - protein, 59 aa, Zea mays subsp. mays
  misc_feature (27)..(27): Xaa can be any naturally occurring amino acid
  misc_feature (37)..(37): Xaa can be any naturally occurring amino acid
  misc_feature (45)..(45): Xaa can be any naturally occurring amino acid
MWRLWNTRTLALPCGMSGVKTRFVQCXGTTSRTLRDXSLWWTAMXVTVLWKPEMSFTEC

SEQ ID NO: 35935 - DNA, 999 bp, Zea mays subsp. mays
gggaagagcaccaaggaccttcggcgcccgttcaggatccacatcttcccgagcgagttcttggttgacctcttcctcttcggaccacctccaaggctcttggtgtagcttgccactctcaccaatcaagttttcatgtctgatctcgacattcagatcccaactgccttcgatcccttcgctgaggccaatgctggggactctggtgcggcagcagggtcaaaggactacgtacacgtgcgcatccagcagcgtaatggtcgcaagagcctgaccaccgtccagggattgaagaaggagttcagctacagcaagatcctcaaagatctcaagaaagagttctgctgcaatggtacagtggtccaggacccagaacttggacaggtcattcagctccagggtgatcagaggaagaacgtctcgaatttcctcgtccaggccggcattgtgaagaaggagcacatcaagattcatggtttctgagcaaccgccgggtccatagcaaaccaaccctgcatgcagggccagcttattatatataatatctgaggtggagcatatctatctggctgtgtactgcaagcaggcctagtacgccgcctgcgcgttcctcctattacacatataggcccctccctgcgtgtatgcttgttaccgtcgtgtcgaaccttgtactacgaggctccatcgaacatcgatggcttgcttctttatcagaacatgtttgaataaacgctatttggtaatgctgtgtgtcgaatgcttccgctgaattcatcaagtcctgttggatgggcggtatagtttaccaggctgacttgaagtgtcaaagacaattgatacggttaagcaggtgaagcccgcacagtcgccttgaagcatgctgctggcagaataagattagatgttaatgaggtgtttgttggaagagtcaattcattcgtgaagcattatgacttcattacgactttattaatttggaggaatgaattcatttcc

SEQ ID NO: 35936 - protein, 115 aa, Zea mays subsp. mays
MSDLDIQIPTAFDPFAEANAGDSGAAAGSKDYVHVRIQQRNGRKSLTTVQGLKKEFSYSKILKDLKKEFCCNGTVVQDPELGQVIQLQGDQRKNVSNFLVQAGIVKKEHIKIHGF

SEQ ID NO: 35937 - protein, 90 aa, Zea mays subsp. mays
GRAPRTFGARSGSTSSRASSWLTSSSSDHLQGSWCSLPLSPIKFSCLISTFRSQLPSIPSLRPMLGTLVRQQGQRTTYTCASSSVMVARA

SEQ ID NO: 35938 - DNA, 438 bp, Zea mays subsp. mays
  misc_feature (63)..(63): n is a, c, g, or t
  misc_feature (336)..(336): n is a, c, g, or t
  misc_feature (339)..(339): n is a, c, g, or t
  misc_feature (342)..(342): n is a, c, g, or t
  misc_feature (386)..(387): n is a, c, g, or t
  misc_feature (389)..(389): n is a, c, g, or t
  misc_feature (416)..(416): n is a, c, g, or t
cttatgcttcaactgtacgaagagatgattggagagtctcccaaacgtgagaaaacagctaanagcgactctttatccaacggaaaggcgactactactactactactactactagtgtactgagatcatctgaaactgagaagcacagctctgatggagatggcgacaaggtggttggagggtcggcatttggctggaacttcataacctctggagggccaggcactgaacctgtttattctggaatgtcaaaggaagaataccagaagctctcacccaattatgcaagtggaggcagagcttgagttgcccaacacattgtaaggtttgttagnggngtngggataataatattcactttgcgtatccgttcatccccatgttnnanaagtataaaatgaaagaatggattagnttctacccatgaagccttaatt

SEQ ID NO: 35939 - protein, 101 aa, Zea mays subsp. mays
  misc_feature (21)..(21): Xaa can be any naturally occurring amino acid
LMLQLYEEMIGESPKREKTAXSDSLSNGKATTTTTTTTSVLRSSETEKHSSDGDGDKVVGGSAFGWNFITSGGPGTEPVYSGMSKEEYQKLSPNYASGGRA

SEQ ID NO: 35940 - protein, 100 aa, Zea mays subsp. mays
  misc_feature (20)..(20): Xaa can be any naturally occurring amino acid
MLQLYEEMIGESPKREKTAXSDSLSNGKATTTTTTTTSVLRSSETEKHSSDGDGDKVVGGSAFGWNFITSGGPGTEPVYSGMSKEEYQKLSPNYASGGRA

SEQ ID NO: 35941 - protein, 93 aa, Zea mays subsp. mays
  misc_feature (13)..(13): Xaa can be any naturally occurring amino acid
MIGESPKREKTAXSDSLSNGKATTTTTTTTSVLRSSETEKHSSDGDGDKVVGGSAFGWNFITSGGPGTEPVYSGMSKEEYQKLSPNYASGGRA

SEQ ID NO: 35942 - DNA, 607 bp, Zea mays subsp. mays
gtctctcatttgttcctggggctattgagtgggttcatcgagaaggagatgtcaaaccaaaacttgccgttagtgaccgaaatacacctttcgttcacatatttgatacccattctggttcaaatgacccaatcatgtccaaagagattcatggtggccctgtcaaagttatgaaatataaccacattcatgatgttgttatatctgctgatgccaaaggactgttggaatattggtctccatctaccctcatgtttccagaaaatgaggtgaggtttcgcctgaaatcagatacaaatctatttgaaattgcgaaatgcaagactactgtgtctgctattgaggtaagcaatgatggcactcaatttgctgtcacatcccctgatcgcaggatacgtgtattttggttcaaaactggaaaattaagacgtgtatatgacgagtccctagatgtggcgcaagatcttcaaagaagtgatgttccattgtatcaccttgatgctattgattttggtcgacgaatggctgtggagaaggaaatagagaaaacagaaaatgttccacaacctaatgctgtctttgtgtttaaacacaataaagttggaac

SEQ ID NO: 35943 - protein, 201 aa, Zea mays subsp. mays
LSFVPGAIEWVHREGDVKPKLAVSDRNTPFVHIFDTHSGSNDPIMSKEIHGGPVKVMKYNHIHDVVISADAKGLLEYWSPSTLMFPENEVRFRLKSDTNLFEIAKCKTTVSAIEVSNDGTQFAVTSPDRRIRVFWFKTGKLRRVYDESLDVAQDLQRSDVPLYHLDAIDFGRRMAVEKEIEKTENVPQPNAVFVFKHNKVG

SEQ ID NO: 35944 - protein, 157 aa, Zea mays subsp. mays
MSKEIHGGPVKVMKYNHIHDVVISADAKGLLEYWSPSTLMFPENEVRFRLKSDTNLFEIAKCKTTVSAIEVSNDGTQFAVTSPDRRIRVFWFKTGKLRRVYDESLDVAQDLQRSDVPLYHLDAIDFGRRMAVEKEIEKTENVPQPNAVFVFKHNKVG

SEQ ID NO: 35945 - protein, 145 aa, Zea mays subsp. mays
MKYNHIHDVVISADAKGLLEYWSPSTLMFPENEVRFRLKSDTNLFEIAKCKTTVSAIEVSNDGTQFAVTSPDRRIRVFWFKTGKLRRVYDESLDVAQDLQRSDVPLYHLDAIDFGRRMAVEKEIEKTENVPQPNAVFVFKHNKVG

SEQ ID NO: 35946 - DNA, 1015 bp, Zea mays subsp. mays
cactagtccccccccccccccgacccaatttattctcggccggaaagtctcttcttgattattgtccagggattgcaacagagagaaagtaacgatgccggcgaaacagaggacagctaaggtcaacaggaatcctgatctgatcaggggagttggtaaatactcaaggtctcagatgtaccataagagaggtttgtgggcaatcaaggccaaaaatggaggcgttttcccccgccacgacgctaaatctaaggttgatgttccggtggagaagccaccgaagttctatccagctgaagacgtgaagaaacctctccccaacaggcgcacggcaaaaccagccaagctcagagctagcatcactccagggacagtgcttatcatccttgctggtagatttaagggcaagagagttgtcttccttaagcagcttgcctccggtttgcttcttgtgactggaccattcaagatcaatggtgttcctctgagacgtgttaaccaggcctatgtcattggtacttccacaaaggttgacatttctggagttaccctcgacaaattcgatgataagtacttcggcaaggttgctgagaagaaaaagaagaagactgaaggagagttcttcgaggctgagaaagaggagaagaaagagattccacagggaaagaaagatgaccagaaagccgtggacgcagctttgatcaaagctattgaagcagttccagagttgaagacttacctcggagcaaggttttcattgaaacaaggaatgaagccccatgagcttgttttctagatttcattactttttttctgaggtttctagtgtatctgtctcctgaagttttacactccaactggttggttctgttctcgtccactgaccagagacataaaatcttggctgctgctatctggatttctgtcttatatggataatttatcaatcctgtttttgaaaaaaaaaaaaaaaaaaactgccagagagaactagtctcgagggggggcccggtac

SEQ ID NO: 35947 - protein, 233 aa, Zea mays subsp. mays
MPAKQRTAKVNRNPDLIRGVGKYSRSQMYHKRGLWAIKAKNGGVFPRHDAKSKVDVPVEKPPKFYPAEDVKKPLPNRRTAKPAKLRASITPGTVLIILAGRFKGKRVVFLKQLASGLLLVTGPFKINGVPLRRVNQAYVIGTSTKVDISGVTLDKFDDKYFGKVAEKKKKKTEGEFFEAEKEEKKEIPQGKKDDQKAVDAALIKAIEAVPELKTYLGARFSLKQGMKPHELVF

SEQ ID NO: 35948 - protein, 206 aa, Zea mays subsp. mays
MYHKRGLWAIKAKNGGVFPRHDAKSKVDVPVEKPPKFYPAEDVKKPLPNRRTAKPAKLRASITPGTVLIILAGRFKGKRVVFLKQLASGLLLVTGPFKINGVPLRRVNQAYVIGTSTKVDISGVTLDKFDDKYFGKVAEKKKKKTEGEFFEAEKEEKKEIPQGKKDDQKAVDAALIKAIEAVPELKTYLGARFSLKQGMKPHELVF

SEQ ID NO: 35949 - DNA, 2069 bp, Zea mays subsp. mays
gctcactagtcccccccccccccccatgatacagaagtttgtttgggccatctgaagcggtatgctttcaaggagctccgtgcagctactaataattttaactcaaagaacatcttaggtgaaggtggatatggcatagtatacaagggttatttacgcgatggctccgttgttgctgtcaaaaggctgaaggattataatgccgtcggtggggaagttcaattccaaactgaagttgaagtcataagcttggctgttcatcggaatctcctacgtcttattggattctgcactacagagagtgagaggttacttgtttatccatacatgccaaatggaagcgttgcttctcaattgcggggttagtcgctcttcttgctcttgacttccatgtccatatgctgttgcaagctggaccaattttgaaagtacactggtccagaaaatgcattttttgtcacaagagggggaaagtggctataaaaaagcaattataaaaatgtccactcagaaaacctttgagtggtaaaacggctatcaaagcctgatgaaaattttgaatttaaaaatgtgttaacacttctgcatatctgttaaataagtttcttgtatctaacataaaatagttaccctatttctggatgcatcatagttgatgtgaagcgtgttggctttccaacatttgcttagtgcttctgcatagtgcattgagtagtactaaatttagttttgtgtggtctaggccacaccttatgctttgtacaaacaagcaagctaccatgatttctattggtgtgttgcagctggtctatgcatcacagttgttgtccttccattgaacgccgttgaattaattatgtcgatcaaatcaaaccctactcatgttcctgctgtggagctctgccataacgttgtatgtccatgtgatatattgctttcaagtccagttttggactgcccaatctctatctgtcctcaactcaagccgtgtggtatcaggttaattgatagcagcaaaacaccatacaagggcctcgcccacgtatgctgtccaccatgcatgcaaattaactctcttccattttatccagaacatatcaatgccaagccggctctagactggtcaaggagaaagagggtagcgctaggcacagcgaggggtctgctctaccttcacgagcaatgcgacccgaagataatccaccgagacgtgaaggcctccaacgtactcctcgacgagtacttcgaagcgatcgtgggggacttcggactggcgaagctcctggaccacagggagtcccatgtcacgaccgcggtgcgcgggaccgtcgggcatatagcgccggagtacctgtcgaccgggcagtcgtcggagaagaccgacgtgtttgggttcggggttctgctagtcgagctggtcaccggacagaaggcgctggatttcggaagagtcgcgaaccagaagggcggagtgctggactgggtcaagaagctccatcaggagaagcagctaggcgtgatggtggacaaggacctgggcagcagctacgacggggtcgagctggaggaaatggtccagctggctctgctatgcacgcagtaccacccgtcccaccggcccagaatgtccgaggtgatcaggatgctggaaggcgagcccgggctcgcggagagatgggaagcgtcgcagggcaacgtggacacgccgaagtccgtctcgtcggagctcctgcctcccaagtacgtggatttcgccgccgcggacgagtcctcgcttggcctggaagccatggagctgtccgggccaaggtgaccgaccatctggtcgcacaggacaggacgcataggaaagcctatggttgtattgcattggagtcggttaggtgtagagagccccccgacacaagggaaggcgtcaaattttctggtgggttgtagggtgtgatctgtctgtatatagctgtggtggcattcattgtagtgttgtacatacagcagctacttggtcttggtggcaaagagatgagatgaatgagtgtatagaaattaaagttctcagtgcagtgcgg

SEQ ID NO: 35950 - protein, 318 aa, Zea mays subsp. mays
MSIKSNPTHVPAVELCHNVVCPCDILLSSPVLDCPISICPQLKPCGIRLIDSSKTPYKGLAHVCCPPCMQINSLPFYPEHINAKPALDWSRRKRVALGTARGLLYLHEQCDPKIIHRDVKASNVLLDEYFEAIVGDFGLAKLLDHRESHVTTAVRGTVGHIAPEYLSTGQSSEKTDVFGFGVLLVELVTGQKALDFGRVANQKGGVLDWVKKLHQEKQLGVMVDKDLGSSYDGVELEEMVQLALLCTQYHPSHRPRMSEVIRMLEGEPGLAERWEASQGNVDTPKSVSSELLPPKYVDFAAADESSLGLEAMELSGPR

SEQ ID NO: 35951 - protein, 251 aa, Zea mays subsp. mays
MRPEDNPPRREGLQRTPRRVLRSDRGGLRTGEAPGPQGVPCHDRGARDRRAYSAGVPVDRAVVGEDRRVWVRGSASRAGHRTEGAGFRKSREPEGRSAGLGQEAPSGEAARRDGGQGPGQQLRRGRAGGNGPAGSAMHAVPPVPPAQNVRGDQDAGRRARARGEMGSVAGQRGHAEVRLVGAPASQVRGFRRRGRVLAWPGSHGAVRAKVTDHLVAQDRTHRKAYGCIALESVRCREPPDTREGVKFSGGL

SEQ ID NO: 35952 - protein, 250 aa, Zea mays subsp. mays
MQINSLPFYPEHINAKPALDWSRRKRVALGTARGLLYLHEQCDPKIIHRDVKASNVLLDEYFEAIVGDFGLAKLLDHRESHVTTAVRGTVGHIAPEYLSTGQSSEKTDVFGFGVLLVELVTGQKALDFGRVANQKGGVLDWVKKLHQEKQLGVMVDKDLGSSYDGVELEEMVQLALLCTQYHPSHRPRMSEVIRMLEGEPGLAERWEASQGNVDTPKSVSSELLPPKYVDFAAADESSLGLEAMELSGPR

SEQ ID NO: 35953 - DNA, 1936 bp, Zea mays subsp. mays
ggatcggcggagaatgaagatgaaggcgctggcgtgctgccggcggcggccccaggacttgagcatcgacatggaccaagagcccgacagggtgatgacatataatggcctggagacctgcattatcaactgttccgcctatgacgatgatagtggcatcagtgcaacaacatgcggagatggctgtgtcaccgctgattcccttgatgatgaagtctctagctgctttagtaaagatgcttctggttcttccttctcttcacactgccttagcaagcaggaggagcattcgctagatgagttgggtacacccatcgcaattcatctactccctttcaaagcgaagaaaccaatcacatataccttgagtgcttcagatattgaaaacatgaagaaaaaatttgcgaagcttttgctcggttatgatacttcaggaggcgctaggggcgtttgtgcggctctggccttgtctaatggcataatcaatctctctgctactgtttttggagaactctggaagctggaaccattgtgcgaagataaaaagatcaggtggagaaaagaaatggactggttgatgtctcctacaacttatatagtggagctggttccaaggaaacaaagcggagcagatggatgcacatttgagattatgactccaaaggcccgctcagatgttcatgtgaaccttcctgcccttcagaagcttgatacgatgctcattgaagtaatggactctatgatagatacagagttctggtatgaggagagtggtagcagagctgatggtccggtgaaaattaccggcccaaggaagagtaaaaagtggtggctcccatctcctcgtgtccctgagcaagggctatctcgatttcagcggaaaaggcttgtttttcaggctaagcttgttcaccagatcctcaaagccgcaaaatccatcaacgaacaagtcctgttccacatgcctattccggcagctgttatggatgcccttccaaagtctgggagagctagcttgggtgaagatttgtaccaggctataacgaccgagtatattcccatagaggaaatatttgtttccctcagtttgaaaactgagcatagtgtgctcgagactatgaaccagttggagggggcaatgtttgcatggaaccaaagaatcttagaggagcgaagcaagaggtcaccgggacgtcattcctggagcttcatgaaggacagctcgtcagaactcgacaagatgtctgcatgcatcgaaagggtcgacacccttgtgcagcttctgaaagccagatatccgaacctgcctccaacttttatagatgttctaaaggtccagtacaatgtggatgtggggaatgcaatcgtggaggcatactctagggttcttgtcggggtagcattcagcatactgtcgcgcgtggcggagatactgctggaggatgacctggtcaagaggcccaacacccccatggcctcactgaagttcgacctctcctccgacgtgtacttggccggcataacagagacgccgccgggacacgtccggaggtcccttatggatcagatcagcatggtcgacgggcgcttcaacgctgctgtgaagaagaaaggagcgaagcagctgaggtggtgaggacagtcggctgttgtgtgaaatcttttggccatgtacagggtgggtgatgcagagcccagtgtccgctccacaaggacacaaggcaaggttaccatagcaatagcgccagtgtaatgtatttggcaacgagtttatagcttactgtaagagcaagcattaggcgaatcctgcctgtcgaagtctccggatgttgctgttccgtctgaacatctgatgctcttggtcagcctctgctgcatttcttgctggcaacaaagaaaacctaaaaaaaaaatgagaaaacttctacaaagctct

SEQ ID NO: 35954 - protein, 544 aa, Zea mays subsp. mays
DRRRMKMKALACCRRRPQDLSIDMDQEPDRVMTYNGLETCIINCSAYDDDSGISATTCGDGCVTADSLDDEVSSCFSKDASGSSFSSHCLSKQEEHSLDELGTPIAIHLLPFKAKKPITYTLSASDIENMKKKFAKLLLGYDTSGGARGVCAALALSNGIINLSATVFGELWKLEPLCEDKKIRWRKEMDWLMSPTTYIVELVPRKQSGADGCTFEIMTPKARSDVHVNLPALQKLDTMLIEVMDSMIDTEFWYEESGSRADGPVKITGPRKSKKWWLPSPRVPEQGLSRFQRKRLVFQAKLVHQILKAAKSINEQVLFHMPIPAAVMDALPKSGRASLGEDLYQAITTEYIPIEEIFVSLSLKTEHSVLETMNQLEGAMFAWNQRILEERSKRSPGRHSWSFMKDSSSELDKMSACIERVDTLVQLLKARYPNLPPTFIDVLKVQYNVDVGNAIVEAYSRVLVGVAFSILSRVAEILLEDDLVKRPNTPMASLKFDLSSDVYLAGITETPPGHVRRSLMDQISMVDGRFNAAVKKKGAKQLRW

SEQ ID NO: 35955 - protein, 540 aa, Zea mays subsp. mays
MKMKALACCRRRPQDLSIDMDQEPDRVMTYNGLETCIINCSAYDDDSGISATTCGDGCVTADSLDDEVSSCFSKDASGSSFSSHCLSKQEEHSLDELGTPIAIHLLPFKAKKPITYTLSASDIENMKKKFAKLLLGYDTSGGARGVCAALALSNGIINLSATVFGELWKLEPLCEDKKIRWRKEMDWLMSPTTYIVELVPRKQSGADGCTFEIMTPKARSDVHVNLPALQKLDTMLIEVMDSMIDTEFWYEESGSRADGPVKITGPRKSKKWWLPSPRVPEQGLSRFQRKRLVFQAKLVHQILKAAKSINEQVLFHMPIPAAVMDALPKSGRASLGEDLYQAITTEYIPIEEIFVSLSLKTEHSVLETMNQLEGAMFAWNQRILEERSKRSPGRHSWSFMKDSSSELDKMSACIERVDTLVQLLKARYPNLPPTFIDVLKVQYNVDVGNAIVEAYSRVLVGVAFSILSRVAEILLEDDLVKRPNTPMASLKFDLSSDVYLAGITETPPGHVRRSLMDQISMVDGRFNAAVKKKGAKQLRW

SEQ ID NO: 35956 - protein, 538 aa, Zea mays subsp. mays
MKALACCRRRPQDLSIDMDQEPDRVMTYNGLETCIINCSAYDDDSGISATTCGDGCVTADSLDDEVSSCFSKDASGSSFSSHCLSKQEEHSLDELGTPIAIHLLPFKAKKPITYTLSASDIENMKKKFAKLLLGYDTSGGARGVCAALALSNGIINLSATVFGELWKLEPLCEDKKIRWRKEMDWLMSPTTYIVELVPRKQSGADGCTFEIMTPKARSDVHVNLPALQKLDTMLIEVMDSMIDTEFWYEESGSRADGPVKITGPRKSKKWWLPSPRVPEQGLSRFQRKRLVFQAKLVHQILKAAKSINEQVLFHMPIPAAVMDALPKSGRASLGEDLYQAITTEYIPIEEIFVSLSLKTEHSVLETMNQLEGAMFAWNQRILEERSKRSPGRHSWSFMKDSSSELDKMSACIERVDTLVQLLKARYPNLPPTFIDVLKVQYNVDVGNAIVEAYSRVLVGVAFSILSRVAEILLEDDLVKRPNTPMASLKFDLSSDVYLAGITETPPGHVRRSLMDQISMVDGRFNAAVKKKGAKQLRW

SEQ ID NO: 35957 - DNA, 2954 bp, Zea mays subsp. mays
attggctatatcttgcggactttgcatcattcaagccaacgtatatcccggatgatgacccgtctgatttctcattctactttgacactggaggaagacgacgatgctatctagcacctgaaagattctatgaaagtggtggtgaatcccaagttgcagcagacgcacctctgcaaccatctatggatatattttctcttgggtgtgttcttgctgaacttttccttgaaggccagccactttttgagctttctcaacttctggcttaccggcgtggtcaatatgaccccatacataccctagaaaagatacaagatactggtatccgtgacatgatacttcacatgatccagttggaccccaaaaaaagggtaccatgtcgaagctatctgcagaaatatgaatctgttgtgttcccattttatttttcaaaatttctgcacaagttcttctcggatatcgttccacttgattccgatgctagggttgagaagactcaagaaaattttggaaagatacaggaaataatgatgggtagttcaacaattgaacaaattgagaggtctacatcgtgtgagcatagtgaaccatctgggagaaaaggcatggaaggggaaattttaaactcgccaggaaattatagaaatagcacatctgtatttaagaaaaaaactcctgtagaccatcaacatattattggagatatcaatttcctcctcaaagaagtggagggcaggagtaacaacacaagcacaaaggtcacaaaagacacttatcattttgttgcaccgagcattacctgtgcaaatggtgttcagtcctctcatctagttaatccagcaggaagacaaattggaactggtttgatgggccacaaacatgttgtatctcatgtgaagatctcaaagagtaacatacgctccttggtggctacttatgatgatcaatcagatacctatagttttgatatttttcagcagacagactccaaggtgagctgtgaaggcatggtcttgcttgcctcattactttgctcatgcataagcagtgtgaaaaaacctgagctaagaagggccagcctcattcttctgaagttctcgtccacatacatagatgatgatagtcgcctacagctagtggttccctatgtgattacgatgctttcagatccgtctgccattgtccgctgtgctgctttggaaaccctatgtgatgttctttgtcttgtgcaagatttccctatcagtgatgctgttatattccctgagtatatcctcccaatgctctctttgctccctgatgatacggaagagagtgttagggtttgctatgctagcaatattcataagctggctttaacagcttataggttcctacttcgttctcgtagcattgcagatattcgacctctggatgaatcagtggtagctcacagatcccaatctgcagattcaccagcgaagaggcaagataatttttttcgccagcttgcagaactgaggaaatctatttatgagatagtgcaagatttggtgatgggacaaaagcagacacctaatacccgtagagctcttctgcaggatataggttatttgtgttacttctttgggcacaaacaaagtaacgattttcttcttcctatacttccagcatttctaaatgatcatgatgagcagctccgtgcagttttctttggccagattgtctatgtttgctattttattggagcaagaagtgttgaggaatatcttctgccatatcttgaacaggcactaagtgatgacatggaggctgtccttgtaaatgcacttgattgcttgaccatgatgtgcagaagtggttatttgaggaaaagagtaattgttggtctattggtaaagattctccccctgctccggtatccaatcaattgggttaaacagtctgctgtaagatttgttgctgcctgcagcgagagcttaggatctgtagatacttatgtgtatctttctcctcatctaaggcagttcctacacatggagccaccttcattggcctctgaaactgctcttctttcatgtcttaagcctccactaccaaaatcaatcttctatgaaggtttagagcatgctcaggacattggagacattttactgaagagcagtggcaagaaagaacagatagtacatggtggaagatatcctggtacagcacaaagtggatccttggccaaccttgaagatatcctgcgaccgaaaggccctaatatttccagcagcatgtccttgtatgtcaaaaactctgtttcttttgaaaaatcactatattctggttttgctctgcatgcatctgctgcaaatagctccttttatgatggcttatctaaaggaataccatcatattctttttgtactgataataagcggggtttaggagaaacacacatggtccctgattcatcagtgtataaagcttcaataaggctaccttggttggaaccaaaccgtcctgccatgcagaccagagatgatcattttagtagcacgcgacaagatttcagcatcaatgactctatgaagagcaattcctctttgcaaggggatatcattccgaactctgatactggagggttgcctttctccagatcagcagtgaacttggagactggatggaagcctcgtggaattctagtggcacatctccaggagcatcgctcttctgtcaatgacattgccgtatcaaatgataataccctttttgtgactgcttctgatgactcaagtatcaaaatatgggatacaagaaaattggaaaaggacattgctttcagatctaggttaacatacagcatgggtaatagccgagctctatgtacgacaatggttcatggtacttcacaggttattgtcggtgctagcgatggaacattacacttgttttctgtggattgtgcacgcagcgttgggaaggggttg

SEQ ID NO: 35958 - protein, 984 aa, Zea mays subsp. mays
WLYLADFASFKPTYIPDDDPSDFSFYFDTGGRRRCYLAPERFYESGGESQVAADAPLQPSMDIFSLGCVLAELFLEGQPLFELSQLLAYRRGQYDPIHTLEKIQDTGIRDMILHMIQLDPKKRVPCRSYLQKYESVVFPFYFSKFLHKFFSDIVPLDSDARVEKTQENFGKIQEIMMGSSTIEQIERSTSCEHSEPSGRKGMEGEILNSPGNYRNSTSVFKKKTPVDHQHIIGDINFLLKEVEGRSNNTSTKVTKDTYHFVAPSITCANGVQSSHLVNPAGRQIGTGLMGHKHVVSHVKISKSNIRSLVATYDDQSDTYSFDIFQQTDSKVSCEGMVLLASLLCSCISSVKKPELRRASLILLKFSSTYIDDDSRLQLVVPYVITMLSDPSAIVRCAALETLCDVLCLVQDFPISDAVIFPEYILPMLSLLPDDTEESVRVCYASNIHKLALTAYRFLLRSRSIADIRPLDESVVAHRSQSADSPAKRQDNFFRQLAELRKSIYEIVQDLVMGQKQTPNTRRALLQDIGYLCYFFGHKQSNDFLLPILPAFLNDHDEQLRAVFFGQIVYVCYFIGARSVEEYLLPYLEQALSDDMEAVLVNALDCLTMMCRSGYLRKRVIVGLLVKILPLLRYPINWVKQSAVRFVAACSESLGSVDTYVYLSPHLRQFLHMEPPSLASETALLSCLKPPLPKSIFYEGLEHAQDIGDILLKSSGKKEQIVHGGRYPGTAQSGSLANLEDILRPKGPNISSSMSLYVKNSVSFEKSLYSGFALHASAANSSFYDGLSKGIPSYSFCTDNKRGLGETHMVPDSSVYKASIRLPWLEPNRPAMQTRDDHFSSTRQDFSINDSMKSNSSLQGDIIPNSDTGGLPFSRSAVNLETGWKPRGILVAHLQEHRSSVNDIAVSNDNTLFVTASDDSSIKIWDTRKLEKDIAFRSRLTYSMGNSRALCTTMVHGTSQVIVGASDGTLHLFSVDCARSVGKGL

SEQ ID NO: 35959 - protein, 924 aa, Zea mays subsp. mays
MDIFSLGCVLAELFLEGQPLFELSQLLAYRRGQYDPIHTLEKIQDTGIRDMILHMIQLDPKKRVPCRSYLQKYESVVFPFYFSKFLHKFFSDIVPLDSDARVEKTQENFGKIQEIMMGSSTIEQIERSTSCEHSEPSGRKGMEGEILNSPGNYRNSTSVFKKKTPVDHQHIIGDINFLLKEVEGRSNNTSTKVTKDTYHFVAPSITCANGVQSSHLVNPAGRQIGTGLMGHKHVVSHVKISKSNIRSLVATYDDQSDTYSFDIFQQTDSKVSCEGMVLLASLLCSCISSVKKPELRRASLILLKFSSTYIDDDSRLQLVVPYVITMLSDPSAIVRCAALETLCDVLCLVQDFPISDAVIFPEYILPMLSLLPDDTEESVRVCYASNIHKLALTAYRFLLRSRSIADIRPLDESVVAHRSQSADSPAKRQDNFFRQLAELRKSIYEIVQDLVMGQKQTPNTRRALLQDIGYLCYFFGHKQSNDFLLPILPAFLNDHDEQLRAVFFGQIVYVCYFIGARSVEEYLLPYLEQALSDDMEAVLVNALDCLTMMCRSGYLRKRVIVGLLVKILPLLRYPINWVKQSAVRFVAACSESLGSVDTYVYLSPHLRQFLHMEPPSLASETALLSCLKPPLPKSIFYEGLEHAQDIGDILLKSSGKKEQIVHGGRYPGTAQSGSLANLEDILRPKGPNISSSMSLYVKNSVSFEKSLYSGFALHASAANSSFYDGLSKGIPSYSFCTDNKRGLGETHMVPDSSVYKASIRLPWLEPNRPAMQTRDDHFSSTRQDFSINDSMKSNSSLQGDIIPNSDTGGLPFSRSAVNLETGWKPRGILVAHLQEHRSSVNDIAVSNDNTLFVTASDDSSIKIWDTRKLEKDIAFRSRLTYSMGNSRALCTTMVHGTSQVIVGASDGTLHLFSVDCARSVGKGL

SEQ ID NO: 35960 - protein, 874 aa, Zea mays subsp. mays
MILHMIQLDPKKRVPCRSYLQKYESVVFPFYFSKFLHKFFSDIVPLDSDARVEKTQENFGKIQEIMMGSSTIEQIERSTSCEHSEPSGRKGMEGEILNSPGNYRNSTSVFKKKTPVDHQHIIGDINFLLKEVEGRSNNTSTKVTKDTYHFVAPSITCANGVQSSHLVNPAGRQIGTGLMGHKHVVSHVKISKSNIRSLVATYDDQSDTYSFDIFQQTDSKVSCEGMVLLASLLCSCISSVKKPELRRASLILLKFSSTYIDDDSRLQLVVPYVITMLSDPSAIVRCAALETLCDVLCLVQDFPISDAVIFPEYILPMLSLLPDDTEESVRVCYASNIHKLALTAYRFLLRSRSIADIRPLDESVVAHRSQSADSPAKRQDNFFRQLAELRKSIYEIVQDLVMGQKQTPNTRRALLQDIGYLCYFFGHKQSNDFLLPILPAFLNDHDEQLRAVFFGQIVYVCYFIGARSVEEYLLPYLEQALSDDMEAVLVNALDCLTMMCRSGYLRKRVIVGLLVKILPLLRYPINWVKQSAVRFVAACSESLGSVDTYVYLSPHLRQFLHMEPPSLASETALLSCLKPPLPKSIFYEGLEHAQDIGDILLKSSGKKEQIVHGGRYPGTAQSGSLANLEDILRPKGPNISSSMSLYVKNSVSFEKSLYSGFALHASAANSSFYDGLSKGIPSYSFCTDNKRGLGETHMVPDSSVYKASIRLPWLEPNRPAMQTRDDHFSSTRQDFSINDSMKSNSSLQGDIIPNSDTGGLPFSRSAVNLETGWKPRGILVAHLQEHRSSVNDIAVSNDNTLFVTASDDSSIKIWDTRKLEKDIAFRSRLTYSMGNSRALCTTMVHGTSQVIVGASDGTLHLFSVDCARSVGKGL

SEQ ID NO: 35961 - DNA, 788 bp, Zea mays subsp. mays
  misc_feature (499)..(499): n is a, c, g, or t
agaccattacctagaacatcctaatcaaaaaaccaacacacacaaattcgttcgcagcaagtaatggcgagaacgagagagaagctgacgctcctggtggccgcagtcgccgtgggcctcttgctagccggcggcgcgggcgcgggcgtggcgtcggcggcttgtggccgtgaggggcggcggcgcgtgcacctgcggctgtacatgcacgacgtgatcggcgggccgaaccggacggccatccgcctcatctggggcgtgggcccgccgcacgcgtccatgccggggcgcaccttcggcgacacggtggccatcgacgacctcgtcacggacgggcccggcgtcggcgcagactccaggcccgtcggcgcgcgcagggcacctacatgctgagctcgcagcacgaggaggtgatcgtggtcagcatcaccgtcgtcctcaccgcggggccgtacaacggcagcaccctcgtggtggccggccgcgacaggatctacgnccagacgagggagctcgcggtggtccggcggcaccgggggactccgcggggcctccgggtacgtgctgtggacgacggccaaggtgtggtcggaggtgcacatggtgctggagctcgacgtgcacgcgtccgtgccactgcccgacgaggacgacgacgacaacgacgttctcgttcttggcagtagggatgcgtagtaagatagacatggtctgtatctgtccctgtctacctccgatcccatcaatgaataaataaacaaatataaaaggagcttgaattttagctc

SEQ ID NO: 35962 - protein, 109 aa, Zea mays subsp. mays
MARTREKLTLLVAAVAVGLLLAGGAGAGVASAACGREGRRRVHLRLYMHDVIGGPNRTAIRLIWGVGPPHASMPGRTFGDTVAIDDLVTDGPGVGADSRPVGARRAPTC

SEQ ID NO: 35963 - protein, 99 aa, Zea mays subsp. mays
  misc_feature (38)..(38): Xaa can be any naturally occurring amino acid
MLSSQHEEVIVVSITVVLTAGPYNGSTLVVAGRDRIYXQTRELAVVRRHRGTPRGLRVRAVDDGQGVVGGAHGAGARRARVRATARRGRRRQRRSRSWQ

SEQ ID NO: 35964 - protein, 62 aa, Zea mays subsp. mays
MHDVIGGPNRTAIRLIWGVGPPHASMPGRTFGDTVAIDDLVTDGPGVGADSRPVGARRAPTC

SEQ ID NO: 35965 - DNA, 1454 bp, Zea mays subsp. mays
gcacgagaccattacctagaacatcctaatcgaaaaagatttggtggaggccaaaaagaccatgccagttgcagggaagattaatgtcactccagtggaggagaaaacaagtgaagaagaacctgtagtctatgccactaagatggaagcaaaaaatgcgttcaagtccctgcttgagtcggtaaatgtggagtctgattggacatgggatcagactatgagagtcatcataaatgacaaaagatatggtgctttgaaaactcttggagagagaaagcaagctttcaatgagtacttgaaccagcgcaaaaagtttgaagccgaagaaaaacgtatcaaacagaggaaagcacgtgatgatttccttgcaatgttggaagaaagcaaggagcttacatcatcaacaagatggagcaaagcaatacttatgtttgaagatgatgaaagattcaaagcagttgagcgtccaagggagcgtgaagatttatttgagaactatcttgtggaactgcataagaaggaaaaagccaaggctgctgaagaacacaaaagatatgtagcagaatacagagcttttctagaatcatgtgacttcatcaaggcaagcactcagtggagaaaagttcaggaacctggaggacgatgaacgttattcccgacttgagaagtttgatcggttggatatttttcaagagtacattcgacacctagagaaagaagaggaagagcagaagcgggtacaaaaggatcaagtgagaagacaagagaggaaaaaccgtgatgggtttcgtaaaatgttggaagaacatgttgctgatggcacacttaatgcaagaactcggtggcgtgattactgtgcacagataaaagattcacagtcctacttggctgtagcatcaaacacatctggctctacaccgaaagagttatttgatgacgtgatcgaggaacttggcaaacagtatcaagaagacaagatccaaattaaagaagtggtgaaatctggaaagattcctatgacaacttcatggacattagaggaattccaaactgctactctggaggatgatgctcttaaaggaatatcaaccatcaacatcaagcttgtatatgacgatcagcttgaaaggctcaaggaaaaagagcaaaaggacgctaagaagcgccagcgcttgggtgaaaatttttcagatcttttgtattccatcaaggaaatatcagcttcttcaacatgggatgattctaaacagcttttcgaggatagccaagagttcagggccttggacagtgagacttatgcaagagagctttttgaagagtgcgttgtccacctgaaagaaaggttaaaagagaaagaacgtttgagggaggaagaaaaggcaaaaagagagaaagagcgtgaggagaaagagaagaagaaagagaaagagaaagaaaggaaggagaaagaacgc

SEQ ID NO: 35966 - protein, 220 aa, Zea mays subsp. mays
MLEEHVADGTLNARTRWRDYCAQIKDSQSYLAVASNTSGSTPKELFDDVIEELGKQYQEDKIQIKEVVKSGKIPMTTSWTLEEFQTATLEDDALKGISTINIKLVYDDQLERLKEKEQKDAKKRQRLGENFSDLLYSIKEISASSTWDDSKQLFEDSQEFRALDSETYARELFEECVVHLKERLKEKERLREEEKAKREKEREEKEKKKEKEKERKEKER

SEQ ID NO: 35967 - protein, 194 aa, Zea mays subsp. mays
MPVAGKINVTPVEEKTSEEEPVVYATKMEAKNAFKSLLESVNVESDWTWDQTMRVIINDKRYGALKTLGERKQAFNEYLNQRKKFEAEEKRIKQRKARDDFLAMLEESKELTSSTRWSKAILMFEDDERFKAVERPREREDLFENYLVELHKKEKAKAAEEHKRYVAEYRAFLESCDFIKASTQWRKVQEPGGR

SEQ ID NO: 35968 - protein, 167 aa, Zea mays subsp. mays
MEAKNAFKSLLESVNVESDWTWDQTMRVIINDKRYGALKTLGERKQAFNEYLNQRKKFEAEEKRIKQRKARDDFLAMLEESKELTSSTRWSKAILMFEDDERFKAVERPREREDLFENYLVELHKKEKAKAAEEHKRYVAEYRAFLESCDFIKASTQWRKVQEPGGR

SEQ ID NO: 35969 - DNA, 2306 bp, Zea mays subsp. mays
accgcctccgcaccgcagagccgcagccaagcaagctgcgcccctggacttggcctcaccggtgaagcggagctcgaggataggcggtgctcgggagataccaagcggtcggccgcaggcgccacgtcggcggagatgacggacggtcaccacttcaacaacatcctcctcggagggcgcggcggcacaaaccctggtcagtttaaagtgcattctggtggacttgcatggaagagacaaggtggaggaaagaccattgagatcgacaaagctgatgtaaccgcagttacttggatgaaagtccccagagcatatcagcttggagtcaggattaaggctggcctgttctacagatttattggcttccgtgaacaggatgtaagcaacttgaccaacttcatacaaaagaatatgggtgtcacaccagatgaaaaacagctttctgttagtggccagaattggggagggattgatatagatggaaacatgctaacctttatggttggttcaaagcaagcatttgaggtgtccctaccagatgttgcacaaacccagatgcaaggaaaaacagatgttctcttagagcttcatgttgatgatactactggagccaatgagaaagactccctcatggatttgagttttcatgtgcctacttcgaatactcagtttgttggggatgagagtcgccctccggctcatattttatgggagaccatattgaaatttgctgatgttggttcttctgaagaaccagttgtcacatttgaaggaattgcgattcttacaccaagaggacgttatagtgttgaacttcatctgtcatttctgcgactccaaggacaagctaacgattttaaaatccaatacagcagtattgttcgcctctttcttttgccaaagtcaaacaatcctcatacatttgttgttatcactcttgacccaccaatccgtaaaggacaaacattgtatcctcacattgttattcagtttgagacagaggcagtagtggaaagagatctggcattgagtaaagagctgttggttgaaaaatacaaggacaggctcgaggaatcttacaagggtctaatacatgaggtatttaccaaagttcttcgtggtctatctggtgctaaagtcacaaggccaggttctttcagaagttgccaagatggatatgcagttaaatcatctctcaaagctgaagatggactgttgtatccacttgaaaagggtttctttttcctgccaaagccacctacactcattcttcatgaggagattgagtttgttgagtttgaacgtcatggtgctgggggtgccagtatatcatctcactattttgacctccttgtcaaactgaaaaatgaccaagagcatctcttcagaaacattcaaaggaatgaataccacaacctcttcaatttcatcaatggaaagaacattaaaataatgaaccttggaggagatggtcaaggtgcaagtggtgtagttacagatgttctacgagacactgatgatgatgctgttgatccacatctagagcgtattaagaatcaggccggggatgaggaaagcgatgaagaggatgaagattttgttgcagacaaggatgatagtggatctcctactgatgactcaggtgatgaggaatcagatgctagtgatagtggtggtgaaaaggagaaatcatccaagaaggaagcaagcagttcaaagccagttcagaaaagaaagcataaggccagggatgacgaaggacaagagaagaaaaagccaaagaagaaaaaagatccgaatgctccgaaacgagccatgaccccgttcatgtatttctcaatggctgagcgaggaaacatgaagagcagcaacccagatttgcctacgactgagatcgcaaagaagcttggggagatgtggcaaaagatgtcaggcgaagagaaacagccttacatccagcaggcccaggtcgacaagaaacgttatgaaaaagaatccgctgtctatcgcggtgaagctacagtcgatgtggattctgggaacgagtctgactagagatccaagctcttgggctggcatggtggcacgggacgaaagtctagtgccatgtgtgctattgttatgtcagcaactgttgcctccaacattgctgacagtaaagagagtttctctcgcagcgtacctctgcagggcaaaagaatgtacgagtgtagtctagtgattttgtgtaaaacaaccaacatacgtggttttttgagagatggtaagacgtcaatttaactgttgtcgattggctgttttgcccc

SEQ ID NO: 35970 - protein, 684 aa, Zea mays subsp. mays
TASAPQSRSQASCAPGLGLTGEAELEDRRCSGDTKRSAAGATSAEMTDGHHFNNILLGGRGGTNPGQFKVHSGGLAWKRQGGGKTIEIDKADVTAVTWMKVPRAYQLGVRIKAGLFYRFIGFREQDVSNLTNFIQKNMGVTPDEKQLSVSGQNWGGIDIDGNMLTFMVGSKQAFEVSLPDVAQTQMQGKTDVLLELHVDDTTGANEKDSLMDLSFHVPTSNTQFVGDESRPPAHILWETILKFADVGSSEEPVVTFEGIAILTPRGRYSVELHLSFLRLQGQANDFKIQYSSIVRLFLLPKSNNPHTFVVITLDPPIRKGQTLYPHIVIQFETEAVVERDLALSKELLVEKYKDRLEESYKGLIHEVFTKVLRGLSGAKVTRPGSFRSCQDGYAVKSSLKAEDGLLYPLEKGFFFLPKPPTLILHEEIEFVEFERHGAGGASISSHYFDLLVKLKNDQEHLFRNIQRNEYHNLFNFINGKNIKIMNLGGDGQGASGVVTDVLRDTDDDAVDPHLERIKNQAGDEESDEEDEDFVADKDDSGSPTDDSGDEESDASDSGGEKEKSSKKEASSSKPVQKRKHKARDDEGQEKKKPKKKKDPNAPKRAMTPFMYFSMAERGNMKSSNPDLPTTEIAKKLGEMWQKMSGEEKQPYIQQAQVDKKRYEKESAVYRGEATVDVDSGNESD

SEQ ID NO: 35971 - protein, 639 aa, Zea mays subsp. mays
MTDGHHFNNILLGGRGGTNPGQFKVHSGGLAWKRQGGGKTIEIDKADVTAVTWMKVPRAYQLGVRIKAGLFYRFIGFREQDVSNLTNFIQKNMGVTPDEKQLSVSGQNWGGIDIDGNMLTFMVGSKQAFEVSLPDVAQTQMQGKTDVLLELHVDDTTGANEKDSLMDLSFHVPTSNTQFVGDESRPPAHILWETILKFADVGSSEEPVVTFEGIAILTPRGRYSVELHLSFLRLQGQANDFKIQYSSIVRLFLLPKSNNPHTFVVITLDPPIRKGQTLYPHIVIQFETEAVVERDLALSKELLVEKYKDRLEESYKGLIHEVFTKVLRGLSGAKVTRPGSFRSCQDGYAVKSSLKAEDGLLYPLEKGFFFLPKPPTLILHEEIEFVEFERHGAGGASISSHYFDLLVKLKNDQEHLFRNIQRNEYHNLFNFINGKNIKIMNLGGDGQGASGVVTDVLRDTDDDAVDPHLERIKNQAGDEESDEEDEDFVADKDDSGSPTDDSGDEESDASDSGGEKEKSSKKEASSSKPVQKRKHKARDDEGQEKKKPKKKKDPNAPKRAMTPFMYFSMAERGNMKSSNPDLPTTEIAKKLGEMWQKMSGEEKQPYIQQAQVDKKRYEKESAVYRGEATVDVDSGNESD

SEQ ID NO: 35972 - protein, 586 aa, Zea mays subsp. mays
MKVPRAYQLGVRIKAGLFYRFIGFREQDVSNLTNFIQKNMGVTPDEKQLSVSGQNWGGIDIDGNMLTFMVGSKQAFEVSLPDVAQTQMQGKTDVLLELHVDDTTGANEKDSLMDLSFHVPTSNTQFVGDESRPPAHILWETILKFADVGSSEEPVVTFEGIAILTPRGRYSVELHLSFLRLQGQANDFKIQYSSIVRLFLLPKSNNPHTFVVITLDPPIRKGQTLYPHIVIQFETEAVVERDLALSKELLVEKYKDRLEESYKGLIHEVFTKVLRGLSGAKVTRPGSFRSCQDGYAVKSSLKAEDGLLYPLEKGFFFLPKPPTLILHEEIEFVEFERHGAGGASISSHYFDLLVKLKNDQEHLFRNIQRNEYHNLFNFINGKNIKIMNLGGDGQGASGVVTDVLRDTDDDAVDPHLERIKNQAGDEESDEEDEDFVADKDDSGSPTDDSGDEESDASDSGGEKEKSSKKEASSSKPVQKRKHKARDDEGQEKKKPKKKKDPNAPKRAMTPFMYFSMAERGNMKSSNPDLPTTEIAKKLGEMWQKMSGEEKQPYIQQAQVDKKRYEKESAVYRGEATVDVDSGNESD

SEQ ID NO: 35973 - DNA, 1015 bp, Zea mays subsp. mays
gaacttaatcacacacaaggagagaagagagaaagagagaaagagagacagagataatggcgtacagtgcgtgtttcctacaccagagcgcattggcttcatcagccgcacgatcatcatcttcctcctcatcccagcgtcacgtgtcgctctccaaacctgttcagatcatctgtaaagctcaacagtctcatgaagacgataactccgccgtctcccgccgtcttgctctcactctcctcgtcggcgccgctgctgttggttccaaagtatctcctgctgatgccgcctacggtgaagctgcaaacgtgtttgggaagccaaagacgaacacagacttcttgccatacaatggagatgggttcaaagtgcaggttccagcaaaatggaacccaagcaaagagattgagtatccaggacaagtccttaggttcgaagacaacttcgatgctactagcaatctcaatgtcatggtcactcctaccgacaagaagtccatcactgattacggttctcccgaagagttcctctctcaggttaattacctcctagggaaacaagcttacttcggtgagactgcctctgagggaggctttgacaacaatgcagtggcaacagcaaacattctggagtcatcatctcaggaagttggtgggaaaccctactattacttgtctgtgttgacaagaacggctgatggagacgaaggtgggaagcatcagctgatcacagcaaccgtgaatggagggaagctttacatctgcaaagcacaagctggagacaagaggtggttcaagggagccaggaaatttgtcgagagcgcagccacttctttcagtgttgcttgagtgaaagcaacacaacgtaacaatgctctgcttgctttcttcatttgtctcttgtaaaaaatggaaaatgaaactgagcttttgagaactatcaagatgatgttaccttttcggcatcacttgtgtacctatgataccagactcgtttccaagttttcttaaaaaac

SEQ ID NO: 35974 - protein, 263 aa, Zea mays subsp. mays
MAYSACFLHQSALASSAARSSSSSSSQRHVSLSKPVQIICKAQQSHEDDNSAVSRRLALTLLVGAAAVGSKVSPADAAYGEAANVFGKPKTNTDFLPYNGDGFKVQVPAKWNPSKEIEYPGQVLRFEDNFDATSNLNVMVTPTDKKSITDYGSPEEFLSQVNYLLGKQAYFGETASEGGFDNNAVATANILESSSQEVGGKPYYYLSVLTRTADGDEGGKHQLITATVNGGKLYICKAQAGDKRWFKGARKFVESAATSFSVA

SEQ ID NO: 35975 - DNA, 1495 bp, Zea mays subsp. mays
accaccgcagccgcagcacaatcgcctcgccttcccttccccaccagcccccgtctctctctctctctttctctctctcgtagccgcgtccacctcgcagcagcaagcaagcgcgaccaaatggcgcctctaggagacggcggagctgttgccgcggcggcgtccaacaacctggtggtgtcgttcggcgagatgctgatcgacttcgtccccgacgtggccggcctgtcgctggccgagtcgggcggcttcgtcaaggcccccggcggcgcgcccgccaacgtcgcctgcgccatcgccaagctcggcggctcctccgccttcgtcggcaagttcggcgacgacgagttcgggcacatgttggtgaacatcctgaagcagaacaacgtgaactcggaggggtgcctgttcgacaagcacgcgcggacggcgctggccttcgtgaccctcaagcacgacggggagcgcgagttcatgttctacaggaacccgagcgcggacatgctgctgacggaggcggagctggacctgggcctggtgcggcgcgacagggtgttccactacggctccatctcgctcatctccgagccgtgccgctcggcgcacatggccgccatgcgcgcagccaaggcggcgggcgtgctctgctcctacgaccccaacgtgcgcctcccgctctggccgtcgcccgacgccgcacgcgagggcatcctcagcatctggaaggaggccgacttcatcaaggtcagcgacgacgaggtggccttcctcacgcgcggggacgccaacgacgagaagaacgtgctgtccctgtggtttgacgggctcaagctgctcgtcgtcaccgacggggacaagggatgcaggtacttcaccaaggacttcaagggcagcgtgcccggcttcaaggtcgacaccgtcgacaccaccggcgccggcgacgccttcgtcggctccctcctcgtcaacgtcgccaaggacgactccatcttccacaacgaggagaagctccgcgaggccctcaagttctccaacgcctgcggcgccatctgcaccaccaagaagggcgccatcccggcgctgcccacggtcgccaccgcccaggacctcatcgccaaggccaactagatggccgcacgccccgccgttccaccacgtcactgtcccccgccgccccgcccctcgtcgtcgacgtcctcggtttcggttcattaggtagatcgagtcttagcgtccgtctctgcgcctctacgctgagacggtttgtttgggttaattaagttagctttcgtggagatttcgccccggggcatcaataaaatgttggcatgcgtggtgggatgctatccttttttttattttattttattttatttttagcttggatcagttggggttttgaacattgctagtgtcgtgtgattgggaaggctaatgtgatgccttcgatgcagagttttcaatgaatgccttggtgcaaacgtacgattgtgtg

SEQ ID NO: 35976 - protein, 375 aa, Zea mays subsp. mays
TTAAAAQSPRLPFPTSPRLSLSLSLSRSRVHLAAASKRDQMAPLGDGGAVAAAASNNLVVSFGEMLIDFVPDVAGLSLAESGGFVKAPGGAPANVACAIAKLGGSSAFVGKFGDDEFGHMLVNILKQNNVNSEGCLFDKHARTALAFVTLKHDGEREFMFYRNPSADMLLTEAELDLGLVRRDRVFHYGSISLISEPCRSAHMAAMRAAKAAGVLCSYDPNVRLPLWPSPDAAREGILSIWKEADFIKVSDDEVAFLTRGDANDEKNVLSLWFDGLKLLVVTDGDKGCRYFTKDFKGSVPGFKVDTVDTTGAGDAFVGSLLVNVAKDDSIFHNEEKLREALKFSNACGAICTTKKGAIPALPTVATAQDLIAKAN

SEQ ID NO: 35977 - protein, 335 aa, Zea mays subsp. mays
MAPLGDGGAVAAAASNNLVVSFGEMLIDFVPDVAGLSLAESGGFVKAPGGAPANVACAIAKLGGSSAFVGKFGDDEFGHMLVNILKQNNVNSEGCLFDKHARTALAFVTLKHDGEREFMFYRNPSADMLLTEAELDLGLVRRDRVFHYGSISLISEPCRSAHMAAMRAAKAAGVLCSYDPNVRLPLWPSPDAAREGILSIWKEADFIKVSDDEVAFLTRGDANDEKNVLSLWFDGLKLLVVTDGDKGCRYFTKDFKGSVPGFKVDTVDTTGAGDAFVGSLLVNVAKDDSIFHNEEKLREALKFSNACGAICTTKKGAIPALPTVATAQDLIAKAN

SEQ ID NO: 35978 - protein, 311 aa, Zea mays subsp. mays
MLIDFVPDVAGLSLAESGGFVKAPGGAPANVACAIAKLGGSSAFVGKFGDDEFGHMLVNILKQNNVNSEGCLFDKHARTALAFVTLKHDGEREFMFYRNPSADMLLTEAELDLGLVRRDRVFHYGSISLISEPCRSAHMAAMRAAKAAGVLCSYDPNVRLPLWPSPDAAREGILSIWKEADFIKVSDDEVAFLTRGDANDEKNVLSLWFDGLKLLVVTDGDKGCRYFTKDFKGSVPGFKVDTVDTTGAGDAFVGSLLVNVAKDDSIFHNEEKLREALKFSNACGAICTTKKGAIPALPTVATAQDLIAKAN

SEQ ID NO: 35979 - DNA, 575 bp, Zea mays subsp. mays
gccaatcaagaaacgagagagcatagatcatatcagaacgaagaacaaaaaccaacaagtcaatatggccgacggctctgctttgtgcattattatcattactttattcataccacctctcggcgtcttcctgatctcaggctgtagcgttgacttgctaatcaacatccttctcaccattctcggatacttcccaggccacatacatgcctattacctagaatatgtgtattaccatcgtcgcggtcttgctgctggcggaacgacgtttgcgaagcccgctacgggagtttattccgagcggattcagtcgggaggtcatcatcagcagacgcaatatgggactatacggacttgatcgagcgtggcttattggaaagtggctagtcattagagatttgcagcttgagtctttgcatgtctagttaggggtgggagtttgggtaggttggcagtggtggatgatacctatttgttatggcgtcggtttgggaggttttgtcgaaagctagttactgggttacttgatattggtgcccattaagtatagctttaataccatggttttacgattt

SEQ ID NO: 35980 - protein, 118 aa, Zea mays subsp. mays
PIKKRESIDHIRTKNKNQQVNMADGSALCIIIITLFIPPLGVFLISGCSVDLLINILLTILGYFPGHIHAYYLEYVYYHRRGLAAGGTTFAKPATGVYSERIQSGGHHQQTQYGTIRT

SEQ ID NO: 35981 - protein, 97 aa, Zea mays subsp. mays
MADGSALCIIIITLFIPPLGVFLISGCSVDLLINILLTILGYFPGHIHAYYLEYVYYHRRGLAAGGTTFAKPATGVYSERIQSGGHHQQTQYGTIRT

SEQ ID NO: 35982 - protein, 66 aa, Zea mays subsp. mays
MCITIVAVLLLAERRLRSPLREFIPSGFSREVIISRRNMGLYGLDRAWLIGKWLVIRDLQLESLHV

SEQ ID NO: 35983 - DNA, 1099 bp, Zea mays subsp. mays
ccaaaagggtcacagttccgcctccttttcctgccttcctcctcactagtcgctcccccgcggctcgcgcaggcgggcgacacaacgaggctaaatccctatcgcgaggaggcgtgtgaggccagcggctttgcgatgacagcaccagcggacaaggggaagaaggccaagactgatgccgacggcggcgaggagaacgaacagatcgacggcgtcctcgtcctctccatcgagaagctccaggagatacaggacgagctcgagaaggtaaatgaggaagcaagtgacaaggttatggaggtggagcagaaatacagtgagatccgcagacctgtctatctcaagaggggtgacattatcaagaccatcccggacttttggctcacagcgtttatgagccatcctctattaagtgagcttctgactgaagaggaccagaagatattcaagtacttagactccattgatgtggatgattctgatgttaaggcaggatactccattcatcttaacttctctgagaacccgtactttgaggacacaaagcttgcaaagacctatatctttgctgatgatggaacaaccacaataaaagcttccgaaattaagtggaaggaaggaatgggacctgcaaatggaaatggtattaacaagaaggggagtaagcggccattagtagaggaaagtttttttagctggtttggtgatacagagctcaagagtcttgctgatggtgtgcaagatgaggtggcggagatcataaaggaagatttgtggcctaatcctttgaagtacttcaacaatgaggttgacgatgaatttgaaggagatgaagatgatgatgatttggatggtgatgatgacgatgaaggcgatgatttggagaactgagcccttgcgcttggttcagaatgttgtccgtggatgatgtggctgggcggaactgtgacccttttgggagattttttgttgttgttgtttgacttagctggaactcaacgtagggaactgtttaatgccttatgaagtcaaccaacttgaaaggagactgcttatatcataatctcggtatatctatctagcaacgcaatttgacccc

SEQ ID NO: 35984 - protein, 296 aa, Zea mays subsp. mays
PKGSQFRLLFLPSSSLVAPPRLAQAGDTTRLNPYREEACEASGFAMTAPADKGKKAKTDADGGEENEQIDGVLVLSIEKLQEIQDELEKVNEEASDKVMEVEQKYSEIRRPVYLKRGDIIKTIPDFWLTAFMSHPLLSELLTEEDQKIFKYLDSIDVDDSDVKAGYSIHLNFSENPYFEDTKLAKTYIFADDGTTTIKASEIKWKEGMGPANGNGINKKGSKRPLVEESFFSWFGDTELKSLADGVQDEVAEIIKEDLWPNPLKYFNNEVDDEFEGDEDDDDLDGDDDDEGDDLEN

SEQ ID NO: 35985 - protein, 251 aa, Zea mays subsp. mays
MTAPADKGKKAKTDADGGEENEQIDGVLVLSIEKLQEIQDELEKVNEEASDKVMEVEQKYSEIRRPVYLKRGDIIKTIPDFWLTAFMSHPLLSELLTEEDQKIFKYLDSIDVDDSDVKAGYSIHLNFSENPYFEDTKLAKTYIFADDGTTTIKASEIKWKEGMGPANGNGINKKGSKRPLVEESFFSWFGDTELKSLADGVQDEVAEIIKEDLWPNPLKYFNNEVDDEFEGDEDDDDLDGDDDDEGDDLEN

SEQ ID NO: 35986 - protein, 198 aa, Zea mays subsp. mays
MEVEQKYSEIRRPVYLKRGDIIKTIPDFWLTAFMSHPLLSELLTEEDQKIFKYLDSIDVDDSDVKAGYSIHLNFSENPYFEDTKLAKTYIFADDGTTTIKASEIKWKEGMGPANGNGINKKGSKRPLVEESFFSWFGDTELKSLADGVQDEVAEIIKEDLWPNPLKYFNNEVDDEFEGDEDDDDLDGDDDDEGDDLEN

SEQ ID NO: 35987 - DNA, 1541 bp, Zea mays subsp. mays
ccacgccgttggacaaggaccccatcgccatcggcgcgttcgcagcggtgaccaagggcgtcctcgtagtgtgcgccggcggcaacagtggccctctgccctccacgctgtccaacgaagcgccgtgggtattgaccgtggcggccgggtctgtagaccggagcttccgtgccagcgtgcggcttggcgacggcgagatgttcgaaggcgagtcgctggttcaggacaaggacttcagctccaaagtgtatccgctgtactactcaaacggcttgaactactgcgattacttcgacgccaacatcaccggcatggtggtcgtgtgcgacaccgagacaccggtgccacccatgagctcgatcgaggcggtcagcaatgctggcggcgccggcgttgtgttcatcaacgaaccggacttcggatacaccatcgtcgtggagaagtacgacaacctccccatgtcgcaggtgaccgcggtggacggcacaaagataatgggctacgccatgaagggtacgtcgacgagcaaccatacggcaacgatcgtgttcaacagcacagtcgttggggtgaagccgtcgccgatcgtggcagccttctcgtcgcgcggccccagcgtcgccagccccggagtgctgaagcccgacatcatggcgccggggctcaacatactcgccgcgtggccgtcggaggtgcccgtcggggccccccagtcgagcagcttcaacgtcgtctccggcacgtccatggcgacgccgcatatcaccggcgtcgcggccctcgtcaagaaggtgcacccggactggtccaccgccgcgatcaagtccgccatcatgaccacctccagcgccgtcgacaacgcgggcaaccagatcatggacgaggagcaccggaaggcgagcttctactccgtcggcgccggccacgttgtcccggcgaaggccgtagaccccggcctggtgtacgacctcggcgtccacgactacgccggctacatctgcaggctcctcggcgaggcggccctgaaaatcatagccataaacaccaacttgacttgcgctgagctcgagcctgtcaccggagcgcagctgaattacccggcgatactagtgccgctgcgagctgaggcgttcgccgtgaaccggacggtgacgaacgtcggaccagcgaggtcgaactacaccgccaagatcgaagcgccgaaaggcctgacagtcaaggtggagccggcggagctggagttcacgaaggtaaatgagaggaagacgttcacggtcacagtgagcgccgcagccggagccagcagcgagcaggagctcgccgaggggaccctgagctggctgtcccacgaccatgattatgtcgtgaggagcccaatcttggccgactccagacttaccttgagttgattgacacggtcacaccgctgcgcctgcgctgtccattgcgttccgcgcgcgtatgtactacctccgtaaaaaaatgtcagtcttacttttgagctttataaataaatatatacacaaatactaatatttatg

SEQ ID NO: 35988 - protein, 468 aa, Zea mays subsp. mays
TPLDKDPIAIGAFAAVTKGVLVVCAGGNSGPLPSTLSNEAPWVLTVAAGSVDRSFRASVRLGDGEMFEGESLVQDKDFSSKVYPLYYSNGLNYCDYFDANITGMVVVCDTETPVPPMSSIEAVSNAGGAGVVFINEPDFGYTIVVEKYDNLPMSQVTAVDGTKIMGYAMKGTSTSNHTATIVFNSTVVGVKPSPIVAAFSSRGPSVASPGVLKPDIMAPGLNILAAWPSEVPVGAPQSSSFNVVSGTSMATPHITGVAALVKKVHPDWSTAAIKSAIMTTSSAVDNAGNQIMDEEHRKASFYSVGAGHVVPAKAVDPGLVYDLGVHDYAGYICRLLGEAALKIIAINTNLTCAELEPVTGAQLNYPAILVPLRAEAFAVNRTVTNVGPARSNYTAKIEAPKGLTVKVEPAELEFTKVNERKTFTVTVSAAAGASSEQELAEGTLSWLSHDHDYVVRSPILADSRLTLS

SEQ ID NO: 35989 - protein, 403 aa, Zea mays subsp. mays
MFEGESLVQDKDFSSKVYPLYYSNGLNYCDYFDANITGMVVVCDTETPVPPMSSIEAVSNAGGAGVVFINEPDFGYTIVVEKYDNLPMSQVTAVDGTKIMGYAMKGTSTSNHTATIVFNSTVVGVKPSPIVAAFSSRGPSVASPGVLKPDIMAPGLNILAAWPSEVPVGAPQSSSFNVVSGTSMATPHITGVAALVKKVHPDWSTAAIKSAIMTTSSAVDNAGNQIMDEEHRKASFYSVGAGHVVPAKAVDPGLVYDLGVHDYAGYICRLLGEAALKIIAINTNLTCAELEPVTGAQLNYPAILVPLRAEAFAVNRTVTNVGPARSNYTAKIEAPKGLTVKVEPAELEFTKVNERKTFTVTVSAAAGASSEQELAEGTLSWLSHDHDYVVRSPILADSRLTLS

SEQ ID NO: 35990 - protein, 365 aa, Zea mays subsp. mays
MVVVCDTETPVPPMSSIEAVSNAGGAGVVFINEPDFGYTIVVEKYDNLPMSQVTAVDGTKIMGYAMKGTSTSNHTATIVFNSTVVGVKPSPIVAAFSSRGPSVASPGVLKPDIMAPGLNILAAWPSEVPVGAPQSSSFNVVSGTSMATPHITGVAALVKKVHPDWSTAAIKSAIMTTSSAVDNAGNQIMDEEHRKASFYSVGAGHVVPAKAVDPGLVYDLGVHDYAGYICRLLGEAALKIIAINTNLTCAELEPVTGAQLNYPAILVPLRAEAFAVNRTVTNVGPARSNYTAKIEAPKGLTVKVEPAELEFTKVNERKTFTVTVSAAAGASSEQELAEGTLSWLSHDHDYVVRSPILADSRLTLS

SEQ ID NO: 35991 - DNA, 1405 bp, Zea mays subsp. mays
gcacgagaccattacctagaacatcctaatcgaaaaacccctaggaaacgacgaccgcaactacataccagccagccgacccgacccccagcagtcttgcaggctacagcccctgcggcaccagagggagcggccgcggcagggcgtcctcgtcgccgcggcagggcgctagggcaggcaggcatgcgctgatggaattcacggcccaggagggggaggagcccgtctcggaggagatgggcgcgagctccgcgccgccgccctgcctcggccccggccgcggcacggggaaccagaaccacgccgccgaggcgacgtaccacgagtgtctgcgcaaccacgcggcggcgctgggcggacacgtcgtcgatggctgcggcgagttcatgcccgaggacgccgacaggctcaagtgcgcagcctgcggctgccaccgcagcttccaccgcaagggcgacgcggggcgccgccaccagctcctgctgccgccgcccgccgcggcggtcccgcgcgtcccgctgctcctgcctccgccccacccctacgcggccggctgctgcccacccccactacgcgtcgccgccgctgttcccgtaccacggcacgcccagcggcaccacgaccgagtcgtccagcgaggagcgtggcccgccgtccgggttcgccgccgcgccgcacgcgcacgcgcagggccacgtccggcggaagcggatccggaccaagttcacgccggagcagaaggagcagatgctggcgttcgcggaacgcctcggctggcggatgcagaagcaggacgacgcgctggtgcagcacttctgcgaccaggtcggcgtccggcggcaggtcttcaaggtctggatgcacaacaacaagcacatcggcagcggcggcaggaggcagccgccgccgcacctgccgcctcccgaggggcagcaacagccccagcagccccagtagccacggtgggagacaaggctcagcagtcagcagcaccaccaccaccaccaccatttgcttaatcccccgcctcatttttttatgggctccgagagggggtgtgggattaaacaagggaagtcaggaggggttcctatcctttcttcccttccgtttttgggttcaccttatccttgattttttgtagtcacttcacgtcttcaccatcctcttttgcttcacgattcttgcttgcatatctttggttttattctgttcttactagcttgggggatcaattggaaggaggaggaggcactgtgcatgttttgtagctacaatcctgctaccttattgccatttagcccccttcggcgagcaaggttaaccaatctaaattccgatctatatttccatcttcacttaatctgttaatcaatagcgaatatagccggtggtctctcctccg

SEQ ID NO: 35992 - protein, 275 aa, Zea mays subsp. mays
MEFTAQEGEEPVSEEMGASSAPPPCLGPGRGTGNQNHAAEATYHECLRNHAAALGGHVVDGCGEFMPEDADRLKCAACGCHRSFHRKGDAGRRHQLLLPPPAAAVPRVPLLLPPPHPYAAGCCPPPLRVAAAVPVPRHAQRHHDRVVQRGAWPAVRVRRRAARARAGPRPAEADPDQVHAGAEGADAGVRGTPRLADAEAGRRAGAALLRPGRRPAAGLQGLDAQQQAHRQRRQEAAAAAPAASRGAATAPAAPVATVGDKAQQSAAPPPPPPFA

SEQ ID NO: 35993 - protein, 260 aa, Zea mays subsp. mays
MGASSAPPPCLGPGRGTGNQNHAAEATYHECLRNHAAALGGHVVDGCGEFMPEDADRLKCAACGCHRSFHRKGDAGRRHQLLLPPPAAAVPRVPLLLPPPHPYAAGCCPPPLRVAAAVPVPRHAQRHHDRVVQRGAWPAVRVRRRAARARAGPRPAEADPDQVHAGAEGADAGVRGTPRLADAEAGRRAGAALLRPGRRPAAGLQGLDAQQQAHRQRRQEAAAAAPAASRGAATAPAAPVATVGDKAQQSAAPPPPPPFA

SEQ ID NO: 35994 - protein, 210 aa, Zea mays subsp. mays
MPEDADRLKCAACGCHRSFHRKGDAGRRHQLLLPPPAAAVPRVPLLLPPPHPYAAGCCPPPLRVAAAVPVPRHAQRHHDRVVQRGAWPAVRVRRRAARARAGPRPAEADPDQVHAGAEGADAGVRGTPRLADAEAGRRAGAALLRPGRRPAAGLQGLDAQQQAHRQRRQEAAAAAPAASRGAATAPAAPVATVGDKAQQSAAPPPPPPFA

SEQ ID NO: 35995 - protein, 195 aa, Zea mays subsp. mays
MAAASSCPRTPTGSSAQPAAATAASTARATRGAATSSCCRRPPRRSRASRCSCLRPTPTRPAAAHPHYASPPLFPYHGTPSGTTTESSSEERGPPSGFAAAPHAHAQGHVRRKRIRTKFTPEQKEQMLAFAERLGWRMQKQDDALVQHFCDQVGVRRQVFKVWMHNNKHIGSGGRRQPPPHLPPPEGQQQPQQPQ

SEQ ID NO: 35996 - DNA, 811 bp, Zea mays subsp. mays
acctaccccacctagcccccgccatactccgaccctagggtttccgtcctcttccgtaagcttccaaaaaaatggccaacgaggagccggctcccgtcaccgctcctgccgccgccgccccagccgggggcgaccattctccggccttctcgttcagcatctggccgccgacgcagcgcacgcgggacgcggtggtgcggcgcctcgtggagacgctcgcgggggacaccatcctctgcaagcgctacggcgccgtgccggccgccgacgccgagcccgcggcgcgcgccatcgaggccgaggccttcgacgccgtggccgccgcgggaggcgccgccgcctccgtggaggaggggatcgaggcgctgcagtcctactccaaggaggtgagccgccgcctcctcgactttgtcaagtcccgctccgcggacgccaaggccgacccgccgtcggcggaggccctggcccctgacgcgcccgaggcccagcccgcggcgtgagcgccggacagccagtcgttccgtacctgatcttcctgagatgagattgagtcgcgtctggagtttgtgtggagactgcagcctgtgtgtgtggcaaagtctgggtctgtatgacttgaacgttagctgtttgcacatctatgcagttcttcttccacggatgtctgatttagtgcgtgctcttattttacttcttgcaatgactgcccctgaccaacgattatgttccgtttgctgtgacgctcatgcatcaggcctcgagtgatagataaatccgaaataacaagcagaatcctcccatctttcaagcc

SEQ ID NO: 35997 - protein, 156 aa, Zea mays subsp. mays
PTPPSPRHTPTLGFPSSSVSFQKNGQRGAGSRHRSCRRRPSRGRPFSGLLVQHLAADAAHAGRGGAAPRGDARGGHHPLQALRRRAGRRRRARGARHRGRGLRRRGRRGRRRRLRGGGDRGAAVLLQGGEPPPPRLCQVPLRGRQGRPAVGGGPGP

SEQ ID NO: 35998 - protein, 142 aa, Zea mays subsp. mays
MANEEPAPVTAPAAAAPAGGDHSPAFSFSIWPPTQRTRDAVVRRLVETLAGDTILCKRYGAVPAADAEPAARAIEAEAFDAVAAAGGAAASVEEGIEALQSYSKEVSRRLLDFVKSRSADAKADPPSAEALAPDAPEAQPAA

SEQ ID NO: 35999 - DNA, 1084 bp, Zea mays subsp. mays
aaaaaagaaaaggtctaattactcgcctctcttgctcgccaacgccagtggccagaggcccagagcttcgtcaaagacacgccgaaaagagggggaggcgactcggccgaggtccggttccgaactccggtcctccgatttgcgcgtccggatctaccagccatggcatcatcttcggacccgtggatgaaggagtacaatgaagcatccagacttgctgatgacatcagttccatgattgctgatagagggtcccttccacaatcaggcccagaaattatgcggcatacttcagccatccggagaaaaataactattcttgggactagactggatagcttggagtcgttgcttggcagaattcctccaaagtcaatcactgacaaggagatgcataagcgccaagacatgttttccagtttgaagtctaaagcaaagcagatggcgacaagtttcaacatgtcaaactttgctaacagggaggatctgcttggtcagagtaaaaaggcagatgacatgagcagagttgctgggttagataaccaagggattgttgtccttcagaggcaaattatgaaagagcaagatgagggtcttgagaaactggaagagacagtgctgagcacaaagcatattgcattagcagtcaatgaagaacttaccctgcacacaaagattgatagatgaccttgaagatcatgttgatgttacaaattcacgtcttcagcgcgtgcaaaagaggcttgcaattttgagcaagcgcaccaaaggtggctgctcatgtatgtgcctgcttctatctgttgtcgccatcgtgattcttgcagtcatagtttggcttctcgtcaagtatctgtaaaggaaagaaagaagcagccggcctaccctgcagacctcactcgaaatgacccttatgtgtgtgcagccttcgcttaaaaagtcccttctgtgttactaccattgaaatgtgcatccctttgaaaataatatatatacggtggtttcatcttccctttcgtgagtggaatggttatggagtaatgtacattacatcgaatttgacacatacatgatcatcatctgc

SEQ ID NO: 36000 - protein, 174 aa, Zea mays subsp. mays
MASSSDPWMKEYNEASRLADDISSMIADRGSLPQSGPEIMRHTSAIRRKITILGTRLDSLESLLGRIPPKSITDKEMHKRQDMFSSLKSKAKQMATSFNMSNFANREDLLGQSKKADDMSRVAGLDNQGIVVLQRQIMKEQDEGLEKLEETVLSTKHIALAVNEELTLHTKIDR

SEQ ID NO: 36001 - protein, 166 aa, Zea mays subsp. mays
MKEYNEASRLADDISSMIADRGSLPQSGPEIMRHTSAIRRKITILGTRLDSLESLLGRIPPKSITDKEMHKRQDMFSSLKSKAKQMATSFNMSNFANREDLLGQSKKADDMSRVAGLDNQGIVVLQRQIMKEQDEGLEKLEETVLSTKHIALAVNEELTLHTKIDR

SEQ ID NO: 36002 - protein, 150 aa, Zea mays subsp. mays
MIADRGSLPQSGPEIMRHTSAIRRKITILGTRLDSLESLLGRIPPKSITDKEMHKRQDMFSSLKSKAKQMATSFNMSNFANREDLLGQSKKADDMSRVAGLDNQGIVVLQRQIMKEQDEGLEKLEETVLSTKHIALAVNEELTLHTKIDR

SEQ ID NO: 36003 - DNA, 1276 bp, Zea mays subsp. mays
  misc_feature (154)..(159): n is a, c, g, or t
  misc_feature (192)..(192): n is a, c, g, or t
  misc_feature (213)..(213): n is a, c, g, or t
  misc_feature (220)..(220): n is a, c, g, or t
  misc_feature (236)..(236): n is a, c, g, or t
  misc_feature (365)..(365): n is a, c, g, or t
  misc_feature (454)..(455): n is a, c, g, or t
  misc_feature (701)..(701): n is a, c, g, or t
  misc_feature (753)..(753): n is a, c, g, or t
  misc_feature (776)..(776): n is a, c, g, or t
  misc_feature (845)..(845): n is a, c, g, or t
  misc_feature (887)..(887): n is a, c, g, or t
aattttcccaccagctcactccacctcccactccagtggcctggcacgccgatcccgatggacgctgaccacagccacggccagccgccgccgccggcgccgtcctcgacggaaatcctgatggccgcgctcctcaacgttccagccgcgcagnnnnnngggcctcgcgcgggcgctggccgccgacgcgcnttggctgcaatcccgcctcgngttcctnctcctctccccgccgnacttcgcgcgcgcgctcgcgaggctccgctcgatgcctctgcccgccaaggccgcgctgctgggccgcgcgctcctccgctccctcctcctgctcctcccggcgctctgccccgacggcggcggcggcntccacccaacaccaccacctcctcctccagccgcccgacctcgacgccgcgctcctcctcctcgccatgtgcgactcctactcccccgnngcacgacgcgcccttccccggtcgactggcgcgcggtgatcgtggacggcgtggtggcgtccgcgctctccgtgtccggcctcggcggcacgccctgggccgcactcggcccctacgtggacgcggctgccaagtgccgccggttcgcggacgccgtcgccgcggtggctggcgacggtgggacgaaggacggcgaggggagcggggccgcgtcgtacgccgccgtgctggcgctgattcccgtgncggtggacggcgcgcagtgcgccatctgccgggaggagatggctgctgacgnacgcggcgtgtgcgggctcaganccgtgcgggcaccagttccactggcgttgcgctctgcgctggctggcccggcgcaacacctgcccgtgntgccgcgccgagctgcccgccgaggacccgctcaaggagacncggcggctgtggcggggcgtggaaaggatggcgcgcggcgggtgaagcgtacagtgtacatacatggcccatgtgatgggacgcacgcgcttggttgctttcgtctgtcgcggtacgtggtttcaagtactagtgtcagattctgggacgacggtgatcggcgatggctctcccagcaaaaaaaaaaagaaaagaaagaaagaaagaaagaaataaacgctggaagctgcgagtgcgagtggagcataccgaatgatggatgtgtaattatttcgtgagacaaacaaactgtgacgaacatgcttgacatggccgcttgctaccctgaatatttgtcgttagttagtttatttgtaaactaaaatgtgaagtatttcttaacattattc

SEQ ID NO: 36004 - protein, 298 aa, Zea mays subsp. mays
  misc_feature (33)..(33): Xaa can be any naturally occurring amino acid
  misc_feature (62)..(63): Xaa can be any naturally occurring amino acid
  misc_feature (145)..(145): Xaa can be any naturally occurring amino acid
  misc_feature (162)..(162): Xaa can be any naturally occurring amino acid
  misc_feature (170)..(170): Xaa can be any naturally occurring amino acid
  misc_feature (193)..(193): Xaa can be any naturally occurring amino acid
  misc_feature (207)..(207): Xaa can be any naturally occurring amino acid
MPLPAKAALLGRALLRSLLLLLPALCPDGGGGXHPTPPPPPPAARPRRRAPPPRHVRLLLPXXTTRPSPVDWRAVIVDGVVASALSVSGLGGTPWAALGPYVDAAAKCRRFADAVAAVAGDGGTKDGEGSGAASYAAVLALIPVXVDGAQCAICREEMAADXRGVCGLRXVRAPVPLALRSALAGPAQHLPVXPRRAARRGPAQGDXAAVAGRGKDGARRVKRTVYIHGPCDGTHALGCFRLSRYVVSSTSVRFWDDGDRRWLSQQKKKEKKERKKEINAGSCECEWSIPNDGCVIIS

SEQ ID NO: 36005 - protein, 249 aa, Zea mays subsp. mays
  misc_feature (52)..(53): Xaa can be any naturally occurring amino acid
  misc_feature (64)..(64): Xaa can be any naturally occurring amino acid
  misc_feature (71)..(71): Xaa can be any naturally occurring amino acid
  misc_feature (74)..(74): Xaa can be any naturally occurring amino acid
  misc_feature (79)..(79): Xaa can be any naturally occurring amino acid
  misc_feature (122)..(122): Xaa can be any naturally occurring amino acid
  misc_feature (152)..(152): Xaa can be any naturally occurring amino acid
  misc_feature (234)..(234): Xaa can be any naturally occurring amino acid
NFPTSSLHLPLQWPGTPIPMDADHSHGQPPPPAPSSTEILMAALLNVPAAQXXGPRAGAGRRRXLAAIPPXVPXPLPAXLRARAREAPLDASARQGRAAGPRAPPLPPPAPPGALPRRRRRXPPNTTTSSSSRPTSTPRSSSSPCATPTPPXHDAPFPGRLARGDRGRRGGVRALRVRPRRHALGRTRPLRGRGCQVPPVRGRRRRGGWRRWDEGRRGERGRVVRRRAGADSRXGGRRAVRHLPGGDGC

SEQ ID NO: 36006 - protein, 230 aa, Zea mays subsp. mays
  misc_feature (33)..(34): Xaa can be any naturally occurring amino acid
  misc_feature (45)..(45): Xaa can be any naturally occurring amino acid
  misc_feature (52)..(52): Xaa can be any naturally occurring amino acid
  misc_feature (55)..(55): Xaa can be any naturally occurring amino acid
  misc_feature (60)..(60): Xaa can be any naturally occurring amino acid
  misc_feature (103)..(103): Xaa can be any naturally occurring amino acid
  misc_feature (133)..(133): Xaa can be any naturally occurring amino acid
  misc_feature (215)..(215): Xaa can be any naturally occurring amino acid
MDADHSHGQPPPPAPSSTEILMAALLNVPAAQXXGPRAGAGRRRXLAAIPPXVPXPLPAXLRARAREAPLDASARQGRAAGPRAPPLPPPAPPGALPRRRRRXPPNTTTSSSSRPTSTPRSSSSPCATPTPPXHDAPFPGRLARGDRGRRGGVRALRVRPRRHALGRTRPLRGRGCQVPPVRGRRRRGGWRRWDEGRRGERGRVVRRRAGADSRXGGRRAVRHLPGGDGC

SEQ ID NO: 36007 - DNA, 1846 bp, Zea mays subsp. mays
cccggcttcctcccaactgccaccgatttgtttgttcggcttcggccccatcgccagtcacccgttcccacttcattggtcgctgctccctccctccacggccgatcccgtgccggcgagagggaccatggcggggaaagggaaggaggtgtacgtggccgccatcgaccagggcaccacaagcacccggttcatcgtctacgaccgccacgccaaacccgtcgcatcgcaccagctcgagttcaagcaacactacccggaggcagggtgggttgagcatgatcctatggagattatagagactgttaaggtgtgtatgaaagaggcagttggcaaagccaaagatggtaaacacaatgtggttgctggtttgaaggccattgggatcacaaatcagagggaaaccactgttatgtggagtaaatccactggccgtccactgtataatgctattgtgtggatggatgctcgcacaagccctgtttgcaggagattggaaaatgagctgtcaggcggtaggacccacttcgtggagacatgcgggttgccaatcagtacctatttcagtgctctgaaattattatggttgatggaaaatgtggatgctgtcaaggatgcagtccggactggtgacgctttattcggcacgatcgacacctggttgatttggaaccttacaggaggtgttgctggtgggcagcatgtcacggattgctcaaatgcatctcgtacaatgcttatgaatctaaagacacttgactgggataagccaacacttgctgtgttaggagttcctgttgagattttgccaaagattatcagtaattcagagaaaatcggtgtggtcgccaaagagttcccgtttgcaggagttcccatctcggggtgtcttggagatcagcatgctgctatgcttgggcagctgtgccagaagggtgaagcgaaaagcacctatggaactggtgccttcatccttcttaacacaggggaagagcctacccaatcctcccatggccttcttagtaccattgcttacaagcttggtccagctgcacccactaactatgctcttgaagggtccattgcaattgcaggcgcagcagttcagtggctgagggacagccttggaatcattcagtcagcagctgagatcgaaaagttggctgaaacagtgccagattcaggtggagtgtactttgtgccagcatttaatgggttgtttgcaccatggtggagagatgatgcgaggggaatttgcatcggaatcacaaggttcacaaataaggggcacattgctcgagcagtgctcgagagtatgtgttttcaggtgaatgatgtcctcagctccatgcacaaggatgctggagaggcaggagaagtaaagagcgcagaaggagagttcttattgcgtgttgatggtggtgctactgttaataatcttctaatgcagatccaggctgatttattaggcagccctgttgtcagaccagctgacatagagaccacagccctcggagctgcatatgctgctgggttggctgcaggagtttggaccaaggagaaggtttttgcaggtttgcacaaggagaacacgacagtcttccgcccgaaactggatgaggcgcacaggaaaaagagggcggattcatggtacaaggcggtttcaagatcattcgatctggctgatctttctctgtaaatttatcctgccagcgctcctctatctggttttggaagctgcaaatgaataaattggtcttcgctgggactaatcttaactgcttgttatttatatataacatcacgatgtttataaaagtgagtacatgaatatcctcagatttcc

SEQ ID NO: 36008 - protein, 565 aa, Zea mays subsp. mays
PASSQLPPICLFGFGPIASHPFPLHWSLLPPSTADPVPARGTMAGKGKEVYVAAIDQGTTSTRFIVYDRHAKPVASHQLEFKQHYPEAGWVEHDPMEIIETVKVCMKEAVGKAKDGKHNVVAGLKAIGITNQRETTVMWSKSTGRPLYNAIVWMDARTSPVCRRLENELSGGRTHFVETCGLPISTYFSALKLLWLMENVDAVKDAVRTGDALFGTIDTWLIWNLTGGVAGGQHVTDCSNASRTMLMNLKTLDWDKPTLAVLGVPVEILPKIISNSEKIGVVAKEFPFAGVPISGCLGDQHAAMLGQLCQKGEAKSTYGTGAFILLNTGEEPTQSSHGLLSTIAYKLGPAAPTNYALEGSIAIAGAAVQWLRDSLGIIQSAAEIEKLAETVPDSGGVYFVPAFNGLFAPWWRDDARGICIGITRFTNKGHIARAVLESMCFQVNDVLSSMHKDAGEAGEVKSAEGEFLLRVDGGATVNNLLMQIQADLLGSPVVRPADIETTALGAAYAAGLAAGVWTKEKVFAGLHKENTTVFRPKLDEAHRKKRADSWYKAVSRSFDLADLSL

SEQ ID NO: 36009 - protein, 523 aa, Zea mays subsp. mays
MAGKGKEVYVAAIDQGTTSTRFIVYDRHAKPVASHQLEFKQHYPEAGWVEHDPMEIIETVKVCMKEAVGKAKDGKHNVVAGLKAIGITNQRETTVMWSKSTGRPLYNAIVWMDARTSPVCRRLENELSGGRTHFVETCGLPISTYFSALKLLWLMENVDAVKDAVRTGDALFGTIDTWLIWNLTGGVAGGQHVTDCSNASRTMLMNLKTLDWDKPTLAVLGVPVEILPKIISNSEKIGVVAKEFPFAGVPISGCLGDQHAAMLGQLCQKGEAKSTYGTGAFILLNTGEEPTQSSHGLLSTIAYKLGPAAPTNYALEGSIAIAGAAVQWLRDSLGIIQSAAEIEKLAETVPDSGGVYFVPAFNGLFAPWWRDDARGICIGITRFTNKGHIARAVLESMCFQVNDVLSSMHKDAGEAGEVKSAEGEFLLRVDGGATVNNLLMQIQADLLGSPVVRPADIETTALGAAYAAGLAAGVWTKEKVFAGLHKENTTVFRPKLDEAHRKKRADSWYKAVSRSFDLADLSL

SEQ ID NO: 36010 - protein, 470 aa, Zea mays subsp. mays
MEIIETVKVCMKEAVGKAKDGKHNVVAGLKAIGITNQRETTVMWSKSTGRPLYNAIVWMDARTSPVCRRLENELSGGRTHFVETCGLPISTYFSALKLLWLMENVDAVKDAVRTGDALFGTIDTWLIWNLTGGVAGGQHVTDCSNASRTMLMNLKTLDWDKPTLAVLGVPVEILPKIISNSEKIGVVAKEFPFAGVPISGCLGDQHAAMLGQLCQKGEAKSTYGTGAFILLNTGEEPTQSSHGLLSTIAYKLGPAAPTNYALEGSIAIAGAAVQWLRDSLGIIQSAAEIEKLAETVPDSGGVYFVPAFNGLFAPWWRDDARGICIGITRFTNKGHIARAVLESMCFQVNDVLSSMHKDAGEAGEVKSAEGEFLLRVDGGATVNNLLMQIQADLLGSPVVRPADIETTALGAAYAAGLAAGVWTKEKVFAGLHKENTTVFRPKLDEAHRKKRADSWYKAVSRSFDLADLSL

SEQ ID NO: 36011 - DNA, 1639 bp, Zea mays subsp. mays
gcacgagaccattacctagaacatcctaatcgaaaaatcgccaccagtggccgcgtcctcttcatttccgccatccgtatcgtctccctagggtttggcactttggccgccgccatggcgtcggcgtcgcgtgcgctcctcctctcccgtgcgctccaggccggcgcgtctcgccgcgtccccgccctcctgcgcccggtcgctgcggccgcgagcctcctcccagcggtggcggggccggcaggggccgccctcggcgctagggtgcggtgcttcgcgacccagccggcgacgtcctcgctgcgggactcgtccccaaactggagcaatcgcccgcccaaggagacgatcctcctcgacggctgcgacttcgagcactggctcgtcatcatggagccgccgcctggtgacgcctccaaccccgacatcacacgcgacgagatcatcgatagctatatcaagactctcgcccaagtcgtcgggagtgaggaagaagctaggcaaaagatatactctgtatcgactcgtcattactttggctttggtgctcttgtatctgaggaactttcttacaaactgaaagaaattcccaaggtccgctgggttcttcctgattcatacttggatgtcaaaaacaaggactatggaggcgaacccttcataaatgggcaagctgttccttatgatcctaaatatcatgaagagtgggtgagaaacaatgcccgtgccaatgacagaaaccggcgcaatgataggcctcgcaactttgacaggtcaaggaactttgacaggagaagggagaacatgcaaaactaccagaacagagatgggcctcctgcccaaggtttcaatggccccccacctccacctggccagaaccagatgccatcccaccatagtcagggcaacatgtctccgcaaccaccacatgctggtggtggccaaccaaactatcagccccaaatgcaaaacccacagacgggctacaaccctggcggtgctcctcactaccagcaaggtgctgctcctggctaccaaggtggacctccggggtatcaaggtggttaccaagggaacccaggccctgcctaccaaggtggtaacactggttatcaaggtggcaacccaccacctccctaccaaggaagcaacccaccaccttcttaccagggaggcagcccaccagggccaccacctccctaccgaggaggcagcccaccagggccaccacctccctaccgaggaggcaaccccaacgtaccgccatattcgggtggtggcaatcctggctaccctggtggcagccctggctaccagggtcaaggaggcaactccaacttccagtgaacatgaccacgagtactaagttggcacccctgtttcagagtagccttctgcaagagatggtgcgccgtagcctagcataaatcgaacccttgttgctatcggattttcatggattgtcgctgtttgcacttaatgttctatatatagtactcaaaactatgcttggtgtctgagtgatgtacgtggaattctgaaactatggatcagctcttgtgtgcacttgctgaaccagatacccagcagtaagcttttgtttgttcgttttgagtggttggttaaccacatacttgtt

SEQ ID NO: 36012 - protein, 448 aa, Zea mays subsp. mays
ARDHYLEHPNRKIATSGRVLFISAIRIVSLGFGTLAAAMASASRALLLSRALQAGASRRVPALLRPVAAAASLLPAVAGPAGAALGARVRCFATQPATSSLRDSSPNWSNRPPKETILLDGCDFEHWLVIMEPPPGDASNPDITRDEIIDSYIKTLAQVVGSEEEARQKIYSVSTRHYFGFGALVSEELSYKLKEIPKVRWVLPDSYLDVKNKDYGGEPFINGQAVPYDPKYHEEWVRNNARANDRNRRNDRPRNFDRSRNFDRRRENMQNYQNRDGPPAQGFNGPPPPPGQNQMPSHHSQGNMSPQPPHAGGGQPNYQPQMQNPQTGYNPGGAPHYQQGAAPGYQGGPPGYQGGYQGNPGPAYQGGNTGYQGGNPPPPYQGSNPPPSYQGGSPPGPPPPYRGGSPPGPPPPYRGGNPNVPPYSGGGNPGYPGGSPGYQGQGGNSNFQ

SEQ ID NO: 36013 - protein, 410 aa, Zea mays subsp. mays
MASASRALLLSRALQAGASRRVPALLRPVAAAASLLPAVAGPAGAALGARVRCFATQPATSSLRDSSPNWSNRPPKETILLDGCDFEHWLVIMEPPPGDASNPDITRDEIIDSYIKTLAQVVGSEEEARQKIYSVSTRHYFGFGALVSEELSYKLKEIPKVRWVLPDSYLDVKNKDYGGEPFINGQAVPYDPKYHEEWVRNNARANDRNRRNDRPRNFDRSRNFDRRRENMQNYQNRDGPPAQGFNGPPPPPGQNQMPSHHSQGNMSPQPPHAGGGQPNYQPQMQNPQTGYNPGGAPHYQQGAAPGYQGGPPGYQGGYQGNPGPAYQGGNTGYQGGNPPPPYQGSNPPPSYQGGSPPGPPPPYRGGSPPGPPPPYRGGNPNVPPYSGGGNPGYPGGSPGYQGQGGNSNFQ

SEQ ID NO: 36014 - protein, 318 aa, Zea mays subsp. mays
MEPPPGDASNPDITRDEIIDSYIKTLAQVVGSEEEARQKIYSVSTRHYFGFGALVSEELSYKLKEIPKVRWVLPDSYLDVKNKDYGGEPFINGQAVPYDPKYHEEWVRNNARANDRNRRNDRPRNFDRSRNFDRRRENMQNYQNRDGPPAQGFNGPPPPPGQNQMPSHHSQGNMSPQPPHAGGGQPNYQPQMQNPQTGYNPGGAPHYQQGAAPGYQGGPPGYQGGYQGNPGPAYQGGNTGYQGGNPPPPYQGSNPPPSYQGGSPPGPPPPYRGGSPPGPPPPYRGGNPNVPPYSGGGNPGYPGGSPGYQGQGGNSNFQ

SEQ ID NO: 36015 - DNA, 960 bp, Zea mays subsp. mays
ttagaacatcctaatcgaaaaacaactgactgaggcgcacaccatccccaccgccggcgcccgccccgcctcttcgccggcgacgagccgccgccgaggagctcagcgtggaggggcttcctcgcgtgtgggagaagctgccgtttttttcctgagcgggtcgtcgttgccgtgtgccgccgagattagagtttttcaaagggtgtctccttcgcggcactggcctcctcgagttagtttatttggagacagctcgaggctcgcttcggaagcgacccggtcgccgccgccgccgccgccatcggccgtctctccccgtagtcgccgtctcggggctggctgtggtgatgagctccgtcggatcctagggtttttgaattctgagtttctgacggcttcgtcgagctgcgcaaggcgtcaagaaggagatggtgccgggtgggttgttcgggtgggcgtcgccccatgtacagccgctcacacccgtatcggaggtctccgagccgccggagtcgccctcgccgtacggggacgggccggcgggggatgccggcgtgggggcaagggagggggaaggcgctggcgccggagaggaggaggtggaggacgacgaggtcgagccgccgcccgcggcggtgtccttctggaggcttttcgagttcgccgatggggtcgactgggcccttatggctgctggggcgcttgctgctgctgcgcatggcgcggcgctcgttgtgtaccttcactatttcgggagggccctgaatttgctcgactctgagcgggttgggtcgtctctctatggacgcagcgatgagctgctcagccggtttaaggaggtaagctgatacttcttatgcttggcacttagttgtacatacgataactgttacattttcgtttttagacggaaggatgttgtaaatgttttttttaatgaaggattatctattgtctcgt

SEQ ID NO: 36016 - protein, 139 aa, Zea mays subsp. mays
MVPGGLFGWASPHVQPLTPVSEVSEPPESPSPYGDGPAGDAGVGAREGEGAGAGEEEVEDDEVEPPPAAVSFWRLFEFADGVDWALMAAGALAAAAHGAALVVYLHYFGRALNLLDSERVGSSLYGRSDELLSRFKEVS

SEQ ID NO: 36017 - protein, 99 aa, Zea mays subsp. mays
MYSRSHPYRRSPSRRSRPRRTGTGRRGMPAWGQGRGKALAPERRRWRTTRSSRRPRRCPSGGFSSSPMGSTGPLWLLGRLLLLRMARRSLCTFTISGGP

SEQ ID NO: 36018 - protein, 72 aa, Zea mays subsp. mays
MPAWGQGRGKALAPERRRWRTTRSSRRPRRCPSGGFSSSPMGSTGPLWLLGRLLLLRMARRSLCTFTISGGP

SEQ ID NO: 36019 - DNA, 1178 bp, Zea mays subsp. mays
ctcccgattccaatctggtctcaccgggcctggcggcgagggagagatggggaagaaccaggcgtacaaggcgatgcagcgggcgcggctggggtcctcgtccggcgcgccgggcgccgccgacgcccccgaagacggcatggtcggtccccttcctctcccctaggagatctctgtttcccatctgcacttccgagttccaggctcgcaatccatcctgatccgattatttccgcagccatattactatgctaattatatacaatagagtaggcttccagccgctgaggaattttggctaccatcccactttcgctttgggtgaaagataaagaaaaagaactttggctaacgagggccgtcgcagacggacggttcattccattctccagagtggcatgcggcgcgcctggccagccttaacaagacgcacaccctcacctgggaggagttcaagaagaagcagaaggaagaggaactgaaaaggggtgagctggaggctgacaaagacaaaatgatgagagagtatagagctcaactggatgctgaaagagctcaaaagctagcaaacggaagaaatcactcaaggtcaaactcaaaatcatcatcttccaagaaagagaggaaggataaggacgcaaagaaaagaagtaaaaagaggagaaagcacaaaagttcatcagagtcaagttccagttcatcttcagaatcttcaagcagcgacgatgaggataggggttcaaggaagtccagatcacggtcgagatcgaagagaacaaggaaggaaaagaagagccggtcaaggtccaagcgcagaggcagtgaaagcgaggaggaaggcccagtacgcctctctaaattcttcgggaagtaaggagtagacgctgctgtacccaagacgcctttttcattttgaaacatagattggtgggtttggatgtatcattcaacacaaattacttctgaaggttgagcgagccgtttaccatggtgttctcaatatgatgctcagctgttaagagggtctggtcaagttctgtggcttccaaaaactttgtaagcaactggtaagtcattgttaaatcgctgtaccttggaggatttgatgccatatatttgagacattgaactgctatatttatgttaagactttgcatacgcagtcagttgtttcagtt

SEQ ID NO: 36020 - protein, 119 aa, Zea mays subsp. mays
MMREYRAQLDAERAQKLANGRNHSRSNSKSSSSKKERKDKDAKKRSKKRRKHKSSSESSSSSSSESSSSDDEDRGSRKSRSRSRSKRTRKEKKSRSRSKRRGSESEEEGPVRLSKFFGK

SEQ ID NO: 36021 - protein, 118 aa, Zea mays subsp. mays
MREYRAQLDAERAQKLANGRNHSRSNSKSSSSKKERKDKDAKKRSKKRRKHKSSSESSSSSSSESSSSDDEDRGSRKSRSRSRSKRTRKEKKSRSRSKRRGSESEEEGPVRLSKFFGK

SEQ ID NO: 36022 - protein, 84 aa, Zea mays subsp. mays
LPIPIWSHRAWRRGRDGEEPGVQGDAAGAAGVLVRRAGRRRRPRRRHGRSPSSPLGDLCFPSALPSSRLAIHPDPIISAAILLC

SEQ ID NO: 36023 - DNA, 1519 bp, Zea mays subsp. mays
gtctcgtttctcccttcctcagctgctggcccccctgcctgcagccattgccccgctcctcgaggtcaaatggcccctgcccccgctctcaccgccacatccgtcctgaagcgatcccacctacccggcgtccactcgttggccggtcgccggcagccggggcggggaccgcgtctcggtgctttctccagcgatcccgccgccccgcgtttcatggcagcaaggatctggagtggttgctaagaggctcctctgggcgagtgcgagtggttccttcgagaaagataacatcggggaggacgtggtgttgccttctcagatagcggtggagaataaagtagatttgttgaagattttgaagagtgccaactcaattattccccatatagtgctggggagtacaattctcgcgctggtgtacccgccttcgttcacatggttcactaccaggtactatgcaccagctttggggttcttgatgtttgctgttggtgtaaactcaagcgccaatgatttcattgaagcaataaaaaggccagatgctattgctgcgggctatatcggacagtttgtcattaagcctttgtttggattcctttttgacactcttgcagttgcagttcttaacctcccagctgctctaggtgctggcataatgttggtttcatgcgtgagcggagcacaactttcaaactacgcaactttcttgacggatccacatatggctcctctcagcattgttatgacgtcattgtcaacagctactgcagtttttgtcaccccaacattatcttactttcttattggccagaaattacctgtagatgtcaaggggatgatgtccagcatcattcaaatagttgttgctccaattgctgccggattgcttctgaatagattccttccaaggctctgtgcagctattcagccatttctcccttcgatgtcggtgtttgtcactgccctgtgtgttggctcaccattggcaataaatatcaaggctgttttgtcgccatttggattaaccatagtgctgctcctttttgcattccacacctcatcttttgtagctggttatcatcttgctggtacttggtttagcaagtcagacgacgtaaaggcactacaaaggacaatatctttcgagacaggaatgcaaagcagccttcttgctcttgctttagcaaataagttcttcccagatccactagtgggtgtgcctccagccatatcggttgtgttgatgtccttaatgggatttgctcttgtcatggtatggtccaagaaaagagaagcctaattttctgaatcaattaagcgctgttgttttctgctcttatttatgtagagtaggcagaattttcatggttcaaatttgaaactcttgtatcgttccttctctcctctgagtgagcttgcaagggctctctctctctctcgctaaattattttccagatttacattttttttttgaatcgtgctggcatgccgccccaagagctgatggagttcaattcc

SEQ ID NO: 36024 - protein, 273 aa, Zea mays subsp. mays
MFAVGVNSSANDFIEAIKRPDAIAAGYIGQFVIKPLFGFLFDTLAVAVLNLPAALGAGIMLVSCVSGAQLSNYATFLTDPHMAPLSIVMTSLSTATAVFVTPTLSYFLIGQKLPVDVKGMMSSIIQIVVAPIAAGLLLNRFLPRLCAAIQPFLPSMSVFVTALCVGSPLAINIKAVLSPFGLTIVLLLFAFHTSSFVAGYHLAGTWFSKSDDVKALQRTISFETGMQSSLLALALANKFFPDPLVGVPPAISVVLMSLMGFALVMVWSKKREA

SEQ ID NO: 36025 - protein, 214 aa, Zea mays subsp. mays
MLVSCVSGAQLSNYATFLTDPHMAPLSIVMTSLSTATAVFVTPTLSYFLIGQKLPVDVKGMMSSIIQIVVAPIAAGLLLNRFLPRLCAAIQPFLPSMSVFVTALCVGSPLAINIKAVLSPFGLTIVLLLFAFHTSSFVAGYHLAGTWFSKSDDVKALQRTISFETGMQSSLLALALANKFFPDPLVGVPPAISVVLMSLMGFALVMVWSKKREA

SEQ ID NO: 36026 - protein, 192 aa, Zea mays subsp. mays
MAPLSIVMTSLSTATAVFVTPTLSYFLIGQKLPVDVKGMMSSIIQIVVAPIAAGLLLNRFLPRLCAAIQPFLPSMSVFVTALCVGSPLAINIKAVLSPFGLTIVLLLFAFHTSSFVAGYHLAGTWFSKSDDVKALQRTISFETGMQSSLLALALANKFFPDPLVGVPPAISVVLMSLMGFALVMVWSKKREA

SEQ ID NO: 36027 - DNA, 1320 bp, Zea mays subsp. mays
actaggtcgacaagaaaatggtggtagcgtcgagtggtggcgcgggaggcgtggagggtggcagcggctgcggtgtctcggcgtcggtgccgccggtggtgtcgtcgagcggtggcgcgggagaggtggagggtggcgacggcggctcggctgcggtgtcggggtcccgccggagggtgaaggggtcgtggacgccggaggaggacgagctgctgcggcgcgcgatcacgcggcacgggccgcggaactggaccgtgatcagctccgagatccccggccggtccggcaagtcgtgccgcctgcggtggtgcaaccagctcagccccagcgtggagcgccgcgccttcacgcccgaggaggacgccatcatcgtcgccgcgcacgcgcagcacggcaacaggtgggccaccatcgcgcggatgctccacggccgcaccgacaactccgtcaagaaccactggaactccacgctgctccgccagcgcagggcggcggccgcccacgccagcgccgccgggtgcgccctccagctgcggccggcaaccacggcctccgtcccgctccgccatctgctggatcgtcctaaggaggcggcggcatccgtttcgttccgtcgtctggacccaaaggcggaggaggaggaggacgaggacatggacgaaggcggcagcagcagcgaggattcggcgcatcggcatcgttcgctgtcacccgcgccggtcgagccgctcacactcaatctatttagcgacggagcccacgggctccctacccccgcccccgcacccgcaccgcagggtacggcagccagaacggagggtgccgccatgaggaggaaggcgaagctggagcaggacccgtggttgagcggcggagtccacggggcccccgcacccgcgccgcagagtgcggcagcgagaacggaaggtgccgtcgtcacgaggatgaagacgaagctggagcatgacccgtggttggtgaccttggtgcggcagatgatatctgtggaggtggagcggcagatgcatggagtgggcccgcaggccagaagcagcgccggtggtggtggtggtgcagacggcgacggcgtgaacggccaggacacgtcgatggacgtggacccgtgacggaatggcggcggtggcgttgggcttaccgagttccttctaccctgtttgtcccgttcgctaatcgcgcgcttgaaccattaacgtccgtcacaccatccgttgatacgtaggtattctagcttgtggttcagtattactttcactctagctgtgatcatcctatagattgaagcttctatttttttcttgg

SEQ ID NO: 36028 - protein, 369 aa, Zea mays subsp. mays
MVVASSGGAGGVEGGSGCGVSASVPPVVSSSGGAGEVEGGDGGSAAVSGSRRRVKGSWTPEEDELLRRAITRHGPRNWTVISSEIPGRSGKSCRLRWCNQLSPSVERRAFTPEEDAIIVAAHAQHGNRWATIARMLHGRTDNSVKNHWNSTLLRQRRAAAAHASAAGCALQLRPATTASVPLRHLLDRPKEAAASVSFRRLDPKAEEEEDEDMDEGGSSSEDSAHRHRSLSPAPVEPLTLNLFSDGAHGLPTPAPAPAPQGTAARTEGAAMRRKAKLEQDPWLSGGVHGAPAPAPQSAAARTEGAVVTRMKTKLEHDPWLVTLVRQMISVEVERQMHGVGPQARSSAGGGGGADGDGVNGQDTSMDVDP

SEQ ID NO: 36029 - protein, 235 aa, Zea mays subsp. mays
MLHGRTDNSVKNHWNSTLLRQRRAAAAHASAAGCALQLRPATTASVPLRHLLDRPKEAAASVSFRRLDPKAEEEEDEDMDEGGSSSEDSAHRHRSLSPAPVEPLTLNLFSDGAHGLPTPAPAPAPQGTAARTEGAAMRRKAKLEQDPWLSGGVHGAPAPAPQSAAARTEGAVVTRMKTKLEHDPWLVTLVRQMISVEVERQMHGVGPQARSSAGGGGGADGDGVNGQDTSMDVDP

SEQ ID NO: 36030 - protein, 194 aa, Zea mays subsp. mays
LGRQENGGSVEWWRGRRGGWQRLRCLGVGAAGGVVERWRGRGGGWRRRLGCGVGVPPEGEGVVDAGGGRAAAARDHAARAAELDRDQLRDPRPVRQVVPPAVVQPAQPQRGAPRLHARGGRHHRRRARAARQQVGHHRADAPRPHRQLRQEPLELHAAPPAQGGGRPRQRRRVRPPAAAGNHGLRPAPPSAGSS

SEQ ID NO: 36031 - DNA, 1682 bp, Zea mays subsp. mays
gcacgagaccattacctagaacatcctaatcgaaaacccagcgccccccgcgcacacacgcacacactgtcttagtgtctttctctgcctttctttccctagcgccgcgccggcgccgccattcgatcagtcttcgtcggccgcttcgccggcgacagcatactccagtcggttggttttggcacttcggaccggcggccatggcttccgacggcatcggccccagagatgtatgtgttgttggggttgcacgcaccccaatgggcggtttccttggtgccttgtctcccttgcctgctacgaaacttggctctatagtaattcaagctgctctggaaagagcaaacgtggatccagccctcgtgcaggaggtctactttggaaacgtattgagtgctaatttggggcaagctcctgcaaggcaagctgctctgggtgccgggataccaaactctgttgtttgcaccactgttaacaaagtctgtgcatctggcatgaaagctactatgtttgcagcacagtcaattcaattgggtatcaatgatattgttgtggctggtggcatggaaagcatgtccaatgccccaaagtacattgctgaagctaggaaggggtctcgttttggtcatgacacacttgttgatgccatgcttaaggatgggctttgggatgtatacaatgattgtgccatgggaatgtgtgccgagctttgtgctgacaatcatgccctcacaagagaagaccaggatgcatttgctatccaaagcaacgagcgtggaattgctgctcgtgacagtggtgcttttgcatgggagattattccggttcaagttcctgttggtagaggaaaacccccaacattaattgaaagagatgaaagcctggataagtttgacccagtaaaactaaagaaacttcgcccaagtttcaaggagaatggtggtacagttacagctggaaatgcttctagtataagtgatggagctgctgcattagttttggtgagtgggcagaaggctcaagagcttggccttcaagtccttgcaaggatcaaaggttatgctgatgcagctcaagctccggagctttttacaaccactccaggcacttgcaataccaaaggctatcgcaaatgctggattagagtcatcccgtgttgatttctatgagattaatgaagccttttcggctgttgcgcttgcaaatcaaaagcttcttggaattccttcagaaaagattaatgttcatggaggagctgtatctttaggacatcctctcgggtgcagtggtgctcgcattttggttacccttattggtgttctcagggcgaagagtggcaagatcggagttgctggtgtctgcaacggtggaggcggagcatcagctcttgttctggagctcgcataagaaatctagaccttgtagttagcaaaagctccctgaggtgatcttgtagtcttattttccgttgtagtagtcccatagaacatttcttaatttaatttggcaataaagcgaagtcgtgcttctgttggttgcatagtagagtatcatgtaataagagcaatggggatgtttcatagacacagcttagatatttttgaggatgctacagaaatattttatatatttgtcatgtgtctcgtacatttatctaggtcacatcacctatcctgccgccc

SEQ ID NO: 36032 - protein, 319 aa, Zea mays subsp. mays
MASDGIGPRDVCVVGVARTPMGGFLGALSPLPATKLGSIVIQAALERANVDPALVQEVYFGNVLSANLGQAPARQAALGAGIPNSVVCTTVNKVCASGMKATMFAAQSIQLGINDIVVAGGMESMSNAPKYIAEARKGSRFGHDTLVDAMLKDGLWDVYNDCAMGMCAELCADNHALTREDQDAFAIQSNERGIAARDSGAFAWEIIPVQVPVGRGKPPTLIERDESLDKFDPVKLKKLRPSFKENGGTVTAGNASSISDGAAALVLVSGQKAQELGLQVLARIKGYADAAQAPELFTTTPGTCNTKGYRKCWIRVIPC

SEQ ID NO: 36033 - protein, 299 aa, Zea mays subsp. mays
MGGFLGALSPLPATKLGSIVIQAALERANVDPALVQEVYFGNVLSANLGQAPARQAALGAGIPNSVVCTTVNKVCASGMKATMFAAQSIQLGINDIVVAGGMESMSNAPKYIAEARKGSRFGHDTLVDAMLKDGLWDVYNDCAMGMCAELCADNHALTREDQDAFAIQSNERGIAARDSGAFAWEIIPVQVPVGRGKPPTLIERDESLDKFDPVKLKKLRPSFKENGGTVTAGNASSISDGAAALVLVSGQKAQELGLQVLARIKGYADAAQAPELFTTTPGTCNTKGYRKCWIRVIPC

SEQ ID NO: 36034 - protein, 221 aa, Zea mays subsp. mays
MKATMFAAQSIQLGINDIVVAGGMESMSNAPKYIAEARKGSRFGHDTLVDAMLKDGLWDVYNDCAMGMCAELCADNHALTREDQDAFAIQSNERGIAARDSGAFAWEIIPVQVPVGRGKPPTLIERDESLDKFDPVKLKKLRPSFKENGGTVTAGNASSISDGAAALVLVSGQKAQELGLQVLARIKGYADAAQAPELFTTTPGTCNTKGYRKCWIRVIPC

SEQ ID NO: 36035 - DNA, 1676 bp, Zea mays subsp. mays
gctcccatttcaaaacctcttcctcctctcctcgccgcagctcccaccattcccgcagacgccttgtccccttcccagcttcccctcccccaccccgccgcacgtccgcaagccccacgccaccgtcatgtctccgaccaccaccccgccgcccgcgcccgtggcagccccgacctccaagggcgccaagcgcagcctcatgtcctcgctcatggacgccactgcgctgctccgctcctcctctttcaaggaggactcgtacgtcgcggccgcgctcccggcgtccgagctccgcgcgctcgccgacctcaaggcgctgctcgccacccacccggaccccatctccatctggggcgtcccgctgaaccctcgctcccctcccgccgcggcggacgacgccgccccggtcgacgagcgcgccgacgtggtgctcctcaagttcctccgcgcgcgggacttccgcgtccgcgacgcccacgccatggtgctccgctgcgccgcctggcgcgccgagttcggcgccgacgccgtgctggacgaggagctgggcttcaaggacctggagggcatcgtcgcctacatgcacggctgggaccgcgacggccaccccgtctgctacaacgcctacggcgtcttcaaagacagggacatgtacgagcgcgtcttcggcgacggcgaccgcctcgcgcgcttcctccgctggcgcgtccaggtcatggagcgtggcgtgcgcgcgctcaccctgaggcccgggggcgtcaacgccatcatacaggtcaccgacctcaaggacatgccaaagcgggagctcagagccgccagcaaccagatcctctccctcttccaggacaactacccggagatggtagcgcggaaggtgttcattaacgtgccgtggtacttctccgtgctcttctccatgatctcgcccttcctcacggagcgcaccaagagcaagttcgtcatcgcgcgcgagggcaacgtcgccgagacactctacaagttcatccggccggagctggtgcctgtgcagtacggcgggctgagccgcaccggtgacctcgagaacggaccaccgaagccggcgtccgagttcaccatcaagggtggcgagaaggtcttcctggagatcgacggtatcgaggccggtgcaacgataacgtgggatctggtcgtcgggggctgggacctcgagtacggagccgagtacgtgccggcggccgaggacagctacacgctctgcgtggagaagacgaggatggtctcggccaccgccgaggagcccgtgcacaatgccttcacggctagggaagccggcaagatggtgctgtccatagacaattctgggttcccggaagcgcaaggttgccgcctacaggtacttcgtgcgcaagtcgtcggcgtaggcatgctgatgtcttgtggtggtcgtcgcggccggcaccttgccggcaggtagccgcgagggggaggttaacgtggaacaactggtgaagtgtttacttgggcttgtgggatttggtggggagaggtcaagttaggctgtttaattattagtgctataacgacatgcatgtattatgccatatgtagaatataatgtactccgtaagagctgttgcacttttgtcatcaccactgttataaagctaatgatgagttaagttttttgggct

SEQ ID NO: 36036 - protein, 485 aa, Zea mays subsp. mays
LPFQNLFLLSSPQLPPFPQTPCPLPSFPSPTPPHVRKPHATVMSPTTTPPPAPVAAPTSKGAKRSLMSSLMDATALLRSSSFKEDSYVAAALPASELRALADLKALLATHPDPISIWGVPLNPRSPPAAADDAAPVDERADVVLLKFLRARDFRVRDAHAMVLRCAAWRAEFGADAVLDEELGFKDLEGIVAYMHGWDRDGHPVCYNAYGVFKDRDMYERVFGDGDRLARFLRWRVQVMERGVRALTLRPGGVNAIIQVTDLKDMPKRELRAASNQILSLFQDNYPEMVARKVFINVPWYFSVLFSMISPFLTERTKSKFVIAREGNVAETLYKFIRPELVPVQYGGLSRTGDLENGPPKPASEFTIKGGEKVFLEIDGIEAGATITWDLVVGGWDLEYGAEYVPAAEDSYTLCVEKTRMVSATAEEPVHNAFTAREAGKMVLSIDNSGFPEAQGCRLQVLRAQVVGVGMLMSCGGRRGRHLAGR

SEQ ID NO: 36037 - protein, 443 aa, Zea mays subsp. mays
MSPTTTPPPAPVAAPTSKGAKRSLMSSLMDATALLRSSSFKEDSYVAAALPASELRALADLKALLATHPDPISIWGVPLNPRSPPAAADDAAPVDERADVVLLKFLRARDFRVRDAHAMVLRCAAWRAEFGADAVLDEELGFKDLEGIVAYMHGWDRDGHPVCYNAYGVFKDRDMYERVFGDGDRLARFLRWRVQVMERGVRALTLRPGGVNAIIQVTDLKDMPKRELRAASNQILSLFQDNYPEMVARKVFINVPWYFSVLFSMISPFLTERTKSKFVIAREGNVAETLYKFIRPELVPVQYGGLSRTGDLENGPPKPASEFTIKGGEKVFLEIDGIEAGATITWDLVVGGWDLEYGAEYVPAAEDSYTLCVEKTRMVSATAEEPVHNAFTAREAGKMVLSIDNSGFPEAQGCRLQVLRAQVVGVGMLMSCGGRRGRHLAGR

SEQ ID NO: 36038 - protein, 419 aa, Zea mays subsp. mays
MSSLMDATALLRSSSFKEDSYVAAALPASELRALADLKALLATHPDPISIWGVPLNPRSPPAAADDAAPVDERADVVLLKFLRARDFRVRDAHAMVLRCAAWRAEFGADAVLDEELGFKDLEGIVAYMHGWDRDGHPVCYNAYGVFKDRDMYERVFGDGDRLARFLRWRVQVMERGVRALTLRPGGVNAIIQVTDLKDMPKRELRAASNQILSLFQDNYPEMVARKVFINVPWYFSVLFSMISPFLTERTKSKFVIAREGNVAETLYKFIRPELVPVQYGGLSRTGDLENGPPKPASEFTIKGGEKVFLEIDGIEAGATITWDLVVGGWDLEYGAEYVPAAEDSYTLCVEKTRMVSATAEEPVHNAFTAREAGKMVLSIDNSGFPEAQGCRLQVLRAQVVGVGMLMSCGGRRGRHLAGR

SEQ ID NO: 36039 - DNA, 1725 bp, Zea mays subsp. mays
gaccgttgtgcttgcggcttcgctcgttcccctccaccactccgtctccttcctattgctgagtgcggcacccttgcctataataaaccccgccgcacgcccgcaccggagaagaaagctcccaagtcccaatccacgttcctcgccccctgccgctccggagagtcatggccaccgccgtttccacccccgcggacctgtcgcccacgcctgccccgagacggcggggccggccgccgaagaaccccgccccagccgaggccccaggcagcccggcggaccaagcggaggtgattggggactacgagcgcgagagggacgcgaggatccgggagaacatggagcggatgcagaagctcggcatcctcgacctcgcgcacaccctcagccactgcgccgccgcctcgggtctgggtaccggcagcgggcggtggcgccggaagcccgtggagccggggtctgctggtggggccagggtgaagcccgcgtcgccggcgccctcgcggagatcgctcaggttgaaggacgtggaaccggttacctatcgtgaaattgagccaaagaaagagaaacgctctgaaggtggcaaaactgttttaatggaggtgggagccaaggaagaaatatacactgaagagcatgacaagcttttgggtacatgcaacactccttggactctctttgttgatggttatggcaaagatggaaaacgcatttatgatcaagtgaggggtcaaacctgtcatcagtgccgtcagaagactcttggtcatcatacaagctgctgtaaatgccagattgtccaaggacagttctgtggagactgtttgtacatgaggtatggtgaaaatgtgttagaggttaagaagaatcctaactggatatgtccagtttgccgtggcatctgtaattgcagtctatgcagaactaagaaaggatggttccctactgggtctgcgtataggaaggcgatcggacttgggtacaaatctgtggcacactttctaattgcaacacatcgagcatcatcagtcaattcaagctcagtcgacaataacaagctgccgtttgctaaatctgaaacctcgtgcatttctgaccatgccaatgagagcccagaggatggagaaacgaccagcaaagctaagcagaacaaagcaactcgccgccgagtgaggaagagttctgatggcgacaacgatagcagaagtgggtccgtggtgacatctgactgccaggatgatcaagccaacaaggatgctgggtgtgtgactccgtcgtctaagccagcgtcaacgaagaggaagtacgttgaacgaagccctgactgcatcgcaagcaggctgcggtctcggctcaatatgccatgagcccatgaagatgtgatcaggatcatgtatctcttttactgcctgaccgcaggctctgtcccttcttgcgatgatgttgtggctctttcatctacaagcagttcatggtttgccagtaacgatgttctgcgcgagtaagaaggtgattgttatagtctcttgcgcagctgtgttaagagcttgaaactagactcagtcatgtgtagtatttgtaccattagtgccaactgtggtctctggcattagtgcctactgtggtttgtgagctatgagttgacgcgatagcctgtagctttaatgtacaattcatgatatgcaagtgaatatgttcattttcagctggaaagaaaaaagg

SEQ ID NO: 36040 - protein, 400 aa, Zea mays subsp. mays
MATAVSTPADLSPTPAPRRRGRPPKNPAPAEAPGSPADQAEVIGDYERERDARIRENMERMQKLGILDLAHTLSHCAAASGLGTGSGRWRRKPVEPGSAGGARVKPASPAPSRRSLRLKDVEPVTYREIEPKKEKRSEGGKTVLMEVGAKEEIYTEEHDKLLGTCNTPWTLFVDGYGKDGKRIYDQVRGQTCHQCRQKTLGHHTSCCKCQIVQGQFCGDCLYMRYGENVLEVKKNPNWICPVCRGICNCSLCRTKKGWFPTGSAYRKAIGLGYKSVAHFLIATHRASSVNSSSVDNNKLPFAKSETSCISDHANESPEDGETTSKAKQNKATRRRVRKSSDGDNDSRSGSVVTSDCQDDQANKDAGCVTPSSKPASTKRKYVERSPDCIASRLRSRLNMP

SEQ ID NO: 36041 - protein, 343 aa, Zea mays subsp. mays
MERMQKLGILDLAHTLSHCAAASGLGTGSGRWRRKPVEPGSAGGARVKPASPAPSRRSLRLKDVEPVTYREIEPKKEKRSEGGKTVLMEVGAKEEIYTEEHDKLLGTCNTPWTLFVDGYGKDGKRIYDQVRGQTCHQCRQKTLGHHTSCCKCQIVQGQFCGDCLYMRYGENVLEVKKNPNWICPVCRGICNCSLCRTKKGWFPTGSAYRKAIGLGYKSVAHFLIATHRASSVNSSSVDNNKLPFAKSETSCISDHANESPEDGETTSKAKQNKATRRRVRKSSDGDNDSRSGSVVTSDCQDDQANKDAGCVTPSSKPASTKRKYVERSPDCIASRLRSRLNMP

SEQ ID NO: 36042 - protein, 340 aa, Zea mays subsp. mays
MQKLGILDLAHTLSHCAAASGLGTGSGRWRRKPVEPGSAGGARVKPASPAPSRRSLRLKDVEPVTYREIEPKKEKRSEGGKTVLMEVGAKEEIYTEEHDKLLGTCNTPWTLFVDGYGKDGKRIYDQVRGQTCHQCRQKTLGHHTSCCKCQIVQGQFCGDCLYMRYGENVLEVKKNPNWICPVCRGICNCSLCRTKKGWFPTGSAYRKAIGLGYKSVAHFLIATHRASSVNSSSVDNNKLPFAKSETSCISDHANESPEDGETTSKAKQNKATRRRVRKSSDGDNDSRSGSVVTSDCQDDQANKDAGCVTPSSKPASTKRKYVERSPDCIASRLRSRLNMP

SEQ ID NO: 36043 - DNA, 1347 bp, Zea mays subsp. mays
atttatgttatccccacgtgacggccggccctcgaccccacggcgcccgctccctcgtactcgttctcgtcaacccgccgcagggacatgaaagacgacgacgacggcggcgctggctctggcgcgcgcggccgcgtgctcgagtcggagcacggcctccccacgcgagggccggcccacgatcccacggcgcccgtcccctcgtcctcgtcctcgtcaacccaacgcagggaccagccggcccacgaccccacggcgcccgccccctcgtcctcatcctcgtcaatccgccgcagggacatgaaagacgacgacgacggcggcgctggctctggcgcgtgcggccgcgtgctcgagtgggagcacggcctccccacggcggaggagctgacgccggtctcgcacccgctcatccctccggcgctcgctgccgcgttcggcattgacgtcccgcgcaccgccttcccctcatccgccttcgactcccctgccctcgcgcgcaagccccccaatactcgcctgtccttgggctgctacggcgaggacgatgatgagaaggaggaagaggggaagagcgaggtcgccgcctacacaaccggcgcgtgcggaggcgggaagagcgaggacgccgcatccgcatccggcgcgtgcagaggcgggagggctgagaagaaggcgaggatagcgtggacgccggagctgcacaaccggttcgtcgcggcggtggagcacctcggcgacaagggcgccgtgcccaaggccatcgtgcgcctgatgaacgtcgagggcctcacccgcgaaaacgtcgccagccacctccagaagtaccgcatctacctcaagcaacaagcgcgcagccccgcagggccgcagccgcctccggcatacagtccctccgactccaggccccaacaaccctctgacacctccacccggagcacctgcgacatcgagaagctggaacgcgacaaagaagctagaaaagacaaatgatagcttcgacattaaagcttacccgaagcacctcgtgatatctgaagcggatgacaagaaaacgaaggagggttcaagtgatgtgttcgacatgcctccaagaagaaaagacacaagacagcaacgccgtcaacaacctcgatatatctgtgtataggatttgagaacttaaatgtagttccgtacgaagttgttcgtcgcgttgcctatgcatggggacgacctttttactgttcccaggtgcactcacacttggatcgctcagcatttgaagttgtaaagaatacgtactttcgaaccacattcaaacgttacgaaggtatctttgtaaagagaacgggaaaaaaatatgtg

SEQ ID NO: 36044 - protein, 301 aa, Zea mays subsp. mays
MKDDDDGGAGSGARGRVLESEHGLPTRGPAHDPTAPVPSSSSSSTQRRDQPAHDPTAPAPSSSSSSIRRRDMKDDDDGGAGSGACGRVLEWEHGLPTAEELTPVSHPLIPPALAAAFGIDVPRTAFPSSAFDSPALARKPPNTRLSLGCYGEDDDEKEEEGKSEVAAYTTGACGGGKSEDAASASGACRGGRAEKKARIAWTPELHNRFVAAVEHLGDKGAVPKAIVRLMNVEGLTRENVASHLQKYRIYLKQQARSPAGPQPPPAYSPSDSRPQQPSDTSTRSTCDIEKLERDKEARKDK

SEQ ID NO: 36045 - protein, 230 aa, Zea mays subsp. mays
MKDDDDGGAGSGACGRVLEWEHGLPTAEELTPVSHPLIPPALAAAFGIDVPRTAFPSSAFDSPALARKPPNTRLSLGCYGEDDDEKEEEGKSEVAAYTTGACGGGKSEDAASASGACRGGRAEKKARIAWTPELHNRFVAAVEHLGDKGAVPKAIVRLMNVEGLTRENVASHLQKYRIYLKQQARSPAGPQPPPAYSPSDSRPQQPSDTSTRSTCDIEKLERDKEARKDK

SEQ ID NO: 36046 - DNA, 1635 bp, Zea mays subsp. mays
gcaccaaccttgttgttgttgttcttctatttcttagtatcatagcacagtatttcgtgctctcgcttcgctcccttaatttatcaccattcctaatttattctatttcttagtatcatagcacagtatttcgctcgccccgatttcccaactcttcccgtgcctcagacagcatcggattgcttgatctcgattgtcagaataagattcagcgcaggtttggattcaccgaatccaccgattgcttgcgccccgcggtcgcgcgcggcggaatttcggccgccgccaattcgggcctctccggaagggtgtccccggtgtggttcgcctaatatccgctgccctcgtgcgggactcctcgtgattttcggctgtgcgcttggcttttccagtcccgtgttgtggttccagcctttcaggggatggggcgccgcgggttgctcaaggctgcgcttctgctgtgcttccttgctgcttgctccgggagagaacttacgatcaaacagaacccttccactaccatatacaactcgactcttgccaagatactcgtggaatatgcttctgcaatctatactgctgatttgacgcaattgtttacttggacatgtgccagatgcggtgacttgatcgaggggttcgagatgatagagatcattgtggatgtcgagaactgcttgcaggcatattttggttttgccagtgacataaacgcagtcgttgttgtttttagaggaactcaagagaacagcatccagaattggatagaggacttgttatggaaacaacttgatcttgactaccctggcatgcctgaagcaatggttcaccgagggttttattctgcatatcacaacacgacactacgtgatggagtagtcagtggtattcagaggactaggaaagcttacggagacattccaatcatgatcacgggtcattcaatgggtggagctatggcttcattctgtgcgctcgatcttgttgttaactacggactggatggcgtaaacctgatgacatttgggcagcctcgtattggcaatgctgcatttgcttcttatttcaagacatacttgcctcaagcgatccgagttactcatgcccatgatattgtgcctcacctgccaccatatttctcattcttcccacagaagacctaccatcacttcccaagagaggtatggacccacaatattggactaggaaccctagtgtaccccgtagaaaagatctgtgacgattctggtgaagaccctacatgctgcagatcagtaagtggaagtagcgtgcgagaccatatatactatcttggcgtcagcatgcatgcagaagactggagcagctgcagaatcgtcatggactacagcaaattgcagtatcagatggacctcaacggtaatctcgtattgtcgaagcagcccggtttgtcaaacgccagaggattcagtgctcagtgaaccagtctatgatttgtacagtataatagcttcacgaatcagtaatgttcaattgttaatggatcaaaggagaagggttggaaccagcatgccgattcggagatgcttattgtacatgtgattacgtaatgtattgttcagtttgcaaatatatattcacacacgccgatatttg

SEQ ID NO: 36047 - protein, 345 aa, Zea mays subsp. mays
MGRRGLLKAALLLCFLAACSGRELTIKQNPSTTIYNSTLAKILVEYASAIYTADLTQLFTWTCARCGDLIEGFEMIEIIVDVENCLQAYFGFASDINAVVVVFRGTQENSIQNWIEDLLWKQLDLDYPGMPEAMVHRGFYSAYHNTTLRDGVVSGIQRTRKAYGDIPIMITGHSMGGAMASFCALDLVVNYGLDGVNLMTFGQPRIGNAAFASYFKTYLPQAIRVTHAHDIVPHLPPYFSFFPQKTYHHFPREVWTHNIGLGTLVYPVEKICDDSGEDPTCCRSVSGSSVRDHIYYLGVSMHAEDWSSCRIVMDYSKLQYQMDLNGNLVLSKQPGLSNARGFSAQ

SEQ ID NO: 36048 - protein, 271 aa, Zea mays subsp. mays
MIEIIVDVENCLQAYFGFASDINAVVVVFRGTQENSIQNWIEDLLWKQLDLDYPGMPEAMVHRGFYSAYHNTTLRDGVVSGIQRTRKAYGDIPIMITGHSMGGAMASFCALDLVVNYGLDGVNLMTFGQPRIGNAAFASYFKTYLPQAIRVTHAHDIVPHLPPYFSFFPQKTYHHFPREVWTHNIGLGTLVYPVEKICDDSGEDPTCCRSVSGSSVRDHIYYLGVSMHAEDWSSCRIVMDYSKLQYQMDLNGNLVLSKQPGLSNARGFSAQ

SEQ ID NO: 36049 - protein, 216 aa, Zea mays subsp. mays
MPEAMVHRGFYSAYHNTTLRDGVVSGIQRTRKAYGDIPIMITGHSMGGAMASFCALDLVVNYGLDGVNLMTFGQPRIGNAAFASYFKTYLPQAIRVTHAHDIVPHLPPYFSFFPQKTYHHFPREVWTHNIGLGTLVYPVEKICDDSGEDPTCCRSVSGSSVRDHIYYLGVSMHAEDWSSCRIVMDYSKLQYQMDLNGNLVLSKQPGLSNARGFSAQ

SEQ ID NO: 36050 - DNA, 1108 bp, Zea mays subsp. mays
  misc_feature (553)..(553): n is a, c, g, or t
attaatcccccacgttccccttccctttctctcccgccgccgcacgcccctctcaaacctccgcgctcccgcccagctagggtttccccgatctcccctccttctcaaccgccgccgtcgccgagagcgccgccacgatgttggagctgcggcttgtgcaggggagctcggggaaaccctagctgggcgggcgctgaaggcgttgcgggggctggtgaagctgcaggcgctggtccggggcaacatcgtgcggcggcggcggcggaaaccaccaccaccagcaccaccagtcgccgtgctcgacgacgatgggctccgagcagaacagccggagctacgcgaccatgccggagtcgccgtccaaggactcgacgaccgcgcagcagtcggtgccgagcccgccgtcggtgggcatggccgaggaggaggccctgagcccgctgcgcgtgcccgtgcccgcggacgtggccgagctctgcgacagcccccagttcttctcggccacgtcgtcgcggcccgggagctcgaggcggggcccgttcacgccgacggncaagagcgagtgctcgcgcagcctcttcggcggctactcccgactacccgaaactacatggccaacacggagtcgttccgcgccaaggcgcggtcgcagagcgcgccgaagcagaggccgcagtacgagcggtccagctccctacgcagggcgtcggcggcgcagaggtcggcggcggcggcggcctcctccctgcacgccaagttcaccaacaaggcgtacccgggctctggcaggctggatcggcttggcttgccggccaggtactgatactgagcctgcctaattcgcgtcaggatgatgtgctgccgctgtgtctcgagcgaggaggacgacgacgaagaagtgcaatcgactagtggtagttaggttcccccgtgccttggttgtgctattaccatcaacagttttttctgtttcttgctttgtgtagctagccatgtctaaagttgctggtagctgtaatgatgctataatgcgtgcttaactgctgacgaacctttttcctctacatttccgtggtatatatatatgtgccgtcaaatcatgcctggg

SEQ ID NO: 36051 - protein, 273 aa, Zea mays subsp. mays
  misc_feature (184)..(184): Xaa can be any naturally occurring amino acid
LIPHVPLPFLSRRRTPLSNLRAPAQLGFPRSPLLLNRRRRRERRHDVGAAACAGELGETLAGRALKALRGLVKLQALVRGNIVRRRRRKPPPPAPPVAVLDDDGLRAEQPELRDHAGVAVQGLDDRAAVGAEPAVGGHGRGGGPEPAARARARGRGRALRQPPVLLGHVVAARELEAGPVHADXQERVLAQPLRRLLPTTRNYMANTESFRAKARSQSAPKQRPQYERSSSLRRASAAQRSAAAAASSLHAKFTNKAYPGSGRLDRLGLPARY

SEQ ID NO: 36052 - protein, 176 aa, Zea mays subsp. mays
  misc_feature (82)..(82): Xaa can be any naturally occurring amino acid
MGSEQNSRSYATMPESPSKDSTTAQQSVPSPPSVGMAEEEALSPLRVPVPADVAELCDSPQFFSATSSRPGSSRRGPFTPTXKSECSRSLFGGYSRLPETTWPTRSRSAPRRGRRARRSRGRSTSGPAPYAGRRRRRGRRRRRPPPCTPSSPTRRTRALAGWIGLACRPGTDTEPA

SEQ ID NO: 36053 - protein, 164 aa, Zea mays subsp. mays
  misc_feature (70)..(70): Xaa can be any naturally occurring amino acid
MPESPSKDSTTAQQSVPSPPSVGMAEEEALSPLRVPVPADVAELCDSPQFFSATSSRPGSSRRGPFTPTXKSECSRSLFGGYSRLPETTWPTRSRSAPRRGRRARRSRGRSTSGPAPYAGRRRRRGRRRRRPPPCTPSSPTRRTRALAGWIGLACRPGTDTEPA

SEQ ID NO: 36054 - DNA, 1466 bp, Zea mays subsp. mays
  misc_feature (1191)..(1191): n is a, c, g, or t
  misc_feature (1373)..(1373): n is a, c, g, or t
  misc_feature (1394)..(1394): n is a, c, g, or t
atgtaaaaccgtccgacgcgagccccacctccgcgctcgcacgcggaaggagagggacgagcgagccaccgtcaccgagcgcggttacaagaaaatccaatctctcccccacgctcgtttcgactcgcgccatggaggcgcaggcgcaggacaatagggcggaggatggggacggcgcgcggcaacacgtagccggcggcgtcgcggcgacggggatggctatgggcgcgatccccatgcacgggttcatggtcccgaagccagagccggtggagttcttcggcgggatggccgtggtgcggagcaagccgccgccgcggaaccgcgaccggcacaccaaggtggaggggcgggggcggcggatccgcatgcccgcggcgtgcgcggccaggatcttccagctgacgcgggagctagggcacaagtccgacggcgagaccatccggtggctgctgcagcagtcggagcccgccatcatcgccgccaccggcaccggcacggtcccggcgatcgcgaccacggtcgacggcgtgctccgcatccccacgcagtcctcgtcgtcctccagcccctcgtccctcaccaccgtggtcgacggcgacgaggcgtccgccaagcgccgccgcaagctgcagccgacgcgagcggccgccggcgcgtccccgctcgccaccgccgcgcccgcggcgtactacccggtcctcgccgacccgctcctgcagggcaccggtggagcggccatctcggtgccgagcggcctcgcccccatcgccgcgtcgggcgcccctcaagggctcgtcccggtcttcgcggtccctgcggccggcagccccggcggcggcaaccgcatgattccgcaggccaccgccgtgtggatggtgccccagcctggcgccgcggccgcccagcccacgcaattctgggccatccagcccgcgccgcagctcatcaacctcggcggcgcgcaggccgccgtgttccccgcggcggtgaacgtcgccgacttccagggccagcagcccatctctagcttgtctcacaacagcaactcggagcatctgcacctggggtccgggtcccacgagcagcagcgcggcggtcgcagcgacgtcaaccatccggaggaggaagaagacgacgacgacgacgacgagccggtgtccgactccagcccagaagagtaacgcaccnccgtacccccagaaagtccaaccccaaagcttaggttccttttgctctaatttaatcgccccccctcgttttcccccttttcgcaatcctccttatgatgaactacatgatgctttctgtcgtagctcacgttcagttcagtgacccccagtgttagtggtagagagaagaagatgatgatnaaagaggtagtggaactgtanaagcagcgtgtaatgcaaatcaaaacgagcagctgatttgttattgagttaattaattgacgaccttttgcc

SEQ ID NO: 36055 - protein, 393 aa, Zea mays subsp. mays
VKPSDASPTSALARGRRGTSEPPSPSAVTRKSNLSPTLVSTRAMEAQAQDNRAEDGDGARQHVAGGVAATGMAMGAIPMHGFMVPKPEPVEFFGGMAVVRSKPPPRNRDRHTKVEGRGRRIRMPAACAARIFQLTRELGHKSDGETIRWLLQQSEPAIIAATGTGTVPAIATTVDGVLRIPTQSSSSSSPSSLTTVVDGDEASAKRRRKLQPTRAAAGASPLATAAPAAYYPVLADPLLQGTGGAAISVPSGLAPIAASGAPQGLVPVFAVPAAGSPGGGNRMIPQATAVWMVPQPGAAAAQPTQFWAIQPAPQLINLGGAQAAVFPAAVNVADFQGQQPISSLSHNSNSEHLHLGSGSHEQQRGGRSDVNHPEEEEDDDDDDEPVSDSSPEE

SEQ ID NO: 36056 - protein, 350 aa, Zea mays subsp. mays
MEAQAQDNRAEDGDGARQHVAGGVAATGMAMGAIPMHGFMVPKPEPVEFFGGMAVVRSKPPPRNRDRHTKVEGRGRRIRMPAACAARIFQLTRELGHKSDGETIRWLLQQSEPAIIAATGTGTVPAIATTVDGVLRIPTQSSSSSSPSSLTTVVDGDEASAKRRRKLQPTRAAAGASPLATAAPAAYYPVLADPLLQGTGGAAISVPSGLAPIAASGAPQGLVPVFAVPAAGSPGGGNRMIPQATAVWMVPQPGAAAAQPTQFWAIQPAPQLINLGGAQAAVFPAAVNVADFQGQQPISSLSHNSNSEHLHLGSGSHEQQRGGRSDVNHPEEEEDDDDDDEPVSDSSPEE

SEQ ID NO: 36057 - protein, 322 aa, Zea mays subsp. mays
MAMGAIPMHGFMVPKPEPVEFFGGMAVVRSKPPPRNRDRHTKVEGRGRRIRMPAACAARIFQLTRELGHKSDGETIRWLLQQSEPAIIAATGTGTVPAIATTVDGVLRIPTQSSSSSSPSSLTTVVDGDEASAKRRRKLQPTRAAAGASPLATAAPAAYYPVLADPLLQGTGGAAISVPSGLAPIAASGAPQGLVPVFAVPAAGSPGGGNRMIPQATAVWMVPQPGAAAAQPTQFWAIQPAPQLINLGGAQAAVFPAAVNVADFQGQQPISSLSHNSNSEHLHLGSGSHEQQRGGRSDVNHPEEEEDDDDDDEPVSDSSPEE

SEQ ID NO: 36058 - DNA, 1582 bp, Zea mays subsp. mays
  misc_feature (155)..(156): n is a, c, g, or t
  misc_feature (159)..(159): n is a, c, g, or t
  misc_feature (172)..(172): n is a, c, g, or t
  misc_feature (360)..(360): n is a, c, g, or t
  misc_feature (366)..(366): n is a, c, g, or t
  misc_feature (393)..(393): n is a, c, g, or t
  misc_feature (429)..(429): n is a, c, g, or t
  misc_feature (437)..(437): n is a, c, g, or t
  misc_feature (458)..(458): n is a, c, g, or t
  misc_feature (470)..(470): n is a, c, g, or t
  misc_feature (1326)..(1326): n is a, c, g, or t
  misc_feature (1380)..(1380): n is a, c, g, or t
gaccagaggcggagagcactatagtcacgagctccacagtccaagctcgcactcgcaagtgctagcatctctcgggaatggcggagtcgcgtggtttcgtgatgacggctgtgatggtggtggtggtggccatggtatcagtggcgccgcgcggnnggnaggcgaagacgancgattgagccgtgctcggggtccgactcttgcccggcgctgctgggctacacgctctacgccgacatgaaggtgtccgaggtggccgcgctcttctccgtcgacccggcggcgttgctggccgccaacgcgctcgacttcggcgccccagggtgcggcgcacgcatcctgcccatgggcctcttcgtncgcgtncccacccgctgctcctgcgccgacggntccgcaagtccgtctccgtccgctacgccgcgcgcncggccganacgctcgccaccgtctccgangtcgtcttcgcngggctcgcctcctccgaccagatccgcaacgagaacggcctcacctccgacgaccccgacgcgccgctcgacgccggccagaagctcgccatcccgctgccatgcgtctgcttcaactcgtccgacaacaacctccccgcggtgtacctctcctacgtcgtgcaggtcggggacaccgtgcccgccatcgctgcaagctacgagaccaccgtcacggatgtcatgaatgtcaatgccatggggagtcccgtcgccgcgccaggcgacattctcgccatcccattgccagcatgtgcatctgcatttccaaaatctgcatcagaccacggactgattgtagcgaatggaacttacgcgcttaccgctagcaactgtgtgcagtgtagctgtggacctggcagcctcaatctatattgcacgccaacttcactgtcgggaacctgtcctagtatgcaatgtcctaacagcaacgtgatgcttggcaatgtgagcacccatccaaccggcgctggatgcaacgtctctgcttgcagctacggaggttttgttaatggaactataacagcttcgctaaccggaggtctccaagccagatgcccaggaccacgccagtttcccgcactgacggaaccacctaccacggtgagccacgactcgacgtaccttcctccgttatcagcgcctgggccagcggaagctggtggcgtcatgcctgagccaggctcgccagggccaggcgcctcggtgcaagcagggcccttcacgctcccgaaagtgtctaaggccaatggccccgctggcagcgtttcagcagctccgttggtgggtaaaccacttcaaatcctacccgtcctgntctcctgcctagccttctacttgcagctctgagtgaacccacatcgcgatgagntctttagcatagtatgcttttgaagcaccaagggacatcattgctcgatcactccctctgagttgttgttctagctttgtttcgcgaaatctccccggcaaaactgcgcgcctaaacggcatatctgatgatgtgttcgctgcttttgtacaaaaagacaatggccctgtgtaaagcagtaaagtggtagctattgttctcc

SEQ ID NO: 36059 - protein, 221 aa, Zea mays subsp. mays
  misc_feature (212)..(212): Xaa can be any naturally occurring amino acid
MNVNAMGSPVAAPGDILAIPLPACASAFPKSASDHGLIVANGTYALTASNCVQCSCGPGSLNLYCTPTSLSGTCPSMQCPNSNVMLGNVSTHPTGAGCNVSACSYGGFVNGTITASLTGGLQARCPGPRQFPALTEPPTTVSHDSTYLPPLSAPGPAEAGGVMPEPGSPGPGASVQAGPFTLPKVSKANGPAGSVSAAPLVGKPLQILPVLXSCLAFYLQL

SEQ ID NO: 36060 - protein, 216 aa, Zea mays subsp. mays
  misc_feature (207)..(207): Xaa can be any naturally occurring amino acid
MGSPVAAPGDILAIPLPACASAFPKSASDHGLIVANGTYALTASNCVQCSCGPGSLNLYCTPTSLSGTCPSMQCPNSNVMLGNVSTHPTGAGCNVSACSYGGFVNGTITASLTGGLQARCPGPRQFPALTEPPTTVSHDSTYLPPLSAPGPAEAGGVMPEPGSPGPGASVQAGPFTLPKVSKANGPAGSVSAAPLVGKPLQILPVLXSCLAFYLQL

SEQ ID NO: 36061 - protein, 152 aa, Zea mays subsp. mays
  misc_feature (41)..(41): Xaa can be any naturally occurring amino acid
  misc_feature (43)..(43): Xaa can be any naturally occurring amino acid
  misc_feature (52)..(52): Xaa can be any naturally occurring amino acid
  misc_feature (64)..(64): Xaa can be any naturally occurring amino acid
  misc_feature (67)..(67): Xaa can be any naturally occurring amino acid
  misc_feature (74)..(74): Xaa can be any naturally occurring amino acid
  misc_feature (78)..(78): Xaa can be any naturally occurring amino acid
MKVSEVAALFSVDPAALLAANALDFGAPGCGARILPMGLFXRXPTRCSCADXSASPSPSATPRXRPXRSPPSPXSSSXGSPPPTRSATRTASPPTTPTRRSTPARSSPSRCHASASTRPTTTSPRCTSPTSCRSGTPCPPSLQATRPPSRMS

SEQ ID NO: 36062 - DNA, 1473 bp, Zea mays subsp. mays
tccattccttggccacgtaacccaattacccaacgcatcgaggagcgcacgaaggcaaccgccttcccatcccaccgggcatcggcccatctgatccgatcaggctagatcctgccgttgccggtcttcgcgccgcctatggccgaaggcgacgccgccgccgcccccgccgccgccgcggcggcggcgtccccgcggtcgcccatgccgcaggagacgccggcgatgcagaagcggaggcagcgggggctcgtgtcgcgggtgtggaagggcatcttcggcggccgcgaggacgtcgagaagctgctgcaggcgctgtccaaggaggaggaggccgtgcgggcgcgccttcgccgccgcgcccgcgcttcccgccagtccgcgcacaacgtcctcgccctcgccgccgcgctcgagattgttgcccgttggatacgccatcatgaccacgagatcgccggacatcagctggcagatgagggcagtcagggtgctacccatgttcttggttcctgctctagctgctctcatctactcgaccattacaaacctcacgaaaatgcttgacaacagagaccaacaaactcttgaaaagctacgaactgaaaggcaagccaagattgatgaattgaaggagagaacaaattactacactactcagcaacttatacagagatatgatcttgacccagctgcaaaggcggcagcggcaacagttttggcatcaaagttgggtgcggattctggactgagagtctttttgggagatgaaacaagcagggatgcagcaataggtagaagtaatgataacaatcttggaccaactactggacttaggcaaagaaaaggacacgtaaccaatggtgctggaagggcccaatcccttgagccatttgatggctccaatgtgtatgatggcagtgatgaaggccccagccctcctaatcagactgttgagcactttagaggtccatcgggtaatgatggggggttggcttgcacgagtagcagctctgcttgtaggagaggatccaacacagtgctacgctctaatctgtggcaactgccatatgcataacggtcttgcgaggaaagaggactttgccttcgtcacgtactactgccctcactgtaatgccctcaatggatcccggcaacatgatgaccatgaattggtacctgattctggcaaggagagtcctgattctcaatctggcggaatcattggccaagctggtgcaagccttgcaacctcaggtgctgcgagtcctgttgcaagcagcctaccaacccttgaagaactctctgcagaggaagattctggggagaaggcgagcagtgaccaacctgccaattgaactcatcatttcctgtatattgtgttctttgtggagtattgttttggatttgactctgggtatcgaaatttttgtacctaccatgtagtatatatggactaccatgctttcctgc

SEQ ID NO: 36063 - protein, 211 aa, Zea mays subsp. mays
MTTRSPDISWQMRAVRVLPMFLVPALAALIYSTITNLTKMLDNRDQQTLEKLRTERQAKIDELKERTNYYTTQQLIQRYDLDPAAKAAAATVLASKLGADSGLRVFLGDETSRDAAIGRSNDNNLGPTTGLRQRKGHVTNGAGRAQSLEPFDGSNVYDGSDEGPSPPNQTVEHFRGPSGNDGGLACTSSSSACRRGSNTVLRSNLWQLPYA

SEQ ID NO: 36064 - protein, 200 aa, Zea mays subsp. mays
MRAVRVLPMFLVPALAALIYSTITNLTKMLDNRDQQTLEKLRTERQAKIDELKERTNYYTTQQLIQRYDLDPAAKAAAATVLASKLGADSGLRVFLGDETSRDAAIGRSNDNNLGPTTGLRQRKGHVTNGAGRAQSLEPFDGSNVYDGSDEGPSPPNQTVEHFRGPSGNDGGLACTSSSSACRRGSNTVLRSNLWQLPYA

SEQ ID NO: 36065 - protein, 192 aa, Zea mays subsp. mays
MFLVPALAALIYSTITNLTKMLDNRDQQTLEKLRTERQAKIDELKERTNYYTTQQLIQRYDLDPAAKAAAATVLASKLGADSGLRVFLGDETSRDAAIGRSNDNNLGPTTGLRQRKGHVTNGAGRAQSLEPFDGSNVYDGSDEGPSPPNQTVEHFRGPSGNDGGLACTSSSSACRRGSNTVLRSNLWQLPYA

SEQ ID NO: 36066 - DNA, 2053 bp, Zea mays subsp. mays
  misc_feature (132)..(132): n is a, c, g, or t
  misc_feature (518)..(518): n is a, c, g, or t
  misc_feature (638)..(638): n is a, c, g, or t
  misc_feature (1648)..(1648): n is a, c, g, or t
actagaacaccttggtggcctccgcgtctcgccgcctccccggactccgcatccagccccggcactcgcactcccaaagcagcggacactagtagggtttaaactttccccccgatccgcctcgcctccggnctgtcgcctgccgccagaccaacgcccccacacccagccggagacgacgatggtggggctcggctcgatggcgggctatgggatccagtcgatgctcaaggaaggccaccgccacctctccgggctcgaggaggccgtgctcaagaacatcgacgcctgccgcgagctctccgccatcacgcgcacatccctgggccccaacggaatgaacaagatggttatcaatcacttggacaagctgtttgtcacaaacgatgctgccaccatcgtgaatgagcttgaggttcagcacccggctgctaaaatcctggtactggctgccaaggctcaacaggaggagattggggatggagccaatctcaccatatcgtttgctggtgaactgnttgagaaggctgaggagctcatcaggatgggcttgcatccgagtgagatcatcattggctacaccaaagccatcaacaagacaattgaaattttagaggatcttgttgagaaaggctcanagaacatggacgtaagaaacaaggaggatgttgtgttgaggatgagatctgctgtcgcaagcaagcagtttggccaggaggatatgctgtgccctcttgtggctgatgcctgcattcaagtttgccccaaaaatcctgcaaactttaatgttgacaatgttagagtggctaagctacttggaggtggtttgcacaattcttctgtggtccgtgggatggttctgaaaaatgatgctgttggtagcatcaaaagggcggagaaggcaaagattgtcgtatttgctggtggtgtcgacacctcggcaactgaaacaaagggaaccgtgttgatccattccgctgagcagctagaaaattatgctaagaccgaggaagctaaggtggaggagcttatcaaagctgtcgctgactctggtgccaaggttattgtcagtggagctgcagtggggtgacatggcacttcatttctgtgaacgttataagctgatggttctgaaaatcagctcgaagtttgaactaagaaggttctgccgtactactggggctgttgcaattttgaaacttagccaacccaatgcggacgaactaggatacgcagattctgtttctgtagaagaaattggtggtactcgggttactgtcgtcaagaacgaagatggtggaaattcagtggctactgttgtcctgagaggcagtactgacagtatactagatgatcttgaaagagctgttgatgatggcgtcaatacatacaggtcaatgtgcagggacagtaggataattcctggtgctgctgcaacagaagttgagctggcaaagagattgaaggagttctctttgaaggaaacagggttggaccagtatgccattgcgaaatttgctgaaagctttgaaatggttccaagaaccctggcagaaaatgctggacttagcgcaatggagataatatcctctctttatgctgagcatgctagtggcaatgcgaaagttggcattgatctggaggaagncgcctgcaaggacatctcgactttaaaaatatgggacctctatgtcacaaagttttttgccctaaaatactctgccgatgctgcttgcacggtgctgcgggttgaccagatcattatggcaaagccggcaggaggtccaagaagagatgcccagcctggtggcgggatggacgaggattagtttgattatagttgttttctttgtatcacgtatgtgaggtttcagagcagagatcatactttatcttggcttttggttctgtagaaggtttgggtgcctggagttcacttttggaaggtctgcacggttgcgcggatatcacataggcaatttgtatgttttttcctggtgtattgcggtgcggatgtatcaaatgattcattacaggggccgttccgtcagtt

SEQ ID NO: 36067 - protein, 362 aa, Zea mays subsp. mays
  misc_feature (44)..(44): Xaa can be any naturally occurring amino acid
  misc_feature (173)..(173): Xaa can be any naturally occurring amino acid
  misc_feature (213)..(213): Xaa can be any naturally occurring amino acid
LEHLGGLRVSPPPRTPHPAPALALPKQRTLVGFKLSPRSASPPXCRLPPDQRPHTQPETTMVGLGSMAGYGIQSMLKEGHRHLSGLEEAVLKNIDACRELSAITRTSLGPNGMNKMVINHLDKLFVTNDAATIVNELEVQHPAAKILVLAAKAQQEEIGDGANLTISFAGELXEKAEELIRMGLHPSEIIIGYTKAINKTIEILEDLVEKGSXNMDVRNKEDVVLRMRSAVASKQFGQEDMLCPLVADACIQVCPKNPANFNVDNVRVAKLLGGGLHNSSVVRGMVLKNDAVGSIKRAEKAKIVVFAGGVDTSATETKGTVLIHSAEQLENYAKTEEAKVEELIKAVADSGAKVIVSGAAVG

SEQ ID NO: 36068 - protein, 302 aa, Zea mays subsp. mays
  misc_feature (113)..(113): Xaa can be any naturally occurring amino acid
  misc_feature (153)..(153): Xaa can be any naturally occurring amino acid
MVGLGSMAGYGIQSMLKEGHRHLSGLEEAVLKNIDACRELSAITRTSLGPNGMNKMVINHLDKLFVTNDAATIVNELEVQHPAAKILVLAAKAQQEEIGDGANLTISFAGELXEKAEELIRMGLHPSEIIIGYTKAINKTIEILEDLVEKGSXNMDVRNKEDVVLRMRSAVASKQFGQEDMLCPLVADACIQVCPKNPANFNVDNVRVAKLLGGGLHNSSVVRGMVLKNDAVGSIKRAEKAKIVVFAGGVDTSATETKGTVLIHSAEQLENYAKTEEAKVEELIKAVADSGAKVIVSGAAVG

SEQ ID NO: 36069 - protein, 296 aa, Zea mays subsp. mays
  misc_feature (107)..(107): Xaa can be any naturally occurring amino acid
  misc_feature (147)..(147): Xaa can be any naturally occurring amino acid
MAGYGIQSMLKEGHRHLSGLEEAVLKNIDACRELSAITRTSLGPNGMNKMVINHLDKLFVTNDAATIVNELEVQHPAAKILVLAAKAQQEEIGDGANLTISFAGELXEKAEELIRMGLHPSEIIIGYTKAINKTIEILEDLVEKGSXNMDVRNKEDVVLRMRSAVASKQFGQEDMLCPLVADACIQVCPKNPANFNVDNVRVAKLLGGGLHNSSVVRGMVLKNDAVGSIKRAEKAKIVVFAGGVDTSATETKGTVLIHSAEQLENYAKTEEAKVEELIKAVADSGAKVIVSGAAVG

SEQ ID NO: 36070 - DNA, 1885 bp, Zea mays subsp. mays
  misc_feature (454)..(454): n is a, c, g, or t
  misc_feature (469)..(469): n is a, c, g, or t
aacacatgtgtgtgcagtgtagacgagcgcgtacgtaacttattgggaggttgcgcgtacggcaactcccgtcgcctccgcgctcccctaaccgcctcccccttgtctcatggtggaagtggaacaaccctccgcctgcgccgctgcgaagtaagtgagaagggaaaacaagaaacgaggagggagggaggggacgacgtacggagcgagctagcggcgcggcgggcgtcgctcggcatggacgcggaggcggcggcggcggcggcggcgacggcggtggaggagagggagcggctgcggaggagcttcgcgtcggggaggacgcggccggcggcgtggcgggaggcgcagctgcgcggccttctgcgcatggccgccgagagggaggacgacatctgcgccgccctgcacgccgacctcgcgaagccccttaccgagtgttatgtacacgagntatcattggtcattncttcgtgcaaatttgctctcaagaatctcaagaaatggatgaagccccgaaaggtccccggcgggctgctgaccttcccgtcggcggccagcgtcgcggcggagcctctcggcgtcgtgctcgtcatctccgcctggaactaccccttcttgctggccatcgacccggtcgtgggggcattcgcggcgggcaacgccgtggcgctgaagccgtcggaggtggcgccggccacgtcgttgctgctggccgacctgctgccgcgctacgtggacccctcgtgcgtcagggtcgtgcagggcggcatcccggagaccaccgcgctgctggagctccagtgggacaagatcttctacacaggtaacagcagagtaggacgcatcgtcatgtcctacgctgccaatcacctgacgcccgtggtcttggagctcggtggcaaatgccctgtcgtcgtcgactccgacgtcaacctccacgtcgctgccaagaggatcgccgccggcaagtggggctgcaacagcggccaagcctgcgtctcgccggactacgtcgtcaccaccaaatcgttcgcgccaaagctgctggagtccctgaagcgagtgctattcgagttctacggggaggagccgctgcggtcgccggacctgtcgcgcgtcgtcaactccaaccacttcaacaggctcatggcgctcatggacgactactcggtctccggcaatgtcgcgttcggcggccagatcgacgagcggcggctaaggatcgccccgacgctgctgctggacgtcccgctcgactccgcgatgatgaaggaggagatcttcgggccgctgcttcccataatcacggtggacaagatcggcgagagcttcgctgtgatcaactccatgcccaagccgctggcagcttacctcttcagcaacgacgggcaggctcaagcagcagttcgagaggaccgtctcggcgggagggatcatgttcaacgacaccggcatccacctgacaaacccgaacctgccgttcggaggagtcggggagagcggcatgggcgcctaccacggcgccttcagcttcgacgccttctcccacaggaaggccgtcctggaccgcagcttcctcggcgaggccagggccaggtacccgccgtacacgccggcgaagctcgccatcctcaggggcgtgctcaatggcagcccgcttgccacggttcaggcggctgcggggtgtacaggaggggcatcagctgactgactgactgaccccccttcatgcttattattaataataagcataaatattcaccgcatacacattgctgtgcttttattaaggttgttgtgagggcgaaaaatgtattgaccctttgcgtgtgcgcgtgcgtgtatagcaactattaataaaagaaaaaagtgatgttcattc

SEQ ID NO: 36071 - protein, 569 aa, Zea mays subsp. mays
  misc_feature (152)..(152): Xaa can be any naturally occurring amino acid
  misc_feature (157)..(157): Xaa can be any naturally occurring amino acid
NTCVCSVDERVRNLLGGCAYGNSRRLRAPLTASPLSHGGSGTTLRLRRCEVSEKGKQETRREGGDDVRSELAARRASLGMDAEAAAAAAATAVEERERLRRSFASGRTRPAAWREAQLRGLLRMAAEREDDICAALHADLAKPLTECYVHEXSLVIXSCKFALKNLKKWMKPRKVPGGLLTFPSAASVAAEPLGVVLVISAWNYPFLLAIDPVVGAFAAGNAVALKPSEVAPATSLLLADLLPRYVDPSCVRVVQGGIPETTALLELQWDKIFYTGNSRVGRIVMSYAANHLTPVVLELGGKCPVVVDSDVNLHVAAKRIAAGKWGCNSGQACVSPDYVVTTKSFAPKLLESLKRVLFEFYGEEPLRSPDLSRVVNSNHFNRLMALMDDYSVSGNVAFGGQIDERRLRIAPTLLLDVPLDSAMMKEEIFGPLLPIITVDKIGESFAVINSMPKPLAAYLFSNDGQAQAAVREDRLGGRDHVQRHRHPPDKPEPAVRRSRGERHGRLPRRLQLRRLLPQEGRPGPQLPRRGQGQVPAVHAGEARHPQGRAQWQPACHGSGGCGVYRRGIS

SEQ ID NO: 36072 - protein, 490 aa, Zea mays subsp. mays
  misc_feature (73)..(73): Xaa can be any naturally occurring amino acid
  misc_feature (78)..(78): Xaa can be any naturally occurring amino acid
MDAEAAAAAAATAVEERERLRRSFASGRTRPAAWREAQLRGLLRMAAEREDDICAALHADLAKPLTECYVHEXSLVIXSCKFALKNLKKWMKPRKVPGGLLTFPSAASVAAEPLGVVLVISAWNYPFLLAIDPVVGAFAAGNAVALKPSEVAPATSLLLADLLPRYVDPSCVRVVQGGIPETTALLELQWDKIFYTGNSRVGRIVMSYAANHLTPVVLELGGKCPVVVDSDVNLHVAAKRIAAGKWGCNSGQACVSPDYVVTTKSFAPKLLESLKRVLFEFYGEEPLRSPDLSRVVNSNHFNRLMALMDDYSVSGNVAFGGQIDERRLRIAPTLLLDVPLDSAMMKEEIFGPLLPIITVDKIGESFAVINSMPKPLAAYLFSNDGQAQAAVREDRLGGRDHVQRHRHPPDKPEPAVRRSRGERHGRLPRRLQLRRLLPQEGRPGPQLPRRGQGQVPAVHAGEARHPQGRAQWQPACHGSGGCGVYRRGIS

SEQ ID NO: 36073 - protein, 446 aa, Zea mays subsp. mays
  misc_feature (29)..(29): Xaa can be any naturally occurring amino acid
  misc_feature (34)..(34): Xaa can be any naturally occurring amino acid
MAAEREDDICAALHADLAKPLTECYVHEXSLVIXSCKFALKNLKKWMKPRKVPGGLLTFPSAASVAAEPLGVVLVISAWNYPFLLAIDPVVGAFAAGNAVALKPSEVAPATSLLLADLLPRYVDPSCVRVVQGGIPETTALLELQWDKIFYTGNSRVGRIVMSYAANHLTPVVLELGGKCPVVVDSDVNLHVAAKRIAAGKWGCNSGQACVSPDYVVTTKSFAPKLLESLKRVLFEFYGEEPLRSPDLSRVVNSNHFNRLMALMDDYSVSGNVAFGGQIDERRLRIAPTLLLDVPLDSAMMKEEIFGPLLPIITVDKIGESFAVINSMPKPLAAYLFSNDGQAQAAVREDRLGGRDHVQRHRHPPDKPEPAVRRSRGERHGRLPRRLQLRRLLPQEGRPGPQLPRRGQGQVPAVHAGEARHPQGRAQWQPACHGSGGCGVYRRGIS

SEQ ID NO: 36074 - DNA, 1615 bp, Zea mays subsp. mays
  misc_feature (800)..(800): n is a, c, g, or t
  misc_feature (1344)..(1344): n is a, c, g, or t
  misc_feature (1611)..(1611): n is a, c, g, or t
actgggtccgtcgctccgacactccccttcggcctctcctctcctttcagttctttctcgccactccgtttgcccgttcacgctcccctctccctctcccacctcctgttcttcgtcttcgtggagactactgagatggccgtcgacaagcaggcggacgccaaggagagggagaagatcgacgccgttcgcaagctgctgcgcaagcaggcgccgctctccataaagcaggcgcagtactgcgacgacgcgtgcgtggagcggttcctgcggtggcgcggggagagcgtcaagaaggcggcgaagcacctgaggaccgtcctgtcatggagggagaccgtcggagctgaccacatcatggccgacgagttctccgccgagctcgccgacggcgtggcgttcgtctccggccacgacgacgacgggcgcccggtagtggtgtttcgaatcaagcaggaataccccaagttccgctcgccgaaatcgttcgtgcgcctgctggtgttgacactggaggtggccgtggcgtgcatgtcccggtccgtgcaccagctcgtcctcctcttcgatgcaagctttttccgatcggcgtcggctttcctcaacctgctcatgggcacgctcaagatcgtcgccgactactaccccggccgcctccaccgcgccttcgtcatcgacgcgccctccctcttctccgtcctctggaagggagtgaggccgttcgtggagctggcgccggcgacggcggtggtgtgctccctggacttcgaggactcgctggaggacgcctccttcacggngtacccgcggaccgcgtccctgcggttcgagccgccgccggcggtggtcacggggaaggccggcgtggggtcggcctcgtcgcggttctccgtcacccccaccgacaaccccgtcaagccgtggtacctctgcaccatccccgcctcggtgggctcccgctccgtggtgcccacctccagcagcagcccgtcgctggtcggcgcgtccccgctctccgcgcgctccttctccttcgcctcgcccgccgcgctgcgctccacgccgttcccgcgcggcgggggcgcccccccgacgccttcctccgccgtcacgggccacaagatcccgccgccgccgcagttcccgcggacgccgcggccgtcgttcctgcagtcgccgtcgacgctgttcgcgttccggaaggacgggcagcagaccagccgcgtggagcgcgagcgcgggtccttcctcccgtacctccgcttctaccgccgcccctacgacgagatttcctaccgcgccatgatgcgcccgccgctcggcggcctgatacccatcgtcganaagttcaagcacaagccggtgcagcagacgctgcgtcgacacgctgggctccaccagcatcagcagcagcagcaccaccattaccaacagcagcagaggatctgagtctcgtctctcagtcggtactgcatggcgacccgagaattttctccatacagcataaaggcgatgctatattatgctaagttaatcttttgccaagtatgatattcttaaaggcatgtataataacatcccaaaaaaatgtgagtaaaatggacgcctttntgcg

SEQ ID NO: 36075 - protein, 482 aa, Zea mays subsp. mays
  misc_feature (267)..(267): Xaa can be any naturally occurring amino acid
  misc_feature (448)..(448): Xaa can be any naturally occurring amino acid
TGSVAPTLPFGLSSPFSSFSPLRLPVHAPLSLSHLLFFVFVETTEMAVDKQADAKEREKIDAVRKLLRKQAPLSIKQAQYCDDACVERFLRWRGESVKKAAKHLRTVLSWRETVGADHIMADEFSAELADGVAFVSGHDDDGRPVVVFRIKQEYPKFRSPKSFVRLLVLTLEVAVACMSRSVHQLVLLFDASFFRSASAFLNLLMGTLKIVADYYPGRLHRAFVIDAPSLFSVLWKGVRPFVELAPATAVVCSLDFEDSLEDASFTXYPRTASLRFEPPPAVVTGKAGVGSASSRFSVTPTDNPVKPWYLCTIPASVGSRSVVPTSSSSPSLVGASPLSARSFSFASPAALRSTPFPRGGGAPPTPSSAVTGHKIPPPPQFPRTPRPSFLQSPSTLFAFRKDGQQTSRVERERGSFLPYLRFYRRPYDEISYRAMMRPPLGGLIPIVXKFKHKPVQQTLRRHAGLHQHQQQQHHHYQQQQRI

SEQ ID NO: 36076 - protein, 437 aa, Zea mays subsp. mays
  misc_feature (222)..(222): Xaa can be any naturally occurring amino acid
  misc_feature (403)..(403): Xaa can be any naturally occurring amino acid
MAVDKQADAKEREKIDAVRKLLRKQAPLSIKQAQYCDDACVERFLRWRGESVKKAAKHLRTVLSWRETVGADHIMADEFSAELADGVAFVSGHDDDGRPVVVFRIKQEYPKFRSPKSFVRLLVLTLEVAVACMSRSVHQLVLLFDASFFRSASAFLNLLMGTLKIVADYYPGRLHRAFVIDAPSLFSVLWKGVRPFVELAPATAVVCSLDFEDSLEDASFTXYPRTASLRFEPPPAVVTGKAGVGSASSRFSVTPTDNPVKPWYLCTIPASVGSRSVVPTSSSSPSLVGASPLSARSFSFASPAALRSTPFPRGGGAPPTPSSAVTGHKIPPPPQFPRTPRPSFLQSPSTLFAFRKDGQQTSRVERERGSFLPYLRFYRRPYDEISYRAMMRPPLGGLIPIVXKFKHKPVQQTLRRHAGLHQHQQQQHHHYQQQQRI

SEQ ID NO: 36077 - protein, 363 aa, Zea mays subsp. mays
  misc_feature (148)..(148): Xaa can be any naturally occurring amino acid
  misc_feature (329)..(329): Xaa can be any naturally occurring amino acid
MADEFSAELADGVAFVSGHDDDGRPVVVFRIKQEYPKFRSPKSFVRLLVLTLEVAVACMSRSVHQLVLLFDASFFRSASAFLNLLMGTLKIVADYYPGRLHRAFVIDAPSLFSVLWKGVRPFVELAPATAVVCSLDFEDSLEDASFTXYPRTASLRFEPPPAVVTGKAGVGSASSRFSVTPTDNPVKPWYLCTIPASVGSRSVVPTSSSSPSLVGASPLSARSFSFASPAALRSTPFPRGGGAPPTPSSAVTGHKIPPPPQFPRTPRPSFLQSPSTLFAFRKDGQQTSRVERERGSFLPYLRFYRRPYDEISYRAMMRPPLGGLIPIVXKFKHKPVQQTLRRHAGLHQHQQQQHHHYQQQQRI

SEQ ID NO: 36078 - DNA, 1805 bp, Zea mays subsp. mays
taatcgaaaaaattgggcacagaagaggagacagagagacggagaggggagacccggtcactgccaatgccaagaacaagaaaccagagaggacagtcgtcaatccaatccgagtctcctccaaaaacccatcaatctgcaggaacgagagcagcaggagagcatcctaggaaaaaagttaggaccaactgaccgagcaaaaaaggtagcatctctgtatcaccaaggcaccgccgatcacagaccaaatccctcccccctcctctggtccatcccacacgtagagcagccggtatttcttcgatccgtgcttgcgctttttttttctctttgtaaagatttcgtttccctcccttttaactgttgtcgagaagtttcgacaagagtggtgtgagtgttgaagagctcctcaacatgatggatccggccttgcttgacgacgtcatacgccggctgctggaggtgaagaatctcaagcctgggaagaacgcgcagttgtcggagtcggagatcaagcagctctgcgctgccgccaaggagatcttcctgcaccagcccaacctgctggagctcgaggcgcccatcaaaatctgcggtgatgtccatggccagtactctgatctcctgaggctattcgattatggtggctatccgcctcaggccaactaccttttcttgggtgattatgtggatcgtggaaagcaaagcttggaaacaatatgtcttcttttggcctacaaggtcaagtacccagagaacttctttcttctaaggggaaaccatgaatgcgcatcagtaaatcgcatctatggtttttatgacgagtgcaaacgcagattcagtgtaaagctgtggaaaacattcactgactgttttaactgcttgccagtgtcagcattgatagacgaaaagatcctctgtatgcatggtggtctatctccagagttgaacaagctcgaacaaatacttaatctgagtcgccccacagacgtgcctgatactggattgctctgtgaccttctttggtctgatccttctaatgaagcaacaggatgggccataaatgatcgaggtgtttcatatacatttggtcctgataaagtttctgaattccttgagaagcatgatttggacctcatctgccgagcccatcaggttgtcgaagatggatatgagtttttcgctagccgccaactcgtaacaatgttttcagcccctaactactgtggagaatttgataacgctggtgccatgatgagtgtagatgagacattgatgtgctccttccaaatactgaaacctgcgaggaaggtgttgggtggttcaactaataacaaatcaggcttcaagtcatcgagaggatggtgacaatggcaagcctgatatcaggttggttggtgagcagcacgccagtggtcgacggggggttgttccatcataatcatattacagcggctgcaactgacaggcccaatgcatcttctcttccatgttggatcaacactcttgtaatgtattatttactgtgcggatctgagaggatgtgaatgatttcatttgcgtcctcaagttcaaaagattcaggaaggcatgcttgaaataaaaatagccagaaacatgcaaggtgctccacgacgcagcacggcatttccagtgttttctttttgctgtctagttctgaatatattttaccgccagaccagcacgtaagcttgcctggcaatggtttttatttgttgctatgccatctcaaaagtcaaaaccatggatttatatcaaaagtcaaaagactttgagaagtattt

SEQ ID NO: 36079 - protein, 317 aa, Zea mays subsp. mays
MMDPALLDDVIRRLLEVKNLKPGKNAQLSESEIKQLCAAAKEIFLHQPNLLELEAPIKICGDVHGQYSDLLRLFDYGGYPPQANYLFLGDYVDRGKQSLETICLLLAYKVKYPENFFLLRGNHECASVNRIYGFYDECKRRFSVKLWKTFTDCFNCLPVSALIDEKILCMHGGLSPELNKLEQILNLSRPTDVPDTGLLCDLLWSDPSNEATGWAINDRGVSYTFGPDKVSEFLEKHDLDLICRAHQVVEDGYEFFASRQLVTMFSAPNYCGEFDNAGAMMSVDETLMCSFQILKPARKVLGGSTNNKSGFKSSRGW

SEQ ID NO: 36080 - protein, 316 aa, Zea mays subsp. mays
MDPALLDDVIRRLLEVKNLKPGKNAQLSESEIKQLCAAAKEIFLHQPNLLELEAPIKICGDVHGQYSDLLRLFDYGGYPPQANYLFLGDYVDRGKQSLETICLLLAYKVKYPENFFLLRGNHECASVNRIYGFYDECKRRFSVKLWKTFTDCFNCLPVSALIDEKILCMHGGLSPELNKLEQILNLSRPTDVPDTGLLCDLLWSDPSNEATGWAINDRGVSYTFGPDKVSEFLEKHDLDLICRAHQVVEDGYEFFASRQLVTMFSAPNYCGEFDNAGAMMSVDETLMCSFQILKPARKVLGGSTNNKSGFKSSRGW

SEQ ID NO: 36081 - DNA, 2519 bp, Zea mays subsp. mays
  misc_feature (2178)..(2178): n is a, c, g, or t
  misc_feature (2237)..(2237): n is a, c, g, or t
  misc_feature (2242)..(2242): n is a, c, g, or t
  misc_feature (2263)..(2263): n is a, c, g, or t
  misc_feature (2280)..(2280): n is a, c, g, or t
  misc_feature (2337)..(2337): n is a, c, g, or t
  misc_feature (2390)..(2390): n is a, c, g, or t
  misc_feature (2402)..(2402): n is a, c, g, or t
  misc_feature (2500)..(2500): n is a, c, g, or t
  misc_feature (2502)..(2502): n is a, c, g, or t
  misc_feature (2512)..(2512): n is a, c, g, or t
gtcgtggagaatgaccttttcaagcaggactggcgatcaagaaagaagaagcagatatttcagtacatcgtactcaagtggagcttggtgctccttattggcctattaactggatttgtcggcttcttcaacaatcttgcagttgagaacattgctggattcaaattgctgctcacgagcgatcttatgctcaaggggaggtatattagagcattttttgtgtatggaggttgcaatttagttttggcagcagctgcagcagcaatctgtgcttatattgcacctgctgctgctgggtctggtattcctgaagtcaaagcttatcttaatggggttgatgcctattctatattagctcctagcacactctttgttaagatttttggttcaatacttggagtttcagctggattcgtgctaggaaaggaagggcccatggtacatacaggggcattcattgccaacttgcttggtcagggtggatcacgcaagtatcatcttacttgtaactggctacgctactttaagaatgacagagacaggagagatttgatcacatgtggatctgcagctggtgtggcggctgccttccgtgcacctgttggcggtgttctgtttgctcttgaagaagcagcatcatggtggcgaagtgctcttttgtggagaacattctttacaactgctgttgttgcggtggtattgagggggctgattgagttctgtcgtagtggaaaatgtggtctctttgggcaaggtggattgatcatgtttgatctcagttcaactgttgcagtctacagtactccagatctaattgcaattatagtccttgggataattggtggaatctttggaggcctcttcaactatctgttggacaagatcctccgagtttatagtattatcaacgagagaggtgctccattcaagatccttctcactataccaatatcaataatcacatcaatgggttcctatggtcttccttggcttgctgcatgcactccatgccctgttgatgctgtgggagcagtgtcccactgttggccgctcccggaaattataagaacttccaaatgcccaccaggacattacaatggtcttgcatcactcttcttcaacacaaatgatgatgccatccgcaatctcttcagcaacggcacatcgactgagttccaaatgtcatctcttttcatcttcttcactgctatttactgccttggactagtgacttacggtattgctgtcccatctggtctctttatccctgttattcttgctggagccacgtatgggcgcatagtgggaactcttcttggatccatatctgatcttgatcctggcctttttgccctacttggcgcagcatcttttcttggtgggacaatgagaatgactgtgtcagtctgtgtgatccttctagagctcaccaacgatctccccatgctccctttagtcatgcttgttcttctcatatccaagaccatagcagatagctttaacaagggagtttatgatcagatagtggtgatgaaaggcttgccgtacatggaggctcatgctgaaccatacatgaggcacttggttgctggtgatgtggtgtctggcccactaatcaccttttctggggttgagaaggtggggaacattgttcatgcattaaggttaacgggccacaatggtttccctgtgcttgatgagccacccataacggaaaccccggaactggttgggcttgtgactaggtctcatttattagttttgctgaacagcaagaatttcatgaagggacgggttaaaactagtggtagcttcgttctgcgaagatttggtgcatttgactttgcgaaaccaggttcaggtaaaggtttgaaaattgaggacctggatttcactgatgaggagatggacatgtatgtggatctccacccgatcacaaatacatcaccttacacagtggttgagacgatgtcactggcaaaagcagcaatccttttccgggaacttggtttgaggcaccttttggttgtgccaaagacaccagacaggcctcccatagtcgggattctcacaaggcatgacttcatgcctgagcacattcacagtctgttcccaaacctcaatcctcacaagtaccattcagcatcaatggcaggttgacaaggagactctttctgnttctcatctatttggcattattcgggtgctagctgtatgtaaattgcaaaggtgtatgngtatntggttttcaattggatccatntcatcttctctacatanttttgtttgtgtggattttgtagcatatgctctttttgcagtaaaaaaaatgtggcngttgtttggctggtgactgcctattatgagcctgcggcaataaatgttcagcnaattgcggagtnaacattgagagctccagaacatggagagaaagtgtgtattgtatatttgcgttgttcctgtaaagcatgtttagtcaaactcgaatattgtctataananggagtaaatntcaggcg

SEQ ID NO: 36082 - protein, 719 aa, Zea mays subsp. mays
VVENDLFKQDWRSRKKKQIFQYIVLKWSLVLLIGLLTGFVGFFNNLAVENIAGFKLLLTSDLMLKGRYIRAFFVYGGCNLVLAAAAAAICAYIAPAAAGSGIPEVKAYLNGVDAYSILAPSTLFVKIFGSILGVSAGFVLGKEGPMVHTGAFIANLLGQGGSRKYHLTCNWLRYFKNDRDRRDLITCGSAAGVAAAFRAPVGGVLFALEEAASWWRSALLWRTFFTTAVVAVVLRGLIEFCRSGKCGLFGQGGLIMFDLSSTVAVYSTPDLIAIIVLGIIGGIFGGLFNYLLDKILRVYSIINERGAPFKILLTIPISIITSMGSYGLPWLAACTPCPVDAVGAVSHCWPLPEIIRTSKCPPGHYNGLASLFFNTNDDAIRNLFSNGTSTEFQMSSLFIFFTAIYCLGLVTYGIAVPSGLFIPVILAGATYGRIVGTLLGSISDLDPGLFALLGAASFLGGTMRMTVSVCVILLELTNDLPMLPLVMLVLLISKTIADSFNKGVYDQIVVMKGLPYMEAHAEPYMRHLVAGDVVSGPLITFSGVEKVGNIVHALRLTGHNGFPVLDEPPITETPELVGLVTRSHLLVLLNSKNFMKGRVKTSGSFVLRRFGAFDFAKPGSGKGLKIEDLDFTDEEMDMYVDLHPITNTSPYTVVETMSLAKAAILFRELGLRHLLVVPKTPDRPPIVGILTRHDFMPEHIHSLFPNLNPHKYHSASMAG

SEQ ID NO: 36083 - protein, 657 aa, Zea mays subsp. mays
MLKGRYIRAFFVYGGCNLVLAAAAAAICAYIAPAAAGSGIPEVKAYLNGVDAYSILAPSTLFVKIFGSILGVSAGFVLGKEGPMVHTGAFIANLLGQGGSRKYHLTCNWLRYFKNDRDRRDLITCGSAAGVAAAFRAPVGGVLFALEEAASWWRSALLWRTFFTTAVVAVVLRGLIEFCRSGKCGLFGQGGLIMFDLSSTVAVYSTPDLIAIIVLGIIGGIFGGLFNYLLDKILRVYSIINERGAPFKILLTIPISIITSMGSYGLPWLAACTPCPVDAVGAVSHCWPLPEIIRTSKCPPGHYNGLASLFFNTNDDAIRNLFSNGTSTEFQMSSLFIFFTAIYCLGLVTYGIAVPSGLFIPVILAGATYGRIVGTLLGSISDLDPGLFALLGAASFLGGTMRMTVSVCVILLELTNDLPMLPLVMLVLLISKTIADSFNKGVYDQIVVMKGLPYMEAHAEPYMRHLVAGDVVSGPLITFSGVEKVGNIVHALRLTGHNGFPVLDEPPITETPELVGLVTRSHLLVLLNSKNFMKGRVKTSGSFVLRRFGAFDFAKPGSGKGLKIEDLDFTDEEMDMYVDLHPITNTSPYTVVETMSLAKAAILFRELGLRHLLVVPKTPDRPPIVGILTRHDFMPEHIHSLFPNLNPHKYHSASMAG

SEQ ID NO: 36084 - protein, 574 aa, Zea mays subsp. mays
MVHTGAFIANLLGQGGSRKYHLTCNWLRYFKNDRDRRDLITCGSAAGVAAAFRAPVGGVLFALEEAASWWRSALLWRTFFTTAVVAVVLRGLIEFCRSGKCGLFGQGGLIMFDLSSTVAVYSTPDLIAIIVLGIIGGIFGGLFNYLLDKILRVYSIINERGAPFKILLTIPISIITSMGSYGLPWLAACTPCPVDAVGAVSHCWPLPEIIRTSKCPPGHYNGLASLFFNTNDDAIRNLFSNGTSTEFQMSSLFIFFTAIYCLGLVTYGIAVPSGLFIPVILAGATYGRIVGTLLGSISDLDPGLFALLGAASFLGGTMRMTVSVCVILLELTNDLPMLPLVMLVLLISKTIADSFNKGVYDQIVVMKGLPYMEAHAEPYMRHLVAGDVVSGPLITFSGVEKVGNIVHALRLTGHNGFPVLDEPPITETPELVGLVTRSHLLVLLNSKNFMKGRVKTSGSFVLRRFGAFDFAKPGSGKGLKIEDLDFTDEEMDMYVDLHPITNTSPYTVVETMSLAKAAILFRELGLRHLLVVPKTPDRPPIVGILTRHDFMPEHIHSLFPNLNPHKYHSASMAG

SEQ ID NO: 36085 - DNA, 1041 bp, Zea mays subsp. mays
ccgcaaggatccaccacaacagcgaaggagaaagcagaccaacctagccacccagggagaaagaggccaaaagggaggggagagtgtcgtcatggcttccattgtcgcttccaggagggccgttcctctagttcgcgctctggagaagctcatcgcagcgtcctccgctcccgggactggctccgccctcaggccggtggcagtcgccggcggcctccgcggctacaacaccggcgctccgctccgacgctacgagggggccgagtcggaagacgatagcgtccgcgagtacgatgggcggcacggcggccgggactacgctgtgcccagcctgttctcagatattttccgtgatccgcttagtgcgccgcacagcattggccgcctgctgaaccttgtggacgacttggcggtggcggcgccaggtcgtgcggtgcgccgtggctggaacgcgaaggaggacgaggaggcgctgcacctgagggtggacatgccaggcctggggaaggagcacgtcaaggtgtgggcggagcagaacagcctggtgatcaagggcgagggcgagaaggaggatagcgaggacgaggccgccccgcctccgagatacagcggtcgcatcgagctcgcgccagaggtttacaggatggacaagatcaaggcggagatgaagaacggcgtgctcaaggtggtcgtgccgaaggtgaaggagcagcagcgcaaggacgtgttccaagtcaacgtcgagtagatgtttccaaatagaagcaagtgccggtacgggatggaggattggaggggcactgccaaactaggattcctctctctcaatctgatctggattctggaatcagatttctcttctttcatttttctcgtctatcttctatcagtatgaaataagcaacgtcgcttcagttttcgtgtcaaggccggtggagtcgcctatgtttattttattttctttgtatttcctacctggacacacgttctctatgccgtgtttggtttccgcagatttttaaaatatgcatgttcaaaccc

SEQ ID NO: 36086 - protein, 248 aa, Zea mays subsp. mays
RKDPPQQRRRKQTNLATQGERGQKGGESVVMASIVASRRAVPLVRALEKLIAASSAPGTGSALRPVAVAGGLRGYNTGAPLRRYEGAESEDDSVREYDGRHGGRDYAVPSLFSDIFRDPLSAPHSIGRLLNLVDDLAVAAPGRAVRRGWNAKEDEEALHLRVDMPGLGKEHVKVWAEQNSLVIKGEGEKEDSEDEAAPPPRYSGRIELAPEVYRMDKIKAEMKNGVLKVVVPKVKEQQRKDVFQVNVE

SEQ ID NO: 36087 - protein, 218 aa, Zea mays subsp. mays
MASIVASRRAVPLVRALEKLIAASSAPGTGSALRPVAVAGGLRGYNTGAPLRRYEGAESEDDSVREYDGRHGGRDYAVPSLFSDIFRDPLSAPHSIGRLLNLVDDLAVAAPGRAVRRGWNAKEDEEALHLRVDMPGLGKEHVKVWAEQNSLVIKGEGEKEDSEDEAAPPPRYSGRIELAPEVYRMDKIKAEMKNGVLKVVVPKVKEQQRKDVFQVNVE

SEQ ID NO: 36088 - DNA, 1611 bp, Zea mays subsp. mays
atcattagaaaacgacgtctcgccgttcttcgtcttcagatctagggttctctcgtgctctgttctcatcttctgctcgctggtgtcccctccctctcacccatggcttcggcggcggcggcaactcaggtggggacttacttcctgcggaactactacaacctgctgcaacaaacccccgatgtcgtccaccagttctacagcgaagccagcaccatggtccgcgtcgacgacctcaccggcacgaccgcggctgccaacaacatgatggacatacactcactcatcatgtctttgaacttcacccaaattgagatcaagactgccaattttgtgaactcatggggcgatggggtgctagttatggtctctggtctagtgcagaccaaggagtacagccaccaaaggaaatttatccagatgttcttccttgcccctcaagagaagggttactttgtcctcaacgattactttcacttcgttgaccaagaacatgtgcagcctgcgccagtgattgctcaggaagactacgagagcaatttggcacccaacacagttgttgagaccgctcctgagtacgttcacgaggaagaagctcaacaaatagcacctgaagtacatgatgtggtcgaaaactatacttattctgagccacaacagcaagtagtgtcggacaactggggagaggagcctcttcctgaagaaccgccttctttctcaaatgaaatggcagtcgctcctgaggagccagtgcaagctccacctgtgccacttcctcacgtggatgagcctgtttgtgaaccagtaaagaagacttatgcttccatcctaaaaaccgcaaaggctcctgcattcccagtagcccagcaagtacctgtgagtaagccttctcaccctacaacagagtcaaaccaaacccagcattcagttatggcttcatcaatgggaaccgagaaaccgaggtctgatgtttttggtgagggtgcttcccatgatgacgaagagagcaaatctgtgtatgtcggcaacgtgccatcatctgtaagtgaggctgatcttgaaaatgagttcaagaaatttggccggcttattcctgacggtgttgctatcagaagccgaaaggagactggtggctattatgctttcgtggaattcgaggaactcagcggtgtacacaatgcgttaaaggcttcaccaattgaaataaatgggcggcagatatatgttgaggagaggaagccaaatagcggaataagaggtggaaggaggggaggacgtggccgtttcagtggtggaggccggggatattcgagaggtggaggcgacgagtacaatagtaaccgtgggaggtcaaacggttacggtcgtgctcctcaccaagagaggggcatacttgggagccacactccaaggaactgattcagtcgagcagcaaacataaggttttgatccgtgtcgtcaaagcgagagagagagatcctaaacaatccgcctatcagctactaggccgcgtttgggttttggggcttgttttgtcgatgaatgtgtgtgcgcgcgtcatcgacctatgtgacacttaaaacttttgctagtctgacgctatctctttac

SEQ ID NO: 36089 - protein, 438 aa, Zea mays subsp. mays
MASAAAATQVGTYFLRNYYNLLQQTPDVVHQFYSEASTMVRVDDLTGTTAAANNMMDIHSLIMSLNFTQIEIKTANFVNSWGDGVLVMVSGLVQTKEYSHQRKFIQMFFLAPQEKGYFVLNDYFHFVDQEHVQPAPVIAQEDYESNLAPNTVVETAPEYVHEEEAQQIAPEVHDVVENYTYSEPQQQVVSDNWGEEPLPEEPPSFSNEMAVAPEEPVQAPPVPLPHVDEPVCEPVKKTYASILKTAKAPAFPVAQQVPVSKPSHPTTESNQTQHSVMASSMGTEKPRSDVFGEGASHDDEESKSVYVGNVPSSVSEADLENEFKKFGRLIPDGVAIRSRKETGGYYAFVEFEELSGVHNALKASPIEINGRQIYVEERKPNSGIRGGRRGGRGRFSGGGRGYSRGGGDEYNSNRGRSNGYGRAPHQERGILGSHTPRN

SEQ ID NO: 36090 - protein, 400 aa, Zea mays subsp. mays
MVRVDDLTGTTAAANNMMDIHSLIMSLNFTQIEIKTANFVNSWGDGVLVMVSGLVQTKEYSHQRKFIQMFFLAPQEKGYFVLNDYFHFVDQEHVQPAPVIAQEDYESNLAPNTVVETAPEYVHEEEAQQIAPEVHDVVENYTYSEPQQQVVSDNWGEEPLPEEPPSFSNEMAVAPEEPVQAPPVPLPHVDEPVCEPVKKTYASILKTAKAPAFPVAQQVPVSKPSHPTTESNQTQHSVMASSMGTEKPRSDVFGEGASHDDEESKSVYVGNVPSSVSEADLENEFKKFGRLIPDGVAIRSRKETGGYYAFVEFEELSGVHNALKASPIEINGRQIYVEERKPNSGIRGGRRGGRGRFSGGGRGYSRGGGDEYNSNRGRSNGYGRAPHQERGILGSHTPRN

SEQ ID NO: 36091 - protein, 384 aa, Zea mays subsp. mays
MMDIHSLIMSLNFTQIEIKTANFVNSWGDGVLVMVSGLVQTKEYSHQRKFIQMFFLAPQEKGYFVLNDYFHFVDQEHVQPAPVIAQEDYESNLAPNTVVETAPEYVHEEEAQQIAPEVHDVVENYTYSEPQQQVVSDNWGEEPLPEEPPSFSNEMAVAPEEPVQAPPVPLPHVDEPVCEPVKKTYASILKTAKAPAFPVAQQVPVSKPSHPTTESNQTQHSVMASSMGTEKPRSDVFGEGASHDDEESKSVYVGNVPSSVSEADLENEFKKFGRLIPDGVAIRSRKETGGYYAFVEFEELSGVHNALKASPIEINGRQIYVEERKPNSGIRGGRRGGRGRFSGGGRGYSRGGGDEYNSNRGRSNGYGRAPHQERGILGSHTPRN

SEQ ID NO: 36092 - DNA, 884 bp, Zea mays subsp. mays
gtccacctttcggggtcaccggcttctgctttcttgctacgccaccgcgcctctcgtctatttatggagtcccccgatccatgaagccggggcaggccgagagttgtcaaggacgacgtctgccggcagtgctcctgctcctcctcctccttcctggccgccgcgcgagcttgggttagttagtgtctcttcttcgcggagacctgtgagaggagccatcatcatggccgctgttgagactgttgtcctcaaggttgctatgtcatgcgagggctgcgccggggcggtcagaagagtgctctccaagatggaaggagttgaaaccttcgacatagacctcaaggagcagaaggtgacagtcaaaggcaatgtcaagcctgaggacgtcttccagacggtttccaagtcggggaagaggacctcgtactgggagggcgaagccacggccccggacgctgcggcggctccagaagccgaagcagctcccagcaccgcggcagaagcgcctcctgctgctgctccggcggcgccagagatcaccccagccaaagctgacgcctgatcgtcacgctattattcactcacatgtgatgctgcggctgcgactcctaaaccttaaatctagaaatagctggggattgagtttgcattgcatcgtgttcttgccggtctagcaagtgactataagaataatggaataaacgatgaccaactggcgtatgtttataataaagcaaatggtgatgtggttgagatgcatcacgttagggtagaaagtgacgatgtgtatgctggtggtgttgttgagcttcagatttttcaaatgaatgctttcgtcgcggagtccagtccacacgcatgcgtgcaaagccgtgggacttatt

SEQ ID NO: 36093 - protein, 186 aa, Zea mays subsp. mays
STFRGHRLLLSCYATAPLVYLWSPPIHEAGAGRELSRTTSAGSAPAPPPPSWPPRELGLVSVSSSRRPVRGAIIMAAVETVVLKVAMSCEGCAGAVRRVLSKMEGVETFDIDLKEQKVTVKGNVKPEDVFQTVSKSGKRTSYWEGEATAPDAAAAPEAEAAPSTAAEAPPAAAPAAPEITPAKADA

SEQ ID NO: 36094 - protein, 112 aa, Zea mays subsp. mays
MAAVETVVLKVAMSCEGCAGAVRRVLSKMEGVETFDIDLKEQKVTVKGNVKPEDVFQTVSKSGKRTSYWEGEATAPDAAAAPEAEAAPSTAAEAPPAAAPAAPEITPAKADA

SEQ ID NO: 36095 - protein, 101 aa, Zea mays subsp. mays
MSSLRTSSRRFPSRGRGPRTGRAKPRPRTLRRLQKPKQLPAPRQKRLLLLLRRRQRSPQPKLTPDRHAIIHSHVMLRLRLLNLKSRNSWGLSLHCIVFLPV

SEQ ID NO: 36096 - DNA, 513 bp, Zea mays subsp. mays
atcgatcccatgccctgttgccgcgcccgcacctccttccccatccgcgcccgccgcggctcctccggcagctccgccacgcgcccaaccgcaacctgcccgcacggccaccgctgcctggtagtatctatcaaatcagccacctgtcctctttttcttcaaatcaagtccgtttccctttcctttctaccctctccctcgtctccggcgggcggtggcctcacctccctctccccgtcgccctgatggctccctccacagctctcgctccggtggccttccgctccgccttctcgacgccgctcgcgtcgaaacctacccgtaatagaatgaacatagagggcgctttctgtttgccgtgttccacaaggaagagagcaagttatagacctttccgagtgtacagtttatttggagggaagaaggataaagatgagaatggtgatgaggcgccatcgaaagcaggaatttttggaaatatgcaaaatctctatgaatcgtgttattgttatt

SEQ ID NO: 36097 - protein, 170 aa, Zea mays subsp. mays
RSHALLPRPHLLPHPRPPRLLRQLRHAPNRNLPARPPLPGSIYQISHLSSFSSNQVRFPFLSTLSLVSGGRWPHLPLPVALMAPSTALAPVAFRSAFSTPLASKPTRNRMNIEGAFCLPCSTRKRASYRPFRVYSLFGGKKDKDENGDEAPSKAGIFGNMQNLYESCYCY

SEQ ID NO: 36098 - protein, 89 aa, Zea mays subsp. mays
MAPSTALAPVAFRSAFSTPLASKPTRNRMNIEGAFCLPCSTRKRASYRPFRVYSLFGGKKDKDENGDEAPSKAGIFGNMQNLYESCYCY

SEQ ID NO: 36099 - DNA, 1741 bp, Zea mays subsp. mays
atttttttgtttccacgagcattctagctagggttcagacgaatttctaggaggaggtcgcgcgacatcgtccatccacggcgaaagcaggctcgccgccccacaacagctttgttccattgcatcctccccaactcaggttgtgctgtgcctgggccctggtggtcaggaaagaggctcctccctttccctctccacctcgccgtgcttctccagtccacctcccccctcgtcgttgcttcttccctccccttccctcgtcgtcgcgctatcccgccggtgcgcgggcgtggggccaagcgccgccgaaaggtagcagcagaggggaagacggacacggacgcaatagcgtccacccccgtaggcgccccccgcccaaagactggtggcaggcctcctacaggcagatgctagagccatgtgactccctaccaaagaatatcctggcaaaaggtgcttctcgctgaccatcgaaacacagagcttcatgtctgtccagtccaaggtggttgcgcttggtgcactgatcttcttccttgtctcgtatggctcttgcactaggattgtcaactttaatgcctcccacatcacgaccgacccctactgggtggctgccagggccacttggtacggtgcgccaaccggcgctggcccctatgacaacggtggtgcttgtgggttcaagaatgtgaacctacctcctttctcggccatgacatcgtgcggcaaccagcccctgttcaaggatggcaagggttgtggctcgtgctaccagatacgttgtgtcaaccacccggcatgctctggcaacccggagacggtgatgatcaccgacatgaattactacccagtcgccaagtaccactttgatctcagtggcacggcgtttggtgatatggcacagcccggccgcgacaatgaactccgccacgctggcatcatcgacatccagttcaggagggtgccctgcatctaccccgggcagacggtgaccttccacatcgagcacggctcaaaccccaactacttagcagtgctcgtcgagttcgaagacggcgatggcgatgtggtccaggtggacataatggaggccaactctgggtggtggatgccgatgcgggagtcgtggggatccatctggaggatggactccaagcgccggctgcaggggcccttctcgctgcgcatcactaacgagtcaggcgatacattggtggcttaccaggtcatcccggcaaactgggcgcccaacagctactaccgctccaacatccagtacgaggcttttggctctgctgctggacaggctgctggctctgctgttggactggtcattagctctgctgctcgactgcacacgttaattaccaggatcattggcttgatctgtttggtattgttgtatcatttgcaagggattgaggtgccttagttttaattagcacttgacatgttgggtgtcctacgctgtaggtggtgctgtgtgtctgctggaggcgtcgtcggtccagagtttcatcttttcgaaaaagttttgaacccaaataattttcctatgaatttcgttgattcctgtgtgacaggtagctgatgtagctctgtgggagatgtacatttgtatttggtgctggatagctgggctgtcctgtcttgttctggctgttgtaagggctcacagctttcaaatgttctagaaatcttatatagttataaaacaaaaaaagaatggaagaaagttgtt

SEQ ID NO: 36100 - protein, 314 aa, Zea mays subsp. mays
MSVQSKVVALGALIFFLVSYGSCTRIVNFNASHITTDPYWVAARATWYGAPTGAGPYDNGGACGFKNVNLPPFSAMTSCGNQPLFKDGKGCGSCYQIRCVNHPACSGNPETVMITDMNYYPVAKYHFDLSGTAFGDMAQPGRDNELRHAGIIDIQFRRVPCIYPGQTVTFHIEHGSNPNYLAVLVEFEDGDGDVVQVDIMEANSGWWMPMRESWGSIWRMDSKRRLQGPFSLRITNESGDTLVAYQVIPANWAPNSYYRSNIQYEAFGSAAGQAAGSAVGLVISSAARLHTLITRIIGLICLVLLYHLQGIEVP

SEQ ID NO: 36101 - protein, 239 aa, Zea mays subsp. mays
MTSCGNQPLFKDGKGCGSCYQIRCVNHPACSGNPETVMITDMNYYPVAKYHFDLSGTAFGDMAQPGRDNELRHAGIIDIQFRRVPCIYPGQTVTFHIEHGSNPNYLAVLVEFEDGDGDVVQVDIMEANSGWWMPMRESWGSIWRMDSKRRLQGPFSLRITNESGDTLVAYQVIPANWAPNSYYRSNIQYEAFGSAAGQAAGSAVGLVISSAARLHTLITRIIGLICLVLLYHLQGIEVP

SEQ ID NO: 36102 - protein, 202 aa, Zea mays subsp. mays
MITDMNYYPVAKYHFDLSGTAFGDMAQPGRDNELRHAGIIDIQFRRVPCIYPGQTVTFHIEHGSNPNYLAVLVEFEDGDGDVVQVDIMEANSGWWMPMRESWGSIWRMDSKRRLQGPFSLRITNESGDTLVAYQVIPANWAPNSYYRSNIQYEAFGSAAGQAAGSAVGLVISSAARLHTLITRIIGLICLVLLYHLQGIEVP

SEQ ID NO: 36103 - DNA, 1027 bp, Zea mays subsp. mays
ctaatcgaaaagagatcgacatcgatccaccgaggtttcttgtgcgtgccgccatggccatggcagtagctcaccttcttcctcagctctccgccgaaggcaatggagctagcaggaacagaatggccattctcttgattcttcagctttttctcttgacggcgctaggcgtggatggagcggcgtcgttcatcttcaccaacgcctgcaagcacgcggtgtgggtgggcgcgctccacggcgccagctcgccgccgctcgcgcggtcgggcttctacctggcgccgtccgccacgtccagcatggacgcgccgtcgtcggggacatggtccggcacgttgtgggcgcgcacgggctgcgtggccgaccccgccaccgggcgcttctcctgcgccacggccgactgcggcacgggcgacgtcgcgtgccagggccgcgggccggcgcctccggtctcgctcgtcgaggtcacgctcgccgcgccgggcagcggcaggccggacttctacgacgtcagcctcgtcgacggcttcaacgtgccggtgcgcgtggcgccctcgggcggcggcggcgactgccgccccgcggcttgcgcgggcgacgtaaacgccgtgtgccccggggacctccgcgtcgtcgcatcgtccggcggcggcgtcgtagcgtgcaagagcgcgtgcatcgcctacggcagcgcgcgctactgctgcaccgggcagtacggcacgccggcgatgtgcggcccgaccaactactcgcaggtgttcaagagcgcatgcccgtcggcctacagctacgcctacgacgacgccaccagcaccttcacctgctccggaccttccagctatggcgtcaccttctgccctgcgaactaatgaacgccctgatatcatatagtagctagggaattacgatattacatctagactaggtatttcttcaaaaaaaattatagagagatcaagtagaagcaatatgttgatgttgtcatccacgacacaacacacaaatgcataaaattaatttg

SEQ ID NO: 36104 - protein, 290 aa, Zea mays subsp. mays
NRKEIDIDPPRFLVRAAMAMAVAHLLPQLSAEGNGASRNRMAILLILQLFLLTALGVDGAASFIFTNACKHAVWVGALHGASSPPLARSGFYLAPSATSSMDAPSSGTWSGTLWARTGCVADPATGRFSCATADCGTGDVACQGRGPAPPVSLVEVTLAAPGSGRPDFYDVSLVDGFNVPVRVAPSGGGGDCRPAACAGDVNAVCPGDLRVVASSGGGVVACKSACIAYGSARYCCTGQYGTPAMCGPTNYSQVFKSACPSAYSYAYDDATSTFTCSGPSSYGVTFCPAN

SEQ ID NO: 36105 - protein, 273 aa, Zea mays subsp. mays
MAMAVAHLLPQLSAEGNGASRNRMAILLILQLFLLTALGVDGAASFIFTNACKHAVWVGALHGASSPPLARSGFYLAPSATSSMDAPSSGTWSGTLWARTGCVADPATGRFSCATADCGTGDVACQGRGPAPPVSLVEVTLAAPGSGRPDFYDVSLVDGFNVPVRVAPSGGGGDCRPAACAGDVNAVCPGDLRVVASSGGGVVACKSACIAYGSARYCCTGQYGTPAMCGPTNYSQVFKSACPSAYSYAYDDATSTFTCSGPSSYGVTFCPAN

SEQ ID NO: 36106 - protein, 271 aa, Zea mays subsp. mays
MAVAHLLPQLSAEGNGASRNRMAILLILQLFLLTALGVDGAASFIFTNACKHAVWVGALHGASSPPLARSGFYLAPSATSSMDAPSSGTWSGTLWARTGCVADPATGRFSCATADCGTGDVACQGRGPAPPVSLVEVTLAAPGSGRPDFYDVSLVDGFNVPVRVAPSGGGGDCRPAACAGDVNAVCPGDLRVVASSGGGVVACKSACIAYGSARYCCTGQYGTPAMCGPTNYSQVFKSACPSAYSYAYDDATSTFTCSGPSSYGVTFCPAN

SEQ ID NO: 36107 - DNA, 725 bp, Zea mays subsp. mays
  misc_feature (92)..(92): n is a, c, g, or t
  misc_feature (114)..(114): n is a, c, g, or t
  misc_feature (158)..(158): n is a, c, g, or t
  misc_feature (259)..(259): n is a, c, g, or t
  misc_feature (264)..(264): n is a, c, g, or t
acaagctcgacggaactgtgactagaactagtagatccaatccaacactcgggacgaaattaaaggagacgacgcatcatccggccggcagnatccgcacggtcaccaccatgncggcgcaggagggcggcatgaggctggtgtcgcacccgatcgcngcgcacgacgggcggctgccgcggcagtacacggcggaggggcagggcgccaagaaggacatgtcgccgccgctggagtggtacggcgtgcccgagggcgngcggntgctagcgctgctggtgcaggacatcgacgccgaccccgtcgtgccgtggacgcactgggtggtggccaacatcccgcccgccaccaggggcctccccgaggggttctccggcgccgcgggaccggggccggggcgcgagctcggcggcctgcaggagggggtcaacgactggaagcagcccggctggcgcgggcccgtgccgccctcccacggccaccgcatccagttcaagctctacgcgctcgacgacgaggtgcacctcggcaacaaggtgaccagggataagctcatggaggcgatcgacgggcacgtgctggaagaagccgagctgatcgccgtgttccagggagtcgtcgccaacaactaacacactcggagatatctttgttggcgtgctttgtatttgcttgtgtggctaccatgtaattctgatcgaataaaagggaacttcacatgtgcc

SEQ ID NO: 36108 - protein, 209 aa, Zea mays subsp. mays
  misc_feature (30)..(30): Xaa can be any naturally occurring amino acid
  misc_feature (38)..(38): Xaa can be any naturally occurring amino acid
  misc_feature (52)..(52): Xaa can be any naturally occurring amino acid
  misc_feature (86)..(86): Xaa can be any naturally occurring amino acid
  misc_feature (88)..(88): Xaa can be any naturally occurring amino acid
KLDGTVTRTSRSNPTLGTKLKETTHHPAGXIRTVTTMXAQEGGMRLVSHPIXAHDGRLPRQYTAEGQGAKKDMSPPLEWYGVPEGXRXLALLVQDIDADPVVPWTHWVVANIPPATRGLPEGFSGAAGPGPGRELGGLQEGVNDWKQPGWRGPVPPSHGHRIQFKLYALDDEVHLGNKVTRDKLMEAIDGHVLEEAELIAVFQGVVANN

SEQ ID NO: 36109 - protein, 173 aa, Zea mays subsp. mays
  misc_feature (2)..(2): Xaa can be any naturally occurring amino acid
  misc_feature (16)..(16): Xaa can be any naturally occurring amino acid
  misc_feature (50)..(50): Xaa can be any naturally occurring amino acid
  misc_feature (52)..(52): Xaa can be any naturally occurring amino acid
MXAQEGGMRLVSHPIXAHDGRLPRQYTAEGQGAKKDMSPPLEWYGVPEGXRXLALLVQDIDADPVVPWTHWVVANIPPATRGLPEGFSGAAGPGPGRELGGLQEGVNDWKQPGWRGPVPPSHGHRIQFKLYALDDEVHLGNKVTRDKLMEAIDGHVLEEAELIAVFQGVVANN

SEQ ID NO: 36110 - protein, 166 aa, Zea mays subsp. mays
  misc_feature (9)..(9): Xaa can be any naturally occurring amino acid
  misc_feature (43)..(43): Xaa can be any naturally occurring amino acid
  misc_feature (45)..(45): Xaa can be any naturally occurring amino acid
MRLVSHPIXAHDGRLPRQYTAEGQGAKKDMSPPLEWYGVPEGXRXLALLVQDIDADPVVPWTHWVVANIPPATRGLPEGFSGAAGPGPGRELGGLQEGVNDWKQPGWRGPVPPSHGHRIQFKLYALDDEVHLGNKVTRDKLMEAIDGHVLEEAELIAVFQGVVANN

SEQ ID NO: 36111 - DNA, 1499 bp, Zea mays subsp. mays
acaccacacctacatgtttctttaccctaacggcctaacctttctgctctagcgaaggcacagccgccgctgtttcttcatcttccttgcagcgccggcgctccatcttactctccctcccttactagcgcttgacacgcaggtgacgggcggcagcgacggcgctcagactcgggcttttagtgacggcatcagcggtttcccctcccgcctcttgccagtcccatcgcgccctcgcctcgggtcctctgcacaccgtccagtgaccttgcgtgatggactggataaagttttgcagcgattttaccgcaagtgatgggaaacagcatgcattgcttgataatcttaatcaggaattgtcccagaagtctgtactattgggtgatggttttaaactgtcagctgctgataatgatgtgtttgcaactgttcatccttttgtgatccgtgttagtgacagcgagttgcagaaatatccacatgtactgcggtggatggactacattcagaacactgttggtgctggtacaactttgcaaaagataaatgtgaccaagtctgactttgatccaccttctcatccaaggaaagctgataaaaaagatgctgaatcaagttcaaagaaagccatttccgtacagaagactgctgacaagtcaaatggaagtgctgactcaaagaaatccacaagagagcctcctgaaaataaggagaatcctactgctgcggggaacagcaaaacctctggggagaaaaagaaagtgcaagagaagtcagcaggaaaaacaacagagaaagctccagagaaaattgcagacaaggaatcagagtgcgatatcagtatcctgaatatacaggttggccttatccgtaaagcatggaagcatccatctgctgacagccttttagttgaggagatagatttgggagatggtaatgtgcgtcaagttgttagtggtcttgcaaagtattgcagcccagatgatcttactaatcggcatgttgtcttgatcacgaatgtgaagcctggaaagctgcgagatgtaatgtctgctggattggtcctttgtgcttcaactgaagatcatgctgctgtggagcctttgattcctccagaaggagccaagattggagaacgcatttcatttgctgggtttgatgggaagcctgaagatgttctaaatccaaagaaaaagcagctggacaagattaccccgcatcttcgtaccgacgagaatggaattgcaatgttcaaaggtgttccctttactacatcagctggcccatgtagatcttcgattcacaacggaaatgttaagtgagcagctcattagacatggttgcatagattgacatcaaacttatgcaggctgtctgtgtaccattttgtcatacatcatgttttgcccatatttagcgttgcaaaatttgaacagagttacactatctgtaagcaattttctactaatggttggcccagagtttgcttttgagtatgc

SEQ ID NO: 36112 - protein, 348 aa, Zea mays subsp. mays
MDWIKFCSDFTASDGKQHALLDNLNQELSQKSVLLGDGFKLSAADNDVFATVHPFVIRVSDSELQKYPHVLRWMDYIQNTVGAGTTLQKINVTKSDFDPPSHPRKADKKDAESSSKKAISVQKTADKSNGSADSKKSTREPPENKENPTAAGNSKTSGEKKKVQEKSAGKTTEKAPEKIADKESECDISILNIQVGLIRKAWKHPSADSLLVEEIDLGDGNVRQVVSGLAKYCSPDDLTNRHVVLITNVKPGKLRDVMSAGLVLCASTEDHAAVEPLIPPEGAKIGERISFAGFDGKPEDVLNPKKKQLDKITPHLRTDENGIAMFKGVPFTTSAGPCRSSIHNGNVK

SEQ ID NO: 36113 - protein, 275 aa, Zea mays subsp. mays
MDYIQNTVGAGTTLQKINVTKSDFDPPSHPRKADKKDAESSSKKAISVQKTADKSNGSADSKKSTREPPENKENPTAAGNSKTSGEKKKVQEKSAGKTTEKAPEKIADKESECDISILNIQVGLIRKAWKHPSADSLLVEEIDLGDGNVRQVVSGLAKYCSPDDLTNRHVVLITNVKPGKLRDVMSAGLVLCASTEDHAAVEPLIPPEGAKIGERISFAGFDGKPEDVLNPKKKQLDKITPHLRTDENGIAMFKGVPFTTSAGPCRSSIHNGNVK

SEQ ID NO: 36114 - DNA, 713 bp, Zea mays subsp. mays
aacgccgctcgcgcatcctattgccctcgcgccaccgtcgccgccgctgcagcgagccaccgccctgccgtcgcctgaggtagacaccaagccaccgccatggggcgtatgcacagccgcgggaagggtatctcttcatcggcgctgccgtacaagaggactcctccgatctggctcaagacagctaccaccgaggtggaggagatgattaccaaggctgcgaagaagggccagatgccgtcgcagattggtgttctgctccgtgaccagcacggcatcccgcttgtcaagagcgtgactggtagcaagatcctccgcatcctcaaggcccatgggttggcgccggagatcccggaggatctctacttcctcattaagaaggcggtggcgattaggaagcatttggagaggaacaggaaggacaaggactccaaattcagactcattcttgttgagagcaggatccaccgccttgcccgctactacaagcgtaccaagaagctcccacccacctggaagtacgagtcaactacggcgagcactctggtggcctaagtgatatcctccgatggcttggtctttagcacctatgagcttgttctagatatggatttatgtaattcttgttatgtctggagctggttagatggacaaggaacctcaactttttctatgtttacttggagaatcccataaaccatttttggtttcgc

SEQ ID NO: 36115 - protein, 151 aa, Zea mays subsp. mays
MGRMHSRGKGISSSALPYKRTPPIWLKTATTEVEEMITKAAKKGQMPSQIGVLLRDQHGIPLVKSVTGSKILRILKAHGLAPEIPEDLYFLIKKAVAIRKHLERNRKDKDSKFRLILVESRIHRLARYYKRTKKLPPTWKYESTTASTLVA

SEQ ID NO: 36116 - protein, 148 aa, Zea mays subsp. mays
MHSRGKGISSSALPYKRTPPIWLKTATTEVEEMITKAAKKGQMPSQIGVLLRDQHGIPLVKSVTGSKILRILKAHGLAPEIPEDLYFLIKKAVAIRKHLERNRKDKDSKFRLILVESRIHRLARYYKRTKKLPPTWKYESTTASTLVA

SEQ ID NO: 36117 - protein, 116 aa, Zea mays subsp. mays
MITKAAKKGQMPSQIGVLLRDQHGIPLVKSVTGSKILRILKAHGLAPEIPEDLYFLIKKAVAIRKHLERNRKDKDSKFRLILVESRIHRLARYYKRTKKLPPTWKYESTTASTLVA

SEQ ID NO: 36118 - DNA, 1424 bp, Zea mays subsp. mays
gcacgagaccattacctagaacatcctaatcaaaaatcgtctcgtttcagttcctcgtcgccctcgccacttcgccgccgccgctttggctccacccagtccgcttccggcatccgcccatggctgcggcccccgcccgccacctcgccgcggccttcacggccgccgctgcgcaccagcgcgtcgcgttcaggcgcgtccaggtccgggccccgtgtgtccgcctctctctccttcccgccgcgccatcccgcgacatttcgcggcagggccagcctcgcctgccccgccgccgcctctctatccgtcccctccggcgccgcgcctccgggctccgtgccattcaacctcctgccgcccgactccgaccctttcatcgagtgggacccgcccccgggcgactccgccccctcgccgctcgctggcggcggtgctgccgggggtgccacgctggtcgtgctgctcggctggctcggcgcgcgccagaagcacctgcgccgctacgccgacctctaccgcgagcgcggggtcggcgcggtgcggttcgtcgtgcccgtgcgcgagctcgtcggcctcgacctcggccgccgcgtcgagcgcagggtcgccgacctctccgagcaggtcgccgcgtggtgcgacgccgatcggcgccgcacgctcctcttccacaccttcagcaacaccggatggctcgcctatggtgctgtactggagaatttacaatcaagagctgacctaactgagagaataagaggatgtattgtagactctgcaccagttctagagataagaccagaggtctgggcggccgggttctctgctgcaatgttaaagaaaagcagttccatgactggtcctacgactgaatctcttgatgggcctgttgtaaatggcaccttgaacagagttggctccaatgtgacgcaaccttcatggggtgaatgttttctcctgtcaactctgcggaaattcttcgagattgttctttacgtacctgatgtaaacaagcggctgtgcaaaggttctctcggtgctttcagagcagcagcctccttgcccgcagttctacctgtacagctcggccgaccgagtcatcccggcggagtgcgtggagcgcttcgtggagtcgcagaggtccctcgggcgcagcgtgttcgcccacgacttcgtctcgtcgccgcacgtggaccactaccggagcttcccccacgtgtactccgccaagatcgacgagttcctcaaggtctgctccacggtcgaggtgtcatgaccaacaggcagggccgtcgaatctatctgtgtttggtctgttactctgttctgagaatggataggtgtttctttgccactcagaaaatctgatggtaggctcccaaagatgtttgcctgaggttattgagatactgtatgcttgctttgtc

SEQ ID NO: 36119 - protein, 454 aa, Zea mays subsp. mays
ARDHYLEHPNQKSSRFSSSSPSPLRRRRFGSTQSASGIRPWLRPPPATSPRPSRPPLRTSASRSGASRSGPRVSASLSFPPRHPATFRGRASLACPAAASLSVPSGAAPPGSVPFNLLPPDSDPFIEWDPPPGDSAPSPLAGGGAAGGATLVVLLGWLGARQKHLRRYADLYRERGVGAVRFVVPVRELVGLDLGRRVERRVADLSEQVAAWCDADRRRTLLFHTFSNTGWLAYGAVLENLQSRADLTERIRGCIVDSAPVLEIRPEVWAAGFSAAMLKKSSSMTGPTTESLDGPVVNGTLNRVGSNVTQPSWGECFLLSTLRKFFEIVLYVPDVNKRLCKGSLGAFRAAASLPAVLPVQLGRPSHPGGVRGALRGVAEVPRAQRVRPRLRLVAARGPLPELPPRVLRQDRRVPQGLLHGRGVMTNRQGRRIYLCLVCYSVLRMDRCFFATQKI

SEQ ID NO: 36120 - DNA, 1033 bp, Zea mays subsp. mays
attcccagtcatctccactctccagcagtcctcacgttccttctctctctcccccccgctttaggtttgcctgtgttgggtagagtcgtatagcgaggagaagaggcttggtgccaagaaactggcatttcgatttggggagtggctaaattcgtcgctgtggaatcatggttctggagtcgtacacaaatctgctagatatgtgttgtgaagatgtgtttgacttccaacaacctttaagatctcttcgtcatgtggtgaactctcctggcatcatatctgaccctgattgggaaagtagtaatgatggcaactcagttggttctatgcctttttgttttaagagaaagattattgttgcaaatttccttcctgtgatctgtgcaaaaaatgaagctaccggagaatggtcctttgccatgggtgataatcaactgcttgttcaactcaaagatggttttccaattgataatgaagttatttatgtgggtagtttgaatgttcaagttgatcctattgagcaagatcgagtttctcagaagcacttcaaggaacacagatgcgtacctacctttctcccagctgaactccagcatcaattctatcacatattctgcaaacagcacttatggccacttttccattatatgctttttgtttgtcatgacaaagatgagctctttgaccgttcactttttcaagcctacgtgcgggccaacaaaatttttgctggcaaaattgtggaggcagtcaattcggatgatgattgtgtgtgggttcatgattatcacctcatgcttatcccaacccttttaagaaagaaactgcaccggatcaaagttggtttcttcctccacagcccatttccctcgtctgagatctataggacactgccagtgcgggatgaaattctaaaatcacttcttaatgctgacctcattggctttcaaacttttgactatgcccgccacttcctttcatgttgcagcaggcttttaggccttaattatgagtccaaacgtggccacatagg

SEQ ID NO: 36121 - protein, 288 aa, Zea mays subsp. mays
MVLESYTNLLDMCCEDVFDFQQPLRSLRHVVNSPGIISDPDWESSNDGNSVGSMPFCFKRKIIVANFLPVICAKNEATGEWSFAMGDNQLLVQLKDGFPIDNEVIYVGSLNVQVDPIEQDRVSQKHFKEHRCVPTFLPAELQHQFYHIFCKQHLWPLFHYMLFVCHDKDELFDRSLFQAYVRANKIFAGKIVEAVNSDDDCVWVHDYHLMLIPTLLRKKLHRIKVGFFLHSPFPSSEIYRTLPVRDEILKSLLNADLIGFQTFDYARHFLSCCSRLLGLNYESKRGHI

SEQ ID NO: 36122 - protein, 277 aa, Zea mays subsp. mays
MCCEDVFDFQQPLRSLRHVVNSPGIISDPDWESSNDGNSVGSMPFCFKRKIIVANFLPVICAKNEATGEWSFAMGDNQLLVQLKDGFPIDNEVIYVGSLNVQVDPIEQDRVSQKHFKEHRCVPTFLPAELQHQFYHIFCKQHLWPLFHYMLFVCHDKDELFDRSLFQAYVRANKIFAGKIVEAVNSDDDCVWVHDYHLMLIPTLLRKKLHRIKVGFFLHSPFPSSEIYRTLPVRDEILKSLLNADLIGFQTFDYARHFLSCCSRLLGLNYESKRGHI

SEQ ID NO: 36123 - protein, 235 aa, Zea mays subsp. mays
MPFCFKRKIIVANFLPVICAKNEATGEWSFAMGDNQLLVQLKDGFPIDNEVIYVGSLNVQVDPIEQDRVSQKHFKEHRCVPTFLPAELQHQFYHIFCKQHLWPLFHYMLFVCHDKDELFDRSLFQAYVRANKIFAGKIVEAVNSDDDCVWVHDYHLMLIPTLLRKKLHRIKVGFFLHSPFPSSEIYRTLPVRDEILKSLLNADLIGFQTFDYARHFLSCCSRLLGLNYESKRGHI

SEQ ID NO: 36124 - DNA, 545 bp, Zea mays subsp. mays
gatcgtagaaaataggttattcattcgtccttctattatctttgcctttgtcttcttttctaagatttcactacttctgcggggtgtcacagtcttaagatcatggtgtttttatgtctcaaacatggtcgcaattgtgacattaggtagatgggagatttttgactgagttttcgtgttttgtgagcgaagtcagggtaggaaatgatgtccgagagtkaagagcatggctcgctcctagacaagatcaacgacaagatcaacgagaagatccatgagtataagcactcgtcgtcgtcctcctcctcttcggactcagacgatgacaagaagcccaagaagtctaagaagaagaagctttttggaagaaaacatccattgcatcatgtcctcggaggaggcaaagccgccgaccttgtgctgtggaggaacaaacaggcatctgggagcatcttggtaggggtgaccgtgatctggttactgttcgagggcatcggctaccacctccttaccttcctttgccacgcactaattgtgtttctcac

SEQ ID NO: 36125 - protein, 113 aa, Zea mays subsp. mays
  misc_feature (6)..(6): Xaa can be any naturally occurring amino acid
MMSESXEHGSLLDKINDKINEKIHEYKHSSSSSSSSDSDDDKKPKKSKKKKLFGRKHPLHHVLGGGKAADLVLWRNKQASGSILVGVTVIWLLFEGIGYHLLTFLCHALIVFL

SEQ ID NO: 36126 - protein, 112 aa, Zea mays subsp. mays
  misc_feature (5)..(5): Xaa can be any naturally occurring amino acid
MSESXEHGSLLDKINDKINEKIHEYKHSSSSSSSSDSDDDKKPKKSKKKKLFGRKHPLHHVLGGGKAADLVLWRNKQASGSILVGVTVIWLLFEGIGYHLLTFLCHALIVFL

SEQ ID NO: 36127 - protein, 61 aa, Zea mays subsp. mays
MSISTRRRPPPLRTQTMTRSPRSLRRRSFLEENIHCIMSSEEAKPPTLCCGGTNRHLGASW

SEQ ID NO: 36128 - DNA, 2625 bp, Zea mays subsp. mays
gcagcgaagcaggcctccttcttcacaagcgcttctgctaacaggcatcgtcgcatctctgtataggtatttctgaaaccagccgtcgtacgtccatcccaccgggagcaccggcgacgatgccgccgcgaacggtgtccgatgggggagacgacaacggcaccgacgttgctagccgaacgtcgtcgcaccgccgcacggagcacgggcatgggtacaaagtcggcgtcccaccggagaagaacctcctcgccgagatctctgacgcggtgaaggagacgttcttcgccgacgacccgctgcggcagtacaaggaccagcccaggtccaagaagatctggctcggcctgcagcacatcttcccggtgctcgactggagcaggcattactccctcggcaagttcaagggtgacttcatcgctgggctcaccattgccagcctctgcataccccaggacatcgggtattctaagcttgctaacttgccagcagaggtgggactatacagtagcttcgtgccgcctctgatatacgcagtgatgggcagctccagggacatagccatcggcccagtggccgtggtgtcgctgctgctcggtactctccttcagaatgagatcgaccccaagacacacccgctcgagtacaggcgcctagccttcacagcaacctttttcgcaggggtcactcaggcagccctcggattcttcaggctagggtttatcatagagttcttgtctcatgctgccattgtcggattcatggccggcgctgccatcaccattgcgcttcagcagctgaaaggattccttggaattgcaaacttcaccaagaaatccgatattgtatctgttatgaaatcagtttggggaaatgttcaccatgggtggaattggcagacaatactgataggagcgaccttcctggcattccttctggttgccaagtacattgggaaaaggaataaaaagctcttctgggtgtccgcaatcgcacctctcacttcggtgatcatatccacattttttgtgtacatcactcgtgcagataagcatggcgttgcaattgtcaagaacataaggaaaggcatcaacccaccttcagctagtctaatatacttcaccggcccatacttggcgacaggattcaaaattgggatagtagctggaatgataggcctaacggaagcgattgcaattggaagaacatttgcagccctcaaggattaccggatagatgggaacaaagaaatgatggctctagggaccatgaacattgttggttcactgacttcttgctacgtagccacaggttctttctcgcggtcagcagttaattacatggctggctgcaaaacagcagtgtcaaacgttgttatgtcaattgtcgtaatgcttactttgctactgatcaccccattgttcaagtacactccaaatgccatcctttcctcgatcatcatatcagcagtgcttggtttaattgactatgaatcggcttaccttatctggaaagttgacaaactggactttctagcatgcatgggagcattttttggagtcatattttcatcggtggagtatggcttgctcattgcggttgcaatatctcttgctaaaattcttctccaagtaacacggccaagaacagttttacttggaaaccttccacaaacaactatatacaggaatgtagaacagtatcctgatgctaccaaggttccaggggtgctgattgttagagtggactcagctatatacttcacaaactctaactatgttaaagagagaatcctgaggtggctaagagatgaggaggagcaacaacaggaccagaagttaacaaaaactgagtttctaattgttgacctgtctcctgtaattgatatcgacacaagtggaatccatgctttggaggagttggcgaaagctcttgaaaaacgcaaaattcagctggttcttaccaatcccgggccggcggtgatccagaagctccgctcagcgaaattcacggacatgattggtgaagacaacatattcctcacggtcggcgacgctgtgaagaaatttgctcctaagatggtcgataatgtctgatggagtttctgggtcatgacagtacgagcgagaagtctatctattttgtggcaaagttcagtggcaattatggatttatagagcagaaacaaaacagaacagaacgggagtaaataacatggttcgcggaatggtaaataaagaagatgctccggagttggagtgcatcacgtttgcgaggtgtggttggatagaaaacagatggtggcctagttgggcgtctatgtcagtccttgtggttgtggagtctgttccgcgttggcaagcactcagtgatggagatcaaatgcttcatggatcagcagatatgggtgcctgatgattaacatatcatcattgatcgtgaaagaagagttacctcgttggggtttcaggctttgtgtatatcttacagtacttagcccctttccttgtagtttatgtttttatgacgagcttttacatttggcttatatatgtatattctgtaatgttgatgcattgttaactgttaagtgttcctgaccaaaaaaaagggatgcaaaaacgt

SEQ ID NO: 36129 - protein, 658 aa, Zea mays subsp. mays
MPPRTVSDGGDDNGTDVASRTSSHRRTEHGHGYKVGVPPEKNLLAEISDAVKETFFADDPLRQYKDQPRSKKIWLGLQHIFPVLDWSRHYSLGKFKGDFIAGLTIASLCIPQDIGYSKLANLPAEVGLYSSFVPPLIYAVMGSSRDIAIGPVAVVSLLLGTLLQNEIDPKTHPLEYRRLAFTATFFAGVTQAALGFFRLGFIIEFLSHAAIVGFMAGAAITIALQQLKGFLGIANFTKKSDIVSVMKSVWGNVHHGWNWQTILIGATFLAFLLVAKYIGKRNKKLFWVSAIAPLTSVIISTFFVYITRADKHGVAIVKNIRKGINPPSASLIYFTGPYLATGFKIGIVAGMIGLTEAIAIGRTFAALKDYRIDGNKEMMALGTMNIVGSLTSCYVATGSFSRSAVNYMAGCKTAVSNVVMSIVVMLTLLLITPLFKYTPNAILSSIIISAVLGLIDYESAYLIWKVDKLDFLACMGAFFGVIFSSVEYGLLIAVAISLAKILLQVTRPRTVLLGNLPQTTIYRNVEQYPDATKVPGVLIVRVDSAIYFTNSNYVKERILRWLRDEEEQQQDQKLTKTEFLIVDLSPVIDIDTSGIHALEELAKALEKRKIQLVLTNPGPAVIQKLRSAKFTDMIGEDNIFLTVGDAVKKFAPKMVDNV

SEQ ID NO: 36130 - protein, 518 aa, Zea mays subsp. mays
MGSSRDIAIGPVAVVSLLLGTLLQNEIDPKTHPLEYRRLAFTATFFAGVTQAALGFFRLGFIIEFLSHAAIVGFMAGAAITIALQQLKGFLGIANFTKKSDIVSVMKSVWGNVHHGWNWQTILIGATFLAFLLVAKYIGKRNKKLFWVSAIAPLTSVIISTFFVYITRADKHGVAIVKNIRKGINPPSASLIYFTGPYLATGFKIGIVAGMIGLTEAIAIGRTFAALKDYRIDGNKEMMALGTMNIVGSLTSCYVATGSFSRSAVNYMAGCKTAVSNVVMSIVVMLTLLLITPLFKYTPNAILSSIIISAVLGLIDYESAYLIWKVDKLDFLACMGAFFGVIFSSVEYGLLIAVAISLAKILLQVTRPRTVLLGNLPQTTIYRNVEQYPDATKVPGVLIVRVDSAIYFTNSNYVKERILRWLRDEEEQQQDQKLTKTEFLIVDLSPVIDIDTSGIHALEELAKALEKRKIQLVLTNPGPAVIQKLRSAKFTDMIGEDNIFLTVGDAVKKFAPKMVDNV

SEQ ID NO: 36131 - protein, 444 aa, Zea mays subsp. mays
MAGAAITIALQQLKGFLGIANFTKKSDIVSVMKSVWGNVHHGWNWQTILIGATFLAFLLVAKYIGKRNKKLFWVSAIAPLTSVIISTFFVYITRADKHGVAIVKNIRKGINPPSASLIYFTGPYLATGFKIGIVAGMIGLTEAIAIGRTFAALKDYRIDGNKEMMALGTMNIVGSLTSCYVATGSFSRSAVNYMAGCKTAVSNVVMSIVVMLTLLLITPLFKYTPNAILSSIIISAVLGLIDYESAYLIWKVDKLDFLACMGAFFGVIFSSVEYGLLIAVAISLAKILLQVTRPRTVLLGNLPQTTIYRNVEQYPDATKVPGVLIVRVDSAIYFTNSNYVKERILRWLRDEEEQQQDQKLTKTEFLIVDLSPVIDIDTSGIHALEELAKALEKRKIQLVLTNPGPAVIQKLRSAKFTDMIGEDNIFLTVGDAVKKFAPKMVDNV

SEQ ID NO: 36132 - DNA, 836 bp, Zea mays subsp. mays
aaaccaaaataatcgccaccgctctccgcaccgaaccgaagcagcggcgatgtcggcggagaagccggctcccgtgcgcgtgctctactgcggcgtctgcggcctcccggccgagtactgcgagttcggccccgacttcgagcgctgcaagccctggctgcgcgcgcacgcgcccggcgtctaccccgacgaccttgtcgccgcctcctcctcacccggcggcggcgacaaggacgtcgacaaggtcggggatcgcctccagggcgtcgggatctccgacggctccaccggcgccgcaggggatgcttccgcgtctaagccccaagaggcgaaacgcctgcctggtggtaagctcaagaaaaaggagaagcaagaagtggtcattgagaagattgtccgtaacaagcgcaaatgtgttactgtggtgaaagggcttgaattgtttggtgtaaagcttagtgatgcttcgaagaagcttgggaagaagtttgcaaccggagcttctgttgttaagggccctacggagaaggagcaaatcgacgtacaaggggacatctcatatgatattgtggagttcattacagatacatggcctgatgtacctgagtcggccattttcttcattgaagatggaaggaaggttcctgctgcttgatgccatatggtttataaggcacgagaccaggcatatagggccataccagctcgtctcttgtccgaagtcatgaactgttgttccggtttttaggcctacttcacaagtggcatttttttttaccaccgtcacctgcttccatgtatgaaatcaaatctatacagttaccaatttactgttt

SEQ ID NO: 36133 - protein, 217 aa, Zea mays subsp. mays
NQNNRHRSPHRTEAAAMSAEKPAPVRVLYCGVCGLPAEYCEFGPDFERCKPWLRAHAPGVYPDDLVAASSSPGGGDKDVDKVGDRLQGVGISDGSTGAAGDASASKPQEAKRLPGGKLKKKEKQEVVIEKIVRNKRKCVTVVKGLELFGVKLSDASKKLGKKFATGASVVKGPTEKEQIDVQGDISYDIVEFITDTWPDVPESAIFFIEDGRKVPAA

SEQ ID NO: 36134 - protein, 201 aa, Zea mays subsp. mays
MSAEKPAPVRVLYCGVCGLPAEYCEFGPDFERCKPWLRAHAPGVYPDDLVAASSSPGGGDKDVDKVGDRLQGVGISDGSTGAAGDASASKPQEAKRLPGGKLKKKEKQEVVIEKIVRNKRKCVTVVKGLELFGVKLSDASKKLGKKFATGASVVKGPTEKEQIDVQGDISYDIVEFITDTWPDVPESAIFFIEDGRKVPAA

SEQ ID NO: 36135 - protein, 141 aa, Zea mays subsp. mays
TKIIATALRTEPKQRRCRRRSRLPCACSTAASAASRPSTASSAPTSSAASPGCARTRPASTPTTLSPPPPHPAAATRTSTRSGIASRASGSPTAPPAPQGMLPRLSPKRRNACLVVSSRKRRSKKWSLRRLSVTSANVLLW

SEQ ID NO: 36136 - DNA, 915 bp, Zea mays subsp. mays
gcacgagaccattacctagaacatcctaatcgaaaagttccgccgcccgcacacgtctctcctcttccgttcctctcctgcctccagctctccacggtctctgacccgcacaactgaacccgcgatggcgcgccgcctcctcgtcgccctcctcgccgcgtcgctcctgctcccgctcgcccgcgcggactcctcctcgtccccgcccgacaccaccgcgtacgacgagctccgcctccggggcttcccgcgcggcctgctcccggccaacgtgcgggcctacacgctcgactccggctccggggacttcgccgtcgacctccgctccagctgccggatcgtgctgcccgcggggagctacctcgccgccttcagcgaccgcctcacgggccgcctcgacgaccgccgcatctcgggcctcgacggcatccgcgtcagggccttcttccgctggtggtccatcacggggatccgcgccgatggggaccagctcgtcttcgaggtcggctccgtctccgccaagttccccgcgcgggacttcaacgccagcctcgactgccccgcccaggcggcgtcctaagtcaaggaggtatcctgtcgcatgttccatgacatgtgacattctaaaggggcagttggaagccaagcacatcaatgtttttaatttcatctgtctttattgtaattgtataagtttacaatagatgcatagaacagactggatcgataaaagcgccttcacagaccaaaaacccggtatcacggtagtggttcgtgcatttcgttagaaatgccctacgtcttattttgaaaagttgtgcttgtatatcttacttattgacaatagctgtacttataagactacttgcataaagaagaaaagtgaggtgcaaggccgaaaggcccctatgcgct

SEQ ID NO: 36137 - protein, 151 aa, Zea mays subsp. mays
MARRLLVALLAASLLLPLARADSSSSPPDTTAYDELRLRGFPRGLLPANVRAYTLDSGSGDFAVDLRSSCRIVLPAGSYLAAFSDRLTGRLDDRRISGLDGIRVRAFFRWWSITGIRADGDQLVFEVGSVSAKFPARDFNASLDCPAQAAS

SEQ ID NO: 36138 - DNA, 600 bp, Zea mays subsp. mays
atacgactgggtcgctttgacttgcgtaggacactcccgactctagcctcctgcggcttccgcatcctccgcttcgtgtcgtctgccctgctgcccaagcctccggaggttctaccggagccggctcactctcgcgacaccgccgcggcctccggctatatatggacggcgaggaggcgccccttggcgcgctcaacctggctgagtacgcccccgccggcgcccgcaccgtcgactgctacaggcgtatccgcaagatcggcgagggcacctacggtgaggtatttgaagctgtggatattattactggggaaagagcagcacttaagaaaataaaactggatgatggcaaagaagggtttccacgccaaatcttgcgtgagattaaactattaaaaaagctggatcatgagaacatcatcagattgaaagagattgtagtatctcctggttctgcacatggaacaggcggatcagatgatcacatctataggggagatatctacatggtgtttgaatacatggaccatgatttgaagaaagtattgcaccatagtgccccatcccaagtcaaggtttatatggggcagctgctaaaag

SEQ ID NO: 36139 - protein, 146 aa, Zea mays subsp. mays
MDGEEAPLGALNLAEYAPAGARTVDCYRRIRKIGEGTYGEVFEAVDIITGERAALKKIKLDDGKEGFPRQILREIKLLKKLDHENIIRLKEIVVSPGSAHGTGGSDDHIYRGDIYMVFEYMDHDLKKVLHHSAPSQVKVYMGQLLK

SEQ ID NO: 36140 - protein, 111 aa, Zea mays subsp. mays
IRLGRFDLRRTLPTLASCGFRILRFVSSALLPKPPEVLPEPAHSRDTAAASGYIWTARRRPLARSTWLSTPPPAPAPSTATGVSARSARAPTVRYLKLWILLLGKEQHLRK

SEQ ID NO: 36141 - DNA, 589 bp, Zea mays subsp. mays
aggtttgttggaggcccactggcacagcaaatttcgcactatttttttttctcccgttcacctagcgtgaggcgtgcgctctcgtggcgactttggacaccgccggcgcctaccctctgtctcgtggcgacgagccgccgccgccgacctaagcgaggtctctgtgggactctttgctggtgacgagcaaccatcaggtccgcccctgatgagcaggcccaacactcgcaacaagagcaagaggccacgatctgatgaatccattaatccgtctgcggctgttttcaagaagatacactccgccggtgatatctcgaaagacgatatctgccagctttacatggtgtggaaaccgccttgccatggctgccatggcaatactaaggattccccaaattgtttctgtgggttgatccctgctgccaatggggttcggaagactggcctctggcagaaaatgcaggaaatggttcgtggtctcggccccaatccatccaaggacctccgcgattccactgatacgcctgctggattgactaacctgggtgcaactgttatgcaaatagcatatttcagtgcctttacatga

SEQ ID NO: 36142 - protein, 126 aa, Zea mays subsp. mays
MSRPNTRNKSKRPRSDESINPSAAVFKKIHSAGDISKDDICQLYMVWKPPCHGCHGNTKDSPNCFCGLIPAANGVRKTGLWQKMQEMVRGLGPNPSKDLRDSTDTPAGLTNLGATVMQIAYFSAFT

SEQ ID NO: 36143 - protein, 82 aa, Zea mays subsp. mays
MVWKPPCHGCHGNTKDSPNCFCGLIPAANGVRKTGLWQKMQEMVRGLGPNPSKDLRDSTDTPAGLTNLGATVMQIAYFSAFT

SEQ ID NO: 36144 - DNA, 807 bp, Zea mays subsp. mays
ggggttggcggttttgaaaaacctttttttttttttttttttttttttttttttttttttttttttttttttttttttttttttttttttttttttttttttttttttcatctagtatttaattttatataatgattaattagttctaatagcaaataattaatacaaatcatattacaccttttgcatggtattctcattcttaattttctgcaacatagttctaatagcaaacttccaaaacaggcacacagataaaagtactagtgcttcacatcatcacctcttgtgtggaactgaaggggaacatgtgatgctggcgacgaaatctcggaactagcgcagcaggaatcgaaccgcagccacggcatcacccttgtgctcacggagcgttctctccgcgatcttcttgtccagctcaagctcactagcgataatttcgacatcggcagggttgatcttgacagcagccaattctttctccctcagcctcatcgcgttccagtcagcctccttggatgaagcaagtgccgccatggcggattggacacgggatgaatcgagctgccggtcctcgacatgatcagtgagcttgtcgagcgccttgctctgctgctgaaggtccttggagtccaccgcgccctcgccctcggcggcaccggcccccgcggctgcagcggacgcagccatcgcagccttctcgtcgcccgccgcacccatcgccgtctaaaaccctaacccggatctacttttctccgatgagacgagtgtgtgcactgtgccacaggcggctgacgagatggccgt

SEQ ID NO: 36145 - protein, 52 aa, Zea mays subsp. mays
MISELVERLALLLKVLGVHRALALGGTGPRGCSGRSHRSLLVARRTHRRLKP

SEQ ID NO: 36146 - protein, 50 aa, Zea mays subsp. mays
MVFSFLIFCNIVLIANFQNRHTDKSTSASHHHLLCGTEGEHVMLATKSRN

SEQ ID NO: 36147 - protein, 43 aa, Zea mays subsp. mays
GVGGFEKPFFFFFFFFFFFFFFFFFFFFFFFFFFFFHLVFNFI

SEQ ID NO: 36148 - DNA, 942 bp, Zea mays subsp. mays
tagaacatcctaatcgaaaacgaagattcagaataccaacaagctgatctagttaagatggatatccttcttaatggtcaacctgttgatgctatggcaactatagtgcataaccagaaggctcagcgggttggaaaggatttagtggagaagctcaagaaatttatagaaaggcaaatgtttgagatcaccatacaagcagcaattggttcaaaagttattgcaagggaaaccctgtccgcaatgaggaagaatgtcctggccaagtgctatggcggtgatattactcggaagaagaagttgctagagaagcaaaaggaaggcaagaagcgcatgaaacgtgtgggatctgtcgacattcctcaggaagccttccatgagctactgaaggtctccaatttaaaatagatggtgatccactgcaattttagtttctgtagctgtccaaattttataagtagctgtgtggtgatgagtagcagcaaccttttctagtcatcttctgacagatcttgacagaatgatcgattccattgagtacataatggcctctcctgcgccttgtcagacgagccaacttgtgctggaagttgctcctcctgtagtcctgtcatccatcctgtggtgattgatatacacacaaggcttctcagctggccgcagacggatttcagtagagccaccatctttgtatttgttgattgattgatggagaaccatcctttgagcacttgctaaacccagttttctctgctgacctgatagtctgccttgtcacgttacactctattttttttgttagataatgcttttgagcaaaaataataggtcatacacattaattggtcactgaaacaatgtggtacatgtaataagaggagctgcattgtataaagacatagtagtatcatgtttttggagtttcgggctatctccttttcg

SEQ ID NO: 36149 - protein, 116 aa, Zea mays subsp. mays
MDILLNGQPVDAMATIVHNQKAQRVGKDLVEKLKKFIERQMFEITIQAAIGSKVIARETLSAMRKNVLAKCYGGDITRKKKLLEKQKEGKKRMKRVGSVDIPQEAFHELLKVSNLK

SEQ ID NO: 36150 - protein, 104 aa, Zea mays subsp. mays
MATIVHNQKAQRVGKDLVEKLKKFIERQMFEITIQAAIGSKVIARETLSAMRKNVLAKCYGGDITRKKKLLEKQKEGKKRMKRVGSVDIPQEAFHELLKVSNLK

SEQ ID NO: 36151 - protein, 76 aa, Zea mays subsp. mays
MFEITIQAAIGSKVIARETLSAMRKNVLAKCYGGDITRKKKLLEKQKEGKKRMKRVGSVDIPQEAFHELLKVSNLK

SEQ ID NO: 36152 - DNA, 751 bp, Zea mays subsp. mays
ctcgcctcggcgcctcgggcgctcttcccgcgcgcgtgcccagtcgcgacgccggccggcccggcccggcgccgcaccgccgctcctcacatctgcagggcctccgcggcggctggggaggagacgccgccgccgccggccgctcccaagaagatcctcaagaagaagcccgtctactcgatgaagaaagggcagattgtgcgcgtggacaaggagaagtacctgaacagcatcaattatctgtcagttggacacccgcccttctacaaggggctggactacatataccaagaccgcggcgaggtcttggatatcaggaacttcgaaacaggagaatacgccctgatcgcttgggtggggatcccgacgccaccggcatggctaccaacctacatgctcatcaagtcggacaagctcgactacgagaggatatgatggccggccggccggccggccggcggccttgcagggcaccgtagcgccgccgccgaattcatgcttcatttcgcatcaggagtcggccaatcaggacgcaccttgttgttgacttgttgtaggtatatacgtacatgccagtattgccagaacagtcgacagaggcaatctgagacctcagctgctggaataataaggaagtagatcgagagcgacgtacgatgacgagattcataattgctgctgcacaccacttctttatgttatttaaactcacgtttcgtacttaatattaataatataccacatctcttcc

SEQ ID NO: 36153 - protein, 158 aa, Zea mays subsp. mays
RLGASGALPARVPSRDAGRPGPAPHRRSSHLQGLRGGWGGDAAAAGRSQEDPQEEARLLDEERADCARGQGEVPEQHQLSVSWTPALLQGAGLHIPRPRRGLGYQELRNRRIRPDRLGGDPDATGMATNLHAHQVGQARLREDMMAGRPAGRRPCRAP

SEQ ID NO: 36154 - protein, 144 aa, Zea mays subsp. mays
LASAPRALFPRACPVATPAGPARRRTAAPHICRASAAAGEETPPPPAAPKKILKKKPVYSMKKGQIVRVDKEKYLNSINYLSVGHPPFYKGLDYIYQDRGEVLDIRNFETGEYALIAWVGIPTPPAWLPTYMLIKSDKLDYERI

SEQ ID NO: 36155 - protein, 84 aa, Zea mays subsp. mays
MKKGQIVRVDKEKYLNSINYLSVGHPPFYKGLDYIYQDRGEVLDIRNFETGEYALIAWVGIPTPPAWLPTYMLIKSDKLDYERI

SEQ ID NO: 36156 - DNA, 967 bp, Zea mays subsp. mays
  misc_feature (552)..(552): n is a, c, g, or t
  misc_feature (555)..(555): n is a, c, g, or t
atagaacatcctaatcgaaaaggcattcccattcccacccgtccatccatcctccgaagctcctcggcagacaagcagcagcgagagaaagcaagcaaggcagaggcagttgtgttgctggtcggtccgtccatggcgcccaagagaccagtgtcggcggcggcggcggcggagcagccgaggctgcgcggcgtgcggaagcggccgtggggccggtacgcggcggagatccgcgacccggtgcggaaggcgcgcgtgtggctgggcaccttcgacacgccggagcaggcggcgcgggcgtacgacgccgccgcgcgcaagctccgcgggcccggcgccgccaccaactaccccgccccggagccgacggcggaggcgttggcggaggctccagcggcgagcgggagcgggagcgccgtggtgtacgagtcgtcgtcggcgtcggcgtcggcgtcgtcgtgctccctgccgctggcggccccgtcgctggacctcagcctggcgctgccggctgcggcggcggccgcagagccgtaccagctgttcgcgganccngcggcggcggccgccgtgacgccggcgctgctgcacttcttgccgcccaagagcgaggagcagcagagctactctgggtcatcgtcgctgtcctcgtcgtcgtcgtctgtagtgttcgacgcggcgccgcccgtgggcctgcggctggacctcaacctggcgctgccgccggccgagatggtgatgtgattgctgccgtccaggaggctaatcgattgctcagttaattagtcaccattagtagctaatcgatcaaggcagccgtcaggcagaggtgtaaataggatgcagatttgctcggttttcgttgactgtgatggcatggtttgtttcttcgctgcgagtcacgcaacaatgcaaaagcaaaatgaaaagagagagggagagggataattatgccccagcggctccc

SEQ ID NO: 36157 - protein, 247 aa, Zea mays subsp. mays
  misc_feature (184)..(185): Xaa can be any naturally occurring amino acid
IEHPNRKGIPIPTRPSILRSSSADKQQREKASKAEAVVLLVGPSMAPKRPVSAAAAAEQPRLRGVRKRPWGRYAAEIRDPVRKARVWLGTFDTPEQAARAYDAAARKLRGPGAATNYPAPEPTAEALAEAPAASGSGSAVVYESSSASASASSCSLPLAAPSLDLSLALPAAAAAAEPYQLFAXXAAAAAVTPALLHFLPPKSEEQQSYSGSSSLSSSSSSVVFDAAPPVGLRLDLNLALPPAEMVM

SEQ ID NO: 36158 - protein, 203 aa, Zea mays subsp. mays
  misc_feature (140)..(141): Xaa can be any naturally occurring amino acid
MAPKRPVSAAAAAEQPRLRGVRKRPWGRYAAEIRDPVRKARVWLGTFDTPEQAARAYDAAARKLRGPGAATNYPAPEPTAEALAEAPAASGSGSAVVYESSSASASASSCSLPLAAPSLDLSLALPAAAAAAEPYQLFAXXAAAAAVTPALLHFLPPKSEEQQSYSGSSSLSSSSSSVVFDAAPPVGLRLDLNLALPPAEMVM

SEQ ID NO: 36159 - DNA, 979 bp, Zea mays subsp. mays
gaaaaagcagccgtgacggatccagccgaaccccctcgcagtcgcagccccctcacgccacgcgacatgggcaagatcaggatgcccgtgccgtccctgttccgccgccgctcctccaagccgccgccgccgcagccgcagcagcaggcgcctgccgcgggcgacggcgacggcagcgggtccccggagcgggcgacggcggaggaggagatggcgcgcgtgttccgcaagttcgacgcgaacggcgacgggcggatctcgcggtcggagctggcggcgctgttcgagagcctgggccacggcgcgtcggacgacgaggtggcgcgcatgatggccgaggcggacgcggacggcgacggcttcatcagcctgcccgagttcgcggccctcaacgccacggtggccggcgacgcggccgccgtcgaggaggacctgcgccacgccttccgcgtcttcgacgccgacggcagcggcgccatctccgccgccgagctcgcgcgcgtcctccgcagcctcggcgagcccgcctccgtcgcgcagtgccgccgcatgatcgagggcgtcgaccagaacggcgacggcctcatctccttcgacgagttcaaggtcatgatggccaggggaggaggctgcttcgctaagatcgcctaggtaattagaggttccctcccggcccagccctttcgaatctctgctgctccacccatcccccccacctccgttcacagcagccgagagtatggcgtcgtgtgcggtcttaagtaaagtgtatatagaagccaagatcatcgtggagaagcactagcgctagattcttctctctactaataattgggaaccacggcggatattgctttttgcaagattggagcctggatgaaagcagtggttcagagctaacttctgttctagagatgcggatgcttgactctgtgaatgaaagagtagacgattcgaacctactcctatgtggatctct

SEQ ID NO: 36160 - protein, 216 aa, Zea mays subsp. mays
EKAAVTDPAEPPRSRSPLTPRDMGKIRMPVPSLFRRRSSKPPPPQPQQQAPAAGDGDGSGSPERATAEEEMARVFRKFDANGDGRISRSELAALFESLGHGASDDEVARMMAEADADGDGFISLPEFAALNATVAGDAAAVEEDLRHAFRVFDADGSGAISAAELARVLRSLGEPASVAQCRRMIEGVDQNGDGLISFDEFKVMMARGGGCFAKIA

SEQ ID NO: 36161 - protein, 212 aa, Zea mays subsp. mays
KSSRDGSSRTPSQSQPPHATRHGQDQDARAVPVPPPLLQAAAAAAAAAGACRGRRRRQRVPGAGDGGGGDGARVPQVRRERRRADLAVGAGGAVREPGPRRVGRRGGAHDGRGGRGRRRLHQPARVRGPQRHGGRRRGRRRGGPAPRLPRLRRRRQRRHLRRRARARPPQPRRARLRRAVPPHDRGRRPERRRPHLLRRVQGHDGQGRRLLR

SEQ ID NO: 36162 - protein, 194 aa, Zea mays subsp. mays
MGKIRMPVPSLFRRRSSKPPPPQPQQQAPAAGDGDGSGSPERATAEEEMARVFRKFDANGDGRISRSELAALFESLGHGASDDEVARMMAEADADGDGFISLPEFAALNATVAGDAAAVEEDLRHAFRVFDADGSGAISAAELARVLRSLGEPASVAQCRRMIEGVDQNGDGLISFDEFKVMMARGGGCFAKIA

SEQ ID NO: 36163 - DNA, 1789 bp, Zea mays subsp. mays
  misc_feature (608)..(608): n is a, c, g, or t
  misc_feature (914)..(914): n is a, c, g, or t
  misc_feature (1188)..(1188): n is a, c, g, or t
taaagggaacaaaagctggagctccaccgcggtggcggccgctctagaactagtggatcccccgggctgcaggaattcgcacgagaccattacctagaacatcctaatcgaaaaaagacaccaaacacccatgcacacgcaacctatcaagatgaaaagaggcctcctggtactttggtccttgttctacttcagtgttgcaaacgctgacactagaaaccaggccaagcagcctcttgagttcaatcaattgagagtatcaaggaaatatgttcaaggaaaacaagattcaactcccaagaacggaaccagtccatcagtgcatagaggctcaacaagcaatcaacgggagcaggataagatcatatgtatgcctgggcaaacaggggtagcagagtttgaccaatatgcaggatatgtgactgtggatgccaaggctggaagggctttgttctactactttgttgaggctcctcaagatccttcaaacaaacctcttgtcctatggctgaatggagggcctggctgttcatcctttggatctggggccatggttgaacttggacctttctctgttcatagtgacaacaagacactgtacaagaaanggcatgcatggaacagaatggccaacatgttgttcattgagatcccagctggtgttggatactcatattcaaacactacatcagattactataacactggtgaccaaagaacaacagatgatgcatatacctttcttattacttggctagagaaatttcctgaatatcaggaccgtgatttcttcataactggtgagagctatgcaggtcactatataccagaacttgcaaatctgattctctctaagaatagagccaccaatgtaactagtatcaagcttaaaggtgttgcgattggaaatgcanacttggatgataatttgactctaagagcatcatatgactactattggatgcatgctatgatttcgggaaaagcttataaagccgtcaaggataagtgcggctttaacgggacatacactgaagactgccaaaatgccatggacttagccacccaagaaaaaggaaatattgatgactatgacatctatgcaccaatatgccaagatgcctcaaacccttctaaatcaagtgactcgttagtgtttggtgatccatgcacaaaccactacgtctnctcttacctaaatcgtcctgaggtccaaagggcactccatgcaaacacaacagggttaggctacccatggatggactgtagtcagcagatatttgataattggaaagattcaccagagacaatgctgccatcaatcaagaaactcatttcaagtggcacgagaatatggctgtacagtggtgatatggatgcagtgtgctcattcatttcaacacaatatgtgctggacaatcttgggcttcctatagaagcagcttggcgtccatggcacgtcgacaatgaggttgctggctacgtcattgggtataaagggctggtcttcgcgacggtcagaggagctgtgcacatggtgccatactaccagcctcgcagggcattggcattattctcgtcattcctcgaaggggagctccctccacgctgatcgattaagctagcagggtttgtgaatgccatttactcattttccacagcctatggaatcataggcggtacatgaggcctagtgtttttactatacttgtagctggcctttattttttatataaatatataaaacaaaccaagcagggagctgacgattatattaataaaaaatgag

SEQ ID NO: 36164 - protein, 493 aa, Zea mays subsp. mays
  misc_feature (160)..(160): Xaa can be any naturally occurring amino acid
  misc_feature (262)..(262): Xaa can be any naturally occurring amino acid
  misc_feature (353)..(353): Xaa can be any naturally occurring amino acid
MHTQPIKMKRGLLVLWSLFYFSVANADTRNQAKQPLEFNQLRVSRKYVQGKQDSTPKNGTSPSVHRGSTSNQREQDKIICMPGQTGVAEFDQYAGYVTVDAKAGRALFYYFVEAPQDPSNKPLVLWLNGGPGCSSFGSGAMVELGPFSVHSDNKTLYKKXHAWNRMANMLFIEIPAGVGYSYSNTTSDYYNTGDQRTTDDAYTFLITWLEKFPEYQDRDFFITGESYAGHYIPELANLILSKNRATNVTSIKLKGVAIGNAXLDDNLTLRASYDYYWMHAMISGKAYKAVKDKCGFNGTYTEDCQNAMDLATQEKGNIDDYDIYAPICQDASNPSKSSDSLVFGDPCTNHYVXSYLNRPEVQRALHANTTGLGYPWMDCSQQIFDNWKDSPETMLPSIKKLISSGTRIWLYSGDMDAVCSFISTQYVLDNLGLPIEAAWRPWHVDNEVAGYVIGYKGLVFATVRGAVHMVPYYQPRRALALFSSFLEGELPPR

SEQ ID NO: 36165 - protein, 486 aa, Zea mays subsp. mays
  misc_feature (153)..(153): Xaa can be any naturally occurring amino acid
  misc_feature (255)..(255): Xaa can be any naturally occurring amino acid
  misc_feature (346)..(346): Xaa can be any naturally occurring amino acid
MKRGLLVLWSLFYFSVANADTRNQAKQPLEFNQLRVSRKYVQGKQDSTPKNGTSPSVHRGSTSNQREQDKIICMPGQTGVAEFDQYAGYVTVDAKAGRALFYYFVEAPQDPSNKPLVLWLNGGPGCSSFGSGAMVELGPFSVHSDNKTLYKKXHAWNRMANMLFIEIPAGVGYSYSNTTSDYYNTGDQRTTDDAYTFLITWLEKFPEYQDRDFFITGESYAGHYIPELANLILSKNRATNVTSIKLKGVAIGNAXLDDNLTLRASYDYYWMHAMISGKAYKAVKDKCGFNGTYTEDCQNAMDLATQEKGNIDDYDIYAPICQDASNPSKSSDSLVFGDPCTNHYVXSYLNRPEVQRALHANTTGLGYPWMDCSQQIFDNWKDSPETMLPSIKKLISSGTRIWLYSGDMDAVCSFISTQYVLDNLGLPIEAAWRPWHVDNEVAGYVIGYKGLVFATVRGAVHMVPYYQPRRALALFSSFLEGELPPR

SEQ ID NO: 36166 - protein, 413 aa, Zea mays subsp. mays
  misc_feature (80)..(80): Xaa can be any naturally occurring amino acid
  misc_feature (182)..(182): Xaa can be any naturally occurring amino acid
  misc_feature (273)..(273): Xaa can be any naturally occurring amino acid
MPGQTGVAEFDQYAGYVTVDAKAGRALFYYFVEAPQDPSNKPLVLWLNGGPGCSSFGSGAMVELGPFSVHSDNKTLYKKXHAWNRMANMLFIEIPAGVGYSYSNTTSDYYNTGDQRTTDDAYTFLITWLEKFPEYQDRDFFITGESYAGHYIPELANLILSKNRATNVTSIKLKGVAIGNAXLDDNLTLRASYDYYWMHAMISGKAYKAVKDKCGFNGTYTEDCQNAMDLATQEKGNIDDYDIYAPICQDASNPSKSSDSLVFGDPCTNHYVXSYLNRPEVQRALHANTTGLGYPWMDCSQQIFDNWKDSPETMLPSIKKLISSGTRIWLYSGDMDAVCSFISTQYVLDNLGLPIEAAWRPWHVDNEVAGYVIGYKGLVFATVRGAVHMVPYYQPRRALALFSSFLEGELPPR

SEQ ID NO: 36167 - DNA, 633 bp, Zea mays subsp. mays
taatcgaaaaacgatcacacaccactccacagcagtagcaagagggatagagcaaggccacacacacacacacaccactaggcctaggttagccttttaatcgtcgtcgagaagcaagaaggggcgcgcacgcaagcaggcaagcaagaagagagccgatcgaccgagagctagcacgcgatggcgaggtcttccaagatgatggtggcggcagctctgctggccttggccctggccgtgtcgaccgccgaggcgaggaacatcaagaccacgacgacggagaagaaggacgacgcggtggtgctactgttactgtagtacgtcgtcgtcttcatgcatgcgtggttcgtggtttcccctagctccatacgagcagtagttgggccttgcacgtaccgtacgtctagctagctatatatatagcttgtgttctactgctttttagtttaattacctgcctgcattggagagttggatctgtttcatttggtggtgtttgctttactattaggtcagtatctgtttgtggagacttggtgtttaatttatttagccgtttgtgactggttgtagctagcggtggtgcggtggtgatgttcttgaggcatgaataatgctacatgcatgtgatct

SEQ ID NO: 36168 - protein, 45 aa, Zea mays subsp. mays
MARSSKMMVAAALLALALAVSTAEARNIKTTTTEKKDDAVVLLLL

SEQ ID NO: 36169 - protein, 39 aa, Zea mays subsp. mays
MMVAAALLALALAVSTAEARNIKTTTTEKKDDAVVLLLL

SEQ ID NO: 36170 - protein, 38 aa, Zea mays subsp. mays
MVAAALLALALAVSTAEARNIKTTTTEKKDDAVVLLLL

SEQ ID NO: 36171 - DNA, 445 bp, Zea mays subsp. mays
tgaatgactttgaggaagcagcaaaaatggttcagccatctttgagaagagaagggttttcttctgtccctggtgtcacatgggatgatgttggaggtcttgattcattaagaaaagagttcgaccgctgcattatccgttgtatcaagcaccccgaagactatgaggtatttggagtgaatatgcaagctggcttcctgctgtttggacctcctggttgcgggaaaacactaatagcaaaagcagtggcacatgaggcaggggctaactttattcacatcaaggggcctgagctactgaacaagtatgttggggagagtgaatcggaagttaggaaaatattcactcgtgcgcggactaactccccatgcatcctgttttttgatgaggttgatgctttgacaacaaaaagagggaaagagggaggatgggttgttgaacgtct

SEQ ID NO: 36172 - protein, 147 aa, Zea mays subsp. mays
NDFEEAAKMVQPSLRREGFSSVPGVTWDDVGGLDSLRKEFDRCIIRCIKHPEDYEVFGVNMQAGFLLFGPPGCGKTLIAKAVAHEAGANFIHIKGPELLNKYVGESESEVRKIFTRARTNSPCILFFDEVDALTTKRGKEGGWVVER

SEQ ID NO: 36173 - protein, 139 aa, Zea mays subsp. mays
MVQPSLRREGFSSVPGVTWDDVGGLDSLRKEFDRCIIRCIKHPEDYEVFGVNMQAGFLLFGPPGCGKTLIAKAVAHEAGANFIHIKGPELLNKYVGESESEVRKIFTRARTNSPCILFFDEVDALTTKRGKEGGWVVER

SEQ ID NO: 36174 - protein, 87 aa, Zea mays subsp. mays
MQAGFLLFGPPGCGKTLIAKAVAHEAGANFIHIKGPELLNKYVGESESEVRKIFTRARTNSPCILFFDEVDALTTKRGKEGGWVVER

SEQ ID NO: 36175 - DNA, 1101 bp, Zea mays subsp. mays
caacctttcaaattgaattgggctaccagtggggctggtgagaaacgtggagacgatggttcagattatactatatttgttggggacttggcctcggatgttacagatttcattctacaagatacgttcaagagtcgttatccatcagttaagggtgcaaaagttgtctttgacagaactactggccgttcgaaaggctatggttttgtaaagtttgcagattcggatgaacagacacgggcaatgactgaaatgaatggacaatactgttctagcagggccatgcgccttggaccagcatccaacaagaagaatactggtggaccacaaccatcgagtgctatttaccagaacacccaaggaactgattctgatagcgatccgaacaatactactgtatttgttggtggccttgacccgagtgtgactgatgagcttctgaagcaaaccttcagtccatatggagagcttctctatgtcaaaatacctgtaggaaagcgctgcgggtttgtccaatattctaacagggcatcagctgaggaggccataagggtgctaaatggaagccagctgggaggtcagagcataaggctctcatggggccgtagccctgcaaacaagcagcctcagcaagagcagagccaatggagtggtggcggctattatgggtatccccaaggatacgatccatatggctatgctcggccccctcaagatcctgccatgtacgcctacgcagcatatccagggtatggaaattaccagcaacagccaccacagcagcccccgccacaacagtaatgatgtcccgagagtgatcatttgcaagctggtcgcaaagtagctgggggttggggcgcagcaactttggtgcgttggcatgagaaattttgcggcggttgcttgtgttgtgttgtattgttccgacgcccttgtacacgtagcctgtgttgtaactgaatttttgccgaggccttatgagtgactagtgtttcaactgtaactggattgcacatttttgtctcaaggaatgtactattattgtgtggctcgtgccgctttgaacgctgagtccaggtattaatttttcttcatgctctt

SEQ ID NO: 36176 - protein, 266 aa, Zea mays subsp. mays
QPFKLNWATSGAGEKRGDDGSDYTIFVGDLASDVTDFILQDTFKSRYPSVKGAKVVFDRTTGRSKGYGFVKFADSDEQTRAMTEMNGQYCSSRAMRLGPASNKKNTGGPQPSSAIYQNTQGTDSDSDPNNTTVFVGGLDPSVTDELLKQTFSPYGELLYVKIPVGKRCGFVQYSNRASAEEAIRVLNGSQLGGQSIRLSWGRSPANKQPQQEQSQWSGGGYYGYPQGYDPYGYARPPQDPAMYAYAAYPGYGNYQQQPPQQPPPQQ

SEQ ID NO: 36177 - protein, 185 aa, Zea mays subsp. mays
MTEMNGQYCSSRAMRLGPASNKKNTGGPQPSSAIYQNTQGTDSDSDPNNTTVFVGGLDPSVTDELLKQTFSPYGELLYVKIPVGKRCGFVQYSNRASAEEAIRVLNGSQLGGQSIRLSWGRSPANKQPQQEQSQWSGGGYYGYPQGYDPYGYARPPQDPAMYAYAAYPGYGNYQQQPPQQPPPQQ

SEQ ID NO: 36178 - protein, 182 aa, Zea mays subsp. mays
MNGQYCSSRAMRLGPASNKKNTGGPQPSSAIYQNTQGTDSDSDPNNTTVFVGGLDPSVTDELLKQTFSPYGELLYVKIPVGKRCGFVQYSNRASAEEAIRVLNGSQLGGQSIRLSWGRSPANKQPQQEQSQWSGGGYYGYPQGYDPYGYARPPQDPAMYAYAAYPGYGNYQQQPPQQPPPQQ

SEQ ID NO: 36179 - DNA, 545 bp, Zea mays subsp. mays
cgagaccattccctagaacatcctaatcgaaaacttttttcgtctgggctgccaacatgccatccagactgaggaagacccggaaacttaggggccacgtgagccacggccacggccgcataggcaagcaccggaagcaccccggcggccgcggtaatgctggtggtctgcatcaccaccggatcaacttcgacaaataccacccaggctactttgggaaagttggtatgaagcattaccacttaaagaggaaccagagcttctgcccaactgtcaaccttgacaaattgtggactttggtcagtgaacagacacgggtgaatgctgctaaaaacaagacgggggctgctcccatcattgatgtggtgcgatcgggctactacaaagttctgggaaagggaaagctcccaaagcagcctgtcatcgtgaaggccaaattcttcagcagaagagctgaggagaagattaagagtgttgggggggcctgtgtcctggtggcttgaagccacatggagggagtttcattaaatgctaactactttttc

SEQ ID NO: 36180 - protein, 148 aa, Zea mays subsp. mays [sequence omitted]

SEQ ID NO: 36181 - protein, 91 aa, Zea mays subsp. mays
MKHYHLKRNQSFCPTVNLDKLWTLVSEQTRVNAAKNKTGAAPIIDVVRSGYYKVLGKGKLPKQPVIVKAKFFSRRAEEKIKSVGGACVLVA

SEQ ID NO: 36182 - DNA, 390 bp, Zea mays subsp. mays
ttacctagaacatcctaatcaaaaagagttgagagaacggagcggacgccatggcgaccaacatcgagcagatttttaggtctttcgtggtcagtaaattccgggaaattcaacaggagctttccagtggaaggaatgaaggccagctgaatggtgaaacaaatacacccattgaaggaaaccaggcgggtgatgcagctgcctctgccaggagtctaccaaatgaagaaatagtgcagaagatagaggaagtactttctggggtcttagatacagaactacgatataagccagacttgaaagagggctccagaaaaagtagatgcgtatctgtacaaacagatcctactgatgaaattcccactaaaaagtcaaagaagcataaaaagc

SEQ ID NO: 36183 - protein, 113 aa, Zea mays subsp. mays
MATNIEQIFRSFVVSKFREIQQELSSGRNEGQLNGETNTPIEGNQAGDAAASARSLPNEEIVQKIEEVLSGVLDTELRYKPDLKEGSRKSRCVSVQTDPTDEIPTKKSKKHKK

SEQ ID NO: 36184 - DNA, 529 bp, Zea mays subsp. mays
aatagattctacacttctaccgttccactctcgtgcgctcttgttttcttctctccgttgccgccctacgtcaggtgcccaattctccattttcgggcccttctccagcgacgagcacccgccagaggattatggattggctggggcagaaacgcgcggagatgctgatgcaggtgctgctggtggcgtctgcggtggtggcgttcctggtgggctacgtgcgcgcggacttccagctcatgctgctcgtctacgccggcggcgtcgtgctcacggctctggtcaccgtccccaactggcctttctacaaccgtaacccgctcaagtggctcgacgctgccgaggccgagcgccacccgcggccccaggtcagcgccgcccccgcggcagggggtaagaagaggtccgggaagaacaagtagttggtcgatgtgtgtgttcttggtcgacctgactcaacctgtttaagatctattcgcagaactaatcaattataaaaagagatattgagatatttgacagttttcgc

SEQ ID NO: 36185 - protein, 104 aa, Zea mays subsp. mays
IDSTLLPFHSRALLFSSLRCRPTSGAQFSIFGPFSSDEHPPEDYGLAGAETRGDADAGAAGGVCGGGVPGGLRARGLPAHAARLRRRRRAHGSGHRPQLAFLQP

SEQ ID NO: 36186 - protein, 96 aa, Zea mays subsp. mays
MDWLGQKRAEMLMQVLLVASAVVAFLVGYVRADFQLMLLVYAGGVVLTALVTVPNWPFYNRNPLKWLDAAEAERHPRPQVSAAPAAGGKKRSGKNK

SEQ ID NO: 36187 - protein, 86 aa, Zea mays subsp. mays
MLMQVLLVASAVVAFLVGYVRADFQLMLLVYAGGVVLTALVTVPNWPFYNRNPLKWLDAAEAERHPRPQVSAAPAAGGKKRSGKNK

SEQ ID NO: 36188 - DNA, 520 bp, Zea mays subsp. mays
actttccccgcctccatcaccaattcacgatctcctttcccgcaccgcgccccggatcgccggctcgcaattccggagttaaattcccctccaccgcaaccgtcatgggcggctcccacagccgcgaggacgtcgatctcacctcctccgacgaagaggaggaattcgaggacgactatgacgcccgatcccatcgcggaggccgcagcgagcgcggggcagcgcgacgacgacctcctccgcaccgccacaccttcctcgcttgaggccatcgacgccaagctcaggtcgctggatctcaagtaccagagacctaccgccgccaagctctacctccacgtcggcggggcctcgccttccgcgcgctgggtgcccgccgagcgccgcgcgacctacgcattcgtcgaccagtcgagcgacgacgcctyctcccccaggtggttcctagaggttgggccggggccgcgggtctccgcgcccgtggactcggcgctccagctgaagacgatccccgcgcagc

SEQ ID NO: 36189 - protein, 173 aa, Zea mays subsp. mays
  misc_feature (143)..(143): Xaa can be any naturally occurring amino acid
TFPASITNSRSPFPHRAPDRRLAIPELNSPPPQPSWAAPTAARTSISPPPTKRRNSRTTMTPDPIAEAAASAGQRDDDLLRTATPSSLEAIDAKLRSLDLKYQRPTAAKLYLHVGGASPSARWVPAERRATYAFVDQSSDDAXSPRWFLEVGPGPRVSAPVDSALQLKTIPAQ

SEQ ID NO: 36190 - protein, 114 aa, Zea mays subsp. mays
  misc_feature (84)..(84): Xaa can be any naturally occurring amino acid
MTPDPIAEAAASAGQRDDDLLRTATPSSLEAIDAKLRSLDLKYQRPTAAKLYLHVGGASPSARWVPAERRATYAFVDQSSDDAXSPRWFLEVGPGPRVSAPVDSALQLKTIPAQ

SEQ ID NO: 36191 - protein, 87 aa, Zea mays subsp. mays
FPRLHHQFTISFPAPRPGSPARNSGVKFPSTATVMGGSHSREDVDLTSSDEEEEFEDDYDARSHRGGRSERGAARRRPPPHRHTFLA

SEQ ID NO: 36192 - DNA, 457 bp, Zea mays subsp. mays
tctcctacaactgcattgttcactggcctgtgcaccatgcccaagcctggcgcctgcctaagagcgcaccagctggtgatggaaggcacgagttttggataccgtccgagggaggtgacgtacaaggtgctcgtggacgagcygygccgtgagaatgagctcgccaaggccaaggatgtcctggagctgatgctgcagcccaccgtccagtgtggccaggacagtggtggagatgcgggtgaggagaccaggacaaggatctacaatgtgtttcttggggcactgcgtgttgtggacaacccgagcgagcagcttggtgtgcttgtgtctatgctgcaggctggatgcaagccggatgtgatcaccatgaacactgtcatccatggcttctgcaagtccaggaggacccaggaggcaaggaggatcatggacgacatgctcagcgggaagttctgtg

SEQ ID NO: 36193 - protein, 152 aa, Zea mays subsp. mays
  misc_feature (48)..(49): Xaa can be any naturally occurring amino acid
SPTTALFTGLCTMPKPGACLRAHQLVMEGTSFGYRPREVTYKVLVDEXXRENELAKAKDVLELMLQPTVQCGQDSGGDAGEETRTRIYNVFLGALRVVDNPSEQLGVLVSMLQAGCKPDVITMNTVIHGFCKSRRTQEARRIMDDMLSGKFC

SEQ ID NO: 36194 - protein, 140 aa, Zea mays subsp. mays
  misc_feature (36)..(37): Xaa can be any naturally occurring amino acid
MPKPGACLRAHQLVMEGTSFGYRPREVTYKVLVDEXXRENELAKAKDVLELMLQPTVQCGQDSGGDAGEETRTRIYNVFLGALRVVDNPSEQLGVLVSMLQAGCKPDVITMNTVIHGFCKSRRTQEARRIMDDMLSGKFC

SEQ ID NO: 36195 - protein, 126 aa, Zea mays subsp. mays
  misc_feature (22)..(23): Xaa can be any naturally occurring amino acid
MEGTSFGYRPREVTYKVLVDEXXRENELAKAKDVLELMLQPTVQCGQDSGGDAGEETRTRIYNVFLGALRVVDNPSEQLGVLVSMLQAGCKPDVITMNTVIHGFCKSRRTQEARRIMDDMLSGKFC

SEQ ID NO: 36196 - DNA, 805 bp, Zea mays subsp. mays
ccaagtcacatgaaatctgcagtagcaaagaagagatcattcataaggtctcacagatcactgacctacgtcggccagttgttgtttatcttgcggtagctgacagccttcttgaagacgattcaataaccagtgggtggagagtgggtatggttgcttacgagaagaagaagcttggcgttactgacatctacgatcggcagccatatcttataaagtctgccatcgactttgaggtgtgctcgagagcagacgtgtttgtcggcaacagcttctcaacattctccaacctcgtagtgctgtccaggacagaaaggctgtataacctaggaaaggcgagctcgtgtggcgagaacatcgggctttcgtcctatgcgtacaatgtcatgggcgacgatggtggaccgcagagatggatgacagatatgtcggacacaagcctgcagaggttaagttacggaacaaataatgtctcatgccactgactttgacgcatagcaaacttgactgaacatgatgtatacctgaggaagagtccttgcccgacttcgctttttatcggcaaaggaagcaagtatgtgcagctaatttgacgtgcttctgtgttcgaagctagagcccacatgtcgcacttgtgaaggactatggccaagagtttagatgtgcttaaaagcgttgacagtgttgggcagtttgtagtttgtataacgctgaatgctgcgcgatggcttttacctgggacccttttgtttttttatggtttcagaatcagacctacacattcaagtgtattttgttcacatgc

SEQ ID NO: 36197 - protein, 160 aa, Zea mays subsp. mays
KSHEICSSKEEIIHKVSQITDLRRPVVVYLAVADSLLEDDSITSGWRVGMVAYEKKKLGVTDIYDRQPYLIKSAIDFEVCSRADVFVGNSFSTFSNLVVLSRTERLYNLGKASSCGENIGLSSYAYNVMGDDGGPQRWMTDMSDTSLQRLSYGTNNVSCH

SEQ ID NO: 36198 - protein, 111 aa, Zea mays subsp. mays
MVAYEKKKLGVTDIYDRQPYLIKSAIDFEVCSRADVFVGNSFSTFSNLVVLSRTERLYNLGKASSCGENIGLSSYAYNVMGDDGGPQRWMTDMSDTSLQRLSYGTNNVSCH

SEQ ID NO: 36199 - DNA, 1335 bp, Zea mays subsp. mays
gcttgtccccaccaggcgccatggacgctggcgacgacgaaccccccgttctcctcgaccgcgccgcccgcgcctcccgaggcaagaggataaccaagctgctcgaggacgaggtcgagcaggacgaggctttctggaaccaagaagccctcaaggatgaggagaacgatgacaactacgtggaagagccggatgctggtgacgaattcgacagtgattttggtgaagatgaatctgaaactgatgatgagccggagaaggaagtacgcgagagattacctatcaagaaacggctaatgtttcctggcaagacgctgaggaagaccaacgtcaagaagaagaaggcgaccccaaaaccagaagatggcacaaaagccgacaagtctgctgataagccgagttcatccacacaagcagatcttcctgatgaactggaggctgagaaggccatccggaaatcatccagaacgtcggtcatcgtgaggcaagctgaaagagaagcgatacgtgctgaaaaagaagcaacggccaagccgattaagagaaaaaaggagggagaagaaaagcggatgacacaagaggagatgcttttggaagcagctgaaacagagatcatgaacatgagaaatctagaacgtgtcctggcaagagaggaggaagtgaagaaaaaagctgttgttcataaggacacttatgagggtcctacaattcgttttttctcaagagatggggaatcacgtctggaattcataaatggagcatcatttgggtctgaactttgtacaacatcatctccttatccggagaaacctgtttgtgtggtgacaggacttccagccaaataccgtgatccgaagacagggctgccttatgcaactatggaagcatttaaaataatccgggagagtttcctgaaagaggaggctgatagaaagcgtccgaacatgtcgaatatgggagagcttttcgaatcaataactggtggacacttgatgcctaagaagagaagggttgagataaggtctccgaacatgttaggaggctctaggcatggcgggcgtacctggcgaatacctgcttttgatatggtggacgaggactaacgagacagatcccgtggctcccaatatgtcaatatgagagatctttctaaatcaatagccggtgaagaggaagatggataggatgttgtatttagtgttagatcttgtgcttgtagttatcttaatgtatttttgtcagttgataaattcatggttattaaagtggtaaaacgttaaaatgttatgaaacaactttttaatattttaacgcttaaacgaacgttgaaacgcc

SEQ ID NO: 36200 - protein, 366 aa, Zea mays subsp. mays
LSPPGAMDAGDDEPPVLLDRAARASRGKRITKLLEDEVEQDEAFWNQEALKDEENDDNYVEEPDAGDEFDSDFGEDESETDDEPEKEVRERLPIKKRLMFPGKTLRKTNVKKKKATPKPEDGTKADKSADKPSSSTQADLPDELEAEKAIRKSSRTSVIVRQAEREAIRAEKEATAKPIKRKKEGEEKRMTQEEMLLEAAETEIMNMRNLERVLAREEEVKKKAVVHKDTYEGPTIRFFSRDGESRLEFINGASFGSELCTTSSPYPEKPVCVVTGLPAKYRDPKTGLPYATMEAFKIIRESFLKEEADRKRPNMSNMGELFESITGGHLMPKKRRVEIRSPNMLGGSRHGGRTWRIPAFDMVDED

SEQ ID NO: 36201 - protein, 360 aa, Zea mays subsp. mays
MDAGDDEPPVLLDRAARASRGKRITKLLEDEVEQDEAFWNQEALKDEENDDNYVEEPDAGDEFDSDFGEDESETDDEPEKEVRERLPIKKRLMFPGKTLRKTNVKKKKATPKPEDGTKADKSADKPSSSTQADLPDELEAEKAIRKSSRTSVIVRQAEREAIRAEKEATAKPIKRKKEGEEKRMTQEEMLLEAAETEIMNMRNLERVLAREEEVKKKAVVHKDTYEGPTIRFFSRDGESRLEFINGASFGSELCTTSSPYPEKPVCVVTGLPAKYRDPKTGLPYATMEAFKIIRESFLKEEADRKRPNMSNMGELFESITGGHLMPKKRRVEIRSPNMLGGSRHGGRTWRIPAFDMVDED

SEQ ID NO: 36202 - protein, 268 aa, Zea mays subsp. mays
MFPGKTLRKTNVKKKKATPKPEDGTKADKSADKPSSSTQADLPDELEAEKAIRKSSRTSVIVRQAEREAIRAEKEATAKPIKRKKEGEEKRMTQEEMLLEAAETEIMNMRNLERVLAREEEVKKKAVVHKDTYEGPTIRFFSRDGESRLEFINGASFGSELCTTSSPYPEKPVCVVTGLPAKYRDPKTGLPYATMEAFKIIRESFLKEEADRKRPNMSNMGELFESITGGHLMPKKRRVEIRSPNMLGGSRHGGRTWRIPAFDMVDED

SEQ ID NO: 36203 - DNA, 1181 bp, Zea mays subsp. mays
aaaaaaaaaaaagatcacggacgacacagacggccaccaaatctgcacctgccccagatgcagcagaggtagtcgccacggcgccacctgcccactgcactgcccccagagcctccaagctgcatatcggaagtgaagcgcctcgcagtcctcctctcggatctcgcggtggaagtcgccggtccactcgatcagcgagcgagtcggtgccgcgcggcggattccccgacccgagcaaaggaaccggacatgcggccgcggctggtgctcttcggcgactccataaccgagctgtccttcgcgtccggcggatggggggccgcgctcaccgaccgcttcgcccgccaggctgacgtggtgctgcgcgggctcagcggctacaacacgcggtgggcgctcaaggtgctgccgcgggccatggagggcgcggcgggcgcgggcgcgggcgcggacccggcggccgtgacagtcttcttcggcgccaacgacgcctctctgcccgaccaggtgcaggcgcaccagcacgtgccgctcaaggagtaccagagcaacctccgcgccatctgcgcctatttcaaggagcgatggccctccactgctgtcatactcatcactcccccaccgatttacgagccagcgagaatccgagacatgtatggagacgacgagccttcacgccaaccagaaaggagcaatgaggctgccggcgcttacgcacaggcatgcatagatgttgccacagaattgaaccatccagttatagacatctggaccaagatgcaggaatttccagactggcaaacatctgcattgagcgacgggctccacttcaccccggtaggaaacaagatcctgttcgaggaggtggtgaagacgctggagacgagcatcggtttcagccaggagcggctcccgtcggacctcccgctgttccacgagatcgaccccaaggaccccatgaaagccttcggagcttagcttgggccttggaggagacgcacggtcgttggatcagccacgtctgctgcatttgagttcgtcgtcagtatgcaggaggcctgctgaggccattacaggaacagtgagctttaataagcggtgttttcagtaccgtttggttgtcagcgcatcacgtgttgtttggcacactgtggttggataaatcataccatttcggtccc

SEQ ID NO: 36204 - protein, 242 aa, Zea mays subsp. mays
MRPRLVLFGDSITELSFASGGWGAALTDRFARQADVVLRGLSGYNTRWALKVLPRAMEGAAGAGAGADPAAVTVFFGANDASLPDQVQAHQHVPLKEYQSNLRAICAYFKERWPSTAVILITPPPIYEPARIRDMYGDDEPSRQPERSNEAAGAYAQACIDVATELNHPVIDIWTKMQEFPDWQTSALSDGLHFTPVGNKILFEEVVKTLETSIGFSQERLPSDLPLFHEIDPKDPMKAFGA

SEQ ID NO: 36205 - protein, 186 aa, Zea mays subsp. mays
MEGAAGAGAGADPAAVTVFFGANDASLPDQVQAHQHVPLKEYQSNLRAICAYFKERWPSTAVILITPPPIYEPARIRDMYGDDEPSRQPERSNEAAGAYAQACIDVATELNHPVIDIWTKMQEFPDWQTSALSDGLHFTPVGNKILFEEVVKTLETSIGFSQERLPSDLPLFHEIDPKDPMKAFGA

SEQ ID NO: 36206 - DNA, 488 bp, Zea mays subsp. mays
gctggacctgatgtttaatgatagtaaggtttgggattttcaaaaaaaactagcaggtctcaacctcgaggcactctcacgcccaacggccacaccaccgccctctccgcgtgcccccgaaaccaccacacgcggccacgccacgccgcccactacgggcgggcctccttgcgcttggagtattggtcgacgtgctcctctcaccgcaccctctactgatactgggttggcgcgagaacggcgagcccacctgaacgcgtgattttggatggtgaaggcacagagtaaagagtctgcaacctttggtggtgcagtttttatgtgcaaccatctgaccaggaaggagtgctttgacaagaaaatatttggcctctctgatttctgtgctgattttgtagagaaagttaaagctggcacaactttattcttatatgatgttgatcagtgtaagctccatggtgttttcgaagcaacttcagatggggctg

SEQ ID NO: 36207 - protein, 86 aa, Zea mays subsp. mays
LDLMFNDSKVWDFQKKLAGLNLEALSRPTATPPPSPRAPETTTRGHATPPTTGGPPCAWSIGRRAPLTAPSTDTGLARERRAHLNA

SEQ ID NO: 36208 - protein, 83 aa, Zea mays subsp. mays
MFNDSKVWDFQKKLAGLNLEALSRPTATPPPSPRAPETTTRGHATPPTTGGPPCAWSIGRRAPLTAPSTDTGLARERRAHLNA

SEQ ID NO: 36209 - protein, 73 aa, Zea mays subsp. mays
MVKAQSKESATFGGAVFMCNHLTRKECFDKKIFGLSDFCADFVEKVKAGTTLFLYDVDQCKLHGVFEATSDGA

SEQ ID NO: 36210 - DNA, 478 bp, Zea mays subsp. mays
ctcgcactcgcacacatcgacgtggtctccgcgccgccgcacccccatcacagccaaccagcacctccgatccatcctccaaaccctattaccaccgctcccgccgcccccgactcgcgctcggatggcagggcaaccccgcgagcgtggtagccgctcgtcccggaagggccggtccgcccgcgcggggcttgcacaggcgcccccgccggcctccgatcccgatctgaccgtcggagaggatgccgcgccgtggctccgcgccacggcggacgagcttgaggagcgcctgctgaagaggctggatgaggcgtacgcggcggccctggcccgcctcgccgacctcggccacggcgaggaggcatccctcgaggccgttctccactcgggccactgttacggcaagctcaacgatcccgtttccaacatcgkggscaacgcccgcgcctaccttttcgatcctggccacgccagcgcg

SEQ ID NO: 36211 - protein, 159 aa, Zea mays subsp. mays
  misc_feature (144)..(145): Xaa can be any naturally occurring amino acid
SHSHTSTWSPRRRTPITANQHLRSILQTLLPPLPPPPTRARMAGQPRERGSRSSRKGRSARAGLAQAPPPASDPDLTVGEDAAPWLRATADELEERLLKRLDEAYAAALARLADLGHGEEASLEAVLHSGHCYGKLNDPVSNIXXNARAYLFDPGHASA

SEQ ID NO: 36212 - protein, 118 aa, Zea mays subsp. mays
  misc_feature (103)..(104): Xaa can be any naturally occurring amino acid
MAGQPRERGSRSSRKGRSARAGLAQAPPPASDPDLTVGEDAAPWLRATADELEERLLKRLDEAYAAALARLADLGHGEEASLEAVLHSGHCYGKLNDPVSNIXXNARAYLFDPGHASA

SEQ ID NO: 36213 - DNA, 1365 bp, Zea mays subsp. mays
tcaaaccatcaatcacagagcaactcgaatagcagctccaacaaaagctcaacgcaccagcagcaatggcgtctcgccgtttcttctacgacgacccctacgactactactacacctccccgtaccactacgcctacccctattaccggtaccagcaccccgatccgtcccgcggcgtcggcgggttcttcccggccgccgcagaagccgcgccggaggcggtgaaggtggacccgcggcccagggtcgagtcttcgaggtcggtctccgttcccgtccgcttcgtcggttccgacccggagccggtgcgcggggcggccaggatgccaccggcggcggtgccgaggaagcgggcgccgtcggcggaagcggcggcggtgctgctgcaggccgcggtgcgcgggttcatggcgaggaagtcggtgcgtgctgttcgcgaggtggagcgtgaggcggcggaggtcggcgagaaggttgcgcgcgaggcggaggcgctgcgcggagacgcgagggcgcggatcgccgtcggggaggcgctgatgaagatgctgctgcggctcgatgcggtgcgcggcgcgcgggaataccggaagagggtcaccaagcgggtcctcgcgctgcaggatgctgttgacgccctcgaaccaaagccgacgccggattcggaggtcgtggcggaggagagcgagtctgaggtgacgtccgagatggcggacgacagcgccgaggcgacggagatgccggtcgccgcggagcacagcggcggcattgaggtgaatgcggcggctgagacggttgccgatatggaggtggacgggggcaaagctgacagcgaggcggtgccagaagcggtgaaggaatccgaaaataagcaggacgacgggcacattaacggcgaccagacggaagtctccaatgagggcgaatgggagatggtggcggatgaagcggagcctacaactgcggcgacgggttccaccgaggcgcccccgcagacaccgatgacgagcgaggtgatgaggccgacagtggaggccggagctgccgacagcgccctggacactcggaaggttatggagatggtcgcggccctgtgcgagcagaacgcgcagcagtgcgcggtgatcggggctctggcggagcgcgtggacgcgcttgagcgcgccgtgcggcgggtggaggacgccgagcgccgccgccggcggggcaagaagctgaagaaggatgggaaggggagcaataggtgctacaccgattgaggacagctctgcttcttatttgtttttacatggttagaccaggaaccttcacgagctgtagaatttagttcttgttggccaaaaaaaaaaaaaaaaaggcttggcg

SEQ ID NO: 36214 - protein, 397 aa, Zea mays subsp. mays
MASRRFFYDDPYDYYYTSPYHYAYPYYRYQHPDPSRGVGGFFPAAAEAAPEAVKVDPRPRVESSRSVSVPVRFVGSDPEPVRGAARMPPAAVPRKRAPSAEAAAVLLQAAVRGFMARKSVRAVREVEREAAEVGEKVAREAEALRGDARARIAVGEALMKMLLRLDAVRGAREYRKRVTKRVLALQDAVDALEPKPTPDSEVVAEESESEVTSEMADDSAEATEMPVAAEHSGGIEVNAAAETVADMEVDGGKADSEAVPEAVKESENKQDDGHINGDQTEVSNEGEWEMVADEAEPTTAATGSTEAPPQTPMTSEVMRPTVEAGAADSALDTRKVMEMVAALCEQNAQQCAVIGALAERVDALERAVRRVEDAERRRRRGKKLKKDGKGSNRCYTD

SEQ ID NO: 36215 - protein, 311 aa, Zea mays subsp. mays
MPPAAVPRKRAPSAEAAAVLLQAAVRGFMARKSVRAVREVEREAAEVGEKVAREAEALRGDARARIAVGEALMKMLLRLDAVRGAREYRKRVTKRVLALQDAVDALEPKPTPDSEVVAEESESEVTSEMADDSAEATEMPVAAEHSGGIEVNAAAETVADMEVDGGKADSEAVPEAVKESENKQDDGHINGDQTEVSNEGEWEMVADEAEPTTAATGSTEAPPQTPMTSEVMRPTVEAGAADSALDTRKVMEMVAALCEQNAQQCAVIGALAERVDALERAVRRVEDAERRRRRGKKLKKDGKGSNRCYTD

SEQ ID NO: 36216 - protein, 283 aa, Zea mays subsp. mays
MARKSVRAVREVEREAAEVGEKVAREAEALRGDARARIAVGEALMKMLLRLDAVRGAREYRKRVTKRVLALQDAVDALEPKPTPDSEVVAEESESEVTSEMADDSAEATEMPVAAEHSGGIEVNAAAETVADMEVDGGKADSEAVPEAVKESENKQDDGHINGDQTEVSNEGEWEMVADEAEPTTAATGSTEAPPQTPMTSEVMRPTVEAGAADSALDTRKVMEMVAALCEQNAQQCAVIGALAERVDALERAVRRVEDAERRRRRGKKLKKDGKGSNRCYTD

SEQ ID NO: 36217 - DNA, 1063 bp, Zea mays subsp. mays
cacgcgattctcgactcccctccacccatacgtaacacgttctcctcccacgcccccactaaaacagatgccttcgcccttcgtgcgccacaacggaaaacccaccactcgcgagcaagtgcaggcaccgttgcccatccatcgttcatgatcccagcctgcctccgcggcctctgcacctgcttcgacgtggacgacgacaaggctaacaaccacgagcaagagccgacgatggccgccgccgccgccgctacaggcagcgccgacgacgaccagacggcaagcaccatcacccaccgcaccgtggagctgagcaccggcgtgcgcctgcacgtggcggaggccggcggcgcggcggcaacagcagcaggaggcgcgcccgcggtgctgctgctgcacggcttcccggagctgtggtacacctggcgccaccagatgcgggcgctggccgcggccgggtaccgcgccgtggcgccggacctgcgcgggtacggcggctccgacgcgccggcggtgggcggcggcgacgacgacgacgacccggccgcgcagtacaccgcgctgcacgtggtgggggacctggtggcgctcctcgacgcgctcggcgagagccaggtgttcgtggcggcgcacgactggggcgcgctcgtggcctggagcctctgcctgttccggcccgaccgggtgcgcgcgctcgtcgcgctcagcgtcgcctacacgccccgcagcgccgcgcggaagccagtcgacggcctccgggcgctcttcggcgacgactactacatctgccggatccaggagcccggggaaatagaagcagaatttgctgcagagtggtgtcttcgcccaaggatgggaagagcggggagaagacgatgaccatcgatgtaggcgtatgcagggaaggcgagttcagccaagtagcaggagcatgagcttttattagagatagatgaagataggaagatttcaaattcttttcttcttcctttttcttgtacgagtccgttcctcggagagtatgaacttgtctcgtttcaaatcccaccttttttgtttaaac

SEQ ID NO: 36218 - protein, 292 aa, Zea mays subsp. mays
HAILDSPPPIRNTFSSHAPTKTDAFALRAPQRKTHHSRASAGTVAHPSFMIPACLRGLCTCFDVDDDKANNHEQEPTMAAAAAATGSADDDQTASTITHRTVELSTGVRLHVAEAGGAAATAAGGAPAVLLLHGFPELWYTWRHQMRALAAAGYRAVAPDLRGYGGSDAPAVGGGDDDDDPAAQYTALHVVGDLVALLDALGESQVFVAAHDWGALVAWSLCLFRPDRVRALVALSVAYTPRSAARKPVDGLRALFGDDYYICRIQEPGEIEAEFAAEWCLRPRMGRAGRRR

SEQ ID NO: 36219 - protein, 243 aa, Zea mays subsp. mays
MIPACLRGLCTCFDVDDDKANNHEQEPTMAAAAAATGSADDDQTASTITHRTVELSTGVRLHVAEAGGAAATAAGGAPAVLLLHGFPELWYTWRHQMRALAAAGYRAVAPDLRGYGGSDAPAVGGGDDDDDPAAQYTALHVVGDLVALLDALGESQVFVAAHDWGALVAWSLCLFRPDRVRALVALSVAYTPRSAARKPVDGLRALFGDDYYICRIQEPGEIEAEFAAEWCLRPRMGRAGRRR

SEQ ID NO: 36220 - protein, 215 aa, Zea mays subsp. mays
MAAAAAATGSADDDQTASTITHRTVELSTGVRLHVAEAGGAAATAAGGAPAVLLLHGFPELWYTWRHQMRALAAAGYRAVAPDLRGYGGSDAPAVGGGDDDDDPAAQYTALHVVGDLVALLDALGESQVFVAAHDWGALVAWSLCLFRPDRVRALVALSVAYTPRSAARKPVDGLRALFGDDYYICRIQEPGEIEAEFAAEWCLRPRMGRAGRRR

SEQ ID NO: 36221 - DNA, 2703 bp, Zea mays subsp. mays
attacctagaacatcctaatcgaaaaacatatcccgtgctcgtgcggtcgtgcccccactccctggcatagcacgcgatggccaccgactgctcgacgcaattctccagccgctgatcgcgccgcaccctttcccacccgcgcccatcatggcctcctccctccccgcgccgccggcctcgccctcttcctcctggcgcggactcacgccccgctgccctccgcctcgctgcggtcccctcctcgcctgcgcggcagcgcgttcttaccgttaccgcttccgaaccgacgacgacggcgtggtggacgtggccgtcgccgggaaagacggcgatgcggggtatgtggtcgctatcgaggctcctacccatggacagaggggcggtcttgtgctccgccccgccggctccggctccggcgtccctctggccccagccgcgccgggaggtgccctcgtggctgagttgtcctacgacgtggcccgcgcgccgttccacgtctcgttcacgctggccgacgcgatgggagcggagatacggacacaccgcgggacgagcttccgcgtgcctgttggcgtcggacggggctgcccctcgccgctcggcctgtcccagtccaaggatggggccgctaacttcgcggtttacagcaagatcgccaagggcatggtgctctgcctcttcggtggtggcggcggggacggacccgcgctggagattgagctcgacccgtacgtccaccggaccggcgatgtctggcacgtctcgatggagagcgtggaggggtacgcccgctacggcttccgcagcgggctgttcgcaatgtttggcattgaccgcccgctactcgacccgtacgccaaggtgatcggggacttcgtcgctggcgactctgttgatgaggatgggctagctgtgccatccataaggtgtctcgcgtccttgaagaatgcacccaactacgattggggcagggacaagcacccatgcttgccattggagaagctggtggtctaccgggcaaatgtggctttgttcaccaaggataggtcgagtcggctggcagacaatgccgctggtactttctccggcatgtctgcaaaggtggaacacttcaggcatcttggtgtcaatgcagttttgctggagccagttttcccattccaccaagtgaagggaccatattttccataccattttttttcacctatgagcttgtatagcagtgaatgctccagtgtttcagctatcaagtctatgaaggatatggtcaaaacaatgcacagaaatggaatagaggttctcttggaggttgttttcactcatactgctgaaggaggggcggagtgtcagatgatatcacttcgaggcatcgatggttcctcgtactacattgccgatggaatcgctggatgcaaggcaagtgtgttgaattgcaaccatccagtgactcagaggctgattttggacagcctccgccattgggtgctcgacttccatgttgatgggttctgcttcatcaatgctcctttcctcgtcagaggtccaggtggtgagggcctctcacggcctccacttctggaagccatagcatttgatcctgttctttcaaagactaagatcattgcagatccttggtctccgcttgacatatctaatgtgcaatttccattccctcattggaaaagatgggctgagatgaacacaagattctctatggatgtgcgcaagtttcttaagggagaagcacttatcagtgatcttgctacacgtttgtgtggcagtggggacttattttcctcaaggggcccagcattttcgttcaattatgtatccaggaattctggactcactcttgttgatctagtgagcttcagcagtgatgagcttgcttctgagttcagctggaattgtggtgaagaaggaccatcggagaacaacgcagtccttcaaaccaggctaagacagatacgcaacttcttgtttattctattcatttcccttggtattcctgttcttaacatgggggatgaatgtggaaactcagctgctggttcaacatcatacaaggatagagggcctctgaactggaaagccttgaagaccgcttttgttaaggaagttaccgggtttatttcgtttctatctgcactaaggagtcgacgagcagacattttccagagatgcgagtttctaaaacttgaaaatatacattggtatgggagtgatttatctgagccatgttgggaggatcctactagcaactttctttgcctgcacataaatgcagagctggacgagaagctaccagattcgactggaggtgatttgtatatctgtttcaatgcaaacgaggagtcagcgagtgctactttaccagctattgcagaaggatccatgtggctgcgcttggttgatacatcacttgcatttccaggtttcttttccagagggtctagtcatgaaacacaccaggtgctaggattttcctcatatcaagtgaaggcacatagctgtgttttgttcgaatccaagagggttctttcatagtttgtgatgtcaaacatgaagctcgtgtggtttcagcaataattaggaactttgtggttactatattactatctaattttaggaggccctcagttccaataaattgccaattgtagatggaatgtttatgataataaagttcctcattttcatag

SEQ ID NO: 36222 - protein, 799 aa, Zea mays subsp. mays
MASSLPAPPASPSSSWRGLTPRCPPPRCGPLLACAAARSYRYRFRTDDDGVVDVAVAGKDGDAGYVVAIEAPTHGQRGGLVLRPAGSGSGVPLAPAAPGGALVAELSYDVARAPFHVSFTLADAMGAEIRTHRGTSFRVPVGVGRGCPSPLGLSQSKDGAANFAVYSKIAKGMVLCLFGGGGGDGPALEIELDPYVHRTGDVWHVSMESVEGYARYGFRSGLFAMFGIDRPLLDPYAKVIGDFVAGDSVDEDGLAVPSIRCLASLKNAPNYDWGRDKHPCLPLEKLVVYRANVALFTKDRSSRLADNAAGTFSGMSAKVEHFRHLGVNAVLLEPVFPFHQVKGPYFPYHFFSPMSLYSSECSSVSAIKSMKDMVKTMHRNGIEVLLEVVFTHTAEGGAECQMISLRGIDGSSYYIADGIAGCKASVLNCNHPVTQRLILDSLRHWVLDFHVDGFCFINAPFLVRGPGGEGLSRPPLLEAIAFDPVLSKTKIIADPWSPLDISNVQFPFPHWKRWAEMNTRFSMDVRKFLKGEALISDLATRLCGSGDLFSSRGPAFSFNYVSRNSGLTLVDLVSFSSDELASEFSWNCGEEGPSENNAVLQTRLRQIRNFLFILFISLGIPVLNMGDECGNSAAGSTSYKDRGPLNWKALKTAFVKEVTGFISFLSALRSRRADIFQRCEFLKLENIHWYGSDLSEPCWEDPTSNFLCLHINAELDEKLPDSTGGDLYICFNANEESASATLPAIAEGSMWLRLVDTSLAFPGFFSRGSSHETHQVLGFSSYQVKAHSCVLFESKRVLS

SEQ ID NO: 36223 - protein, 675 aa, Zea mays subsp. mays
MGAEIRTHRGTSFRVPVGVGRGCPSPLGLSQSKDGAANFAVYSKIAKGMVLCLFGGGGGDGPALEIELDPYVHRTGDVWHVSMESVEGYARYGFRSGLFAMFGIDRPLLDPYAKVIGDFVAGDSVDEDGLAVPSIRCLASLKNAPNYDWGRDKHPCLPLEKLVVYRANVALFTKDRSSRLADNAAGTFSGMSAKVEHFRHLGVNAVLLEPVFPFHQVKGPYFPYHFFSPMSLYSSECSSVSAIKSMKDMVKTMHRNGIEVLLEVVFTHTAEGGAECQMISLRGIDGSSYYIADGIAGCKASVLNCNHPVTQRLILDSLRHWVLDFHVDGFCFINAPFLVRGPGGEGLSRPPLLEAIAFDPVLSKTKIIADPWSPLDISNVQFPFPHWKRWAEMNTRFSMDVRKFLKGEALISDLATRLCGSGDLFSSRGPAFSFNYVSRNSGLTLVDLVSFSSDELASEFSWNCGEEGPSENNAVLQTRLRQIRNFLFILFISLGIPVLNMGDECGNSAAGSTSYKDRGPLNWKALKTAFVKEVTGFISFLSALRSRRADIFQRCEFLKLENIHWYGSDLSEPCWEDPTSNFLCLHINAELDEKLPDSTGGDLYICFNANEESASATLPAIAEGSMWLRLVDTSLAFPGFFSRGSSHETHQVLGFSSYQVKAHSCVLFESKRVLS

SEQ ID NO: 36224 - protein, 627 aa, Zea mays subsp. mays
MVLCLFGGGGGDGPALEIELDPYVHRTGDVWHVSMESVEGYARYGFRSGLFAMFGIDRPLLDPYAKVIGDFVAGDSVDEDGLAVPSIRCLASLKNAPNYDWGRDKHPCLPLEKLVVYRANVALFTKDRSSRLADNAAGTFSGMSAKVEHFRHLGVNAVLLEPVFPFHQVKGPYFPYHFFSPMSLYSSECSSVSAIKSMKDMVKTMHRNGIEVLLEVVFTHTAEGGAECQMISLRGIDGSSYYIADGIAGCKASVLNCNHPVTQRLILDSLRHWVLDFHVDGFCFINAPFLVRGPGGEGLSRPPLLEAIAFDPVLSKTKIIADPWSPLDISNVQFPFPHWKRWAEMNTRFSMDVRKFLKGEALISDLATRLCGSGDLFSSRGPAFSFNYVSRNSGLTLVDLVSFSSDELASEFSWNCGEEGPSENNAVLQTRLRQIRNFLFILFISLGIPVLNMGDECGNSAAGSTSYKDRGPLNWKALKTAFVKEVTGFISFLSALRSRRADIFQRCEFLKLENIHWYGSDLSEPCWEDPTSNFLCLHINAELDEKLPDSTGGDLYICFNANEESASATLPAIAEGSMWLRLVDTSLAFPGFFSRGSSHETHQVLGFSSYQVKAHSCVLFESKRVLS

SEQ ID NO: 36225 - DNA, 461 bp, Zea mays subsp. mays
atttgtgatgccagcgaagtatggttccaatttgcctcgcccaaaagatccttctgtgactatcaaggaggtgcccagcaaaatagttgccgttgcagccttttcaggtttggttactgatgatgatataaaccagagggagtctaaattgcgcgaatctctccgtaaagatgccacgtttagagtgaaagatgattcggtggtggaagtcgcacagtacaatccacctttcacacttccattcacaaggagaaatgaaatagcattggaggttgagaggaacgatatagccttatgatgtcctagattaacaaataaattattggcatttgagagtgtatgcaaatgcccatcgtccctaatgcatatatgtactaatttctatctggcatgttatgtatatatatagacatgttaattatcgcatgcatatattattgtattggaaattaaataataag

SEQ ID NO: 36226 - protein, 98 aa, Zea mays subsp. mays
FVMPAKYGSNLPRPKDPSVTIKEVPSKIVAVAAFSGLVTDDDINQRESKLRESLRKDATFRVKDDSVVEVAQYNPPFTLPFTRRNEIALEVERNDIAL

SEQ ID NO: 36227 - protein, 96 aa, Zea mays subsp. mays
MPAKYGSNLPRPKDPSVTIKEVPSKIVAVAAFSGLVTDDDINQRESKLRESLRKDATFRVKDDSVVEVAQYNPPFTLPFTRRNEIALEVERNDIAL

SEQ ID NO: 36228 - DNA, 478 bp, Zea mays subsp. mays
gttcctgcggatgaggagcaaacagcctgtgcattatgtcaagagccatttgaagatttctacagtgatgagactgatgagtggatgtatagaggtgcggtctacatgaatgcaccagacggtaatattgatggtctagaaaggtcacggttgggacctattgtccatgctaaatgtcgatctgggcccagcaatacttagggtgggcatggctggtgagtatctatctatttccttgtgctataacaaacatctatggactttaaggtggacataatgttttttagagctagtttgggaacctcattttcccaagggattttcattttcccaagggaaattgtatcttgaggttaaccccactgtaaatagaggatagtctccttgctagtatttggctgtatgcaacatgtttttggctacgattatatatgttatctgactaaataaaaatgctggatgtgagttgttgttcatt

SEQ ID NO: 36229 - protein, 66 aa, Zea mays subsp. mays
VPADEEQTACALCQEPFEDFYSDETDEWMYRGAVYMNAPDGNIDGLERSRLGPIVHAKCRSGPSNT

SEQ ID NO: 36230 - protein, 38 aa, Zea mays subsp. mays
MYRGAVYMNAPDGNIDGLERSRLGPIVHAKCRSGPSNT

SEQ ID NO: 36231 - protein, 36 aa, Zea mays subsp. mays
MLNVDLGPAILRVGMAGEYLSISLCYNKHLWTLRWT

SEQ ID NO: 36232 - DNA, 188 bp, Zea mays subsp. mays
tttatttaacctgattcactcaagtacatttttctgcagtgatgaaaacaagagaagttcatcagttgttctttatgaagatgcatcaaagaaactgcttcaacagtttacttctgcgctttgtggatgccagcagatgttccatgcatgttcttctattagtacattgatatgctcagagggatctc

SEQ ID NO: 36233 - protein, 62 aa, Zea mays subsp. mays
LFNLIHSSTFFCSDENKRSSSVVLYEDASKKLLQQFTSALCGCQQMFHACSSISTLICSEGS

SEQ ID NO: 36234 - protein, 42 aa, Zea mays subsp. mays
MKTREVHQLFFMKMHQRNCFNSLLLRFVDASRCSMHVLLLVH

SEQ ID NO: 36235 - protein, 31 aa, Zea mays subsp. mays
MKMHQRNCFNSLLLRFVDASRCSMHVLLLVH

SEQ ID NO: 36236 - DNA, 934 bp, Zea mays subsp. mays
agtccatgacaaggggctcggttagtccacagccctagaggctgcagctgcacacttctcttctctgttttcgccggttaaactttccccacttgttgctggccttcgaatctgtggtttgtttgagcttagcagggaagcgaagaacagggaagcaaggacatggatgctttcagtgcagtgatggacaaggtaaagagccacccagaaatgatggagaaggtcagtgcagtgatggacaaggtgaagaagagccacccagaagcggtggaaaaggtcaaggacgaggtgatgagccttgctgatgctctccatctgcgtagacatggatccaaagataaagaacctgagtctgaagagaaggccgaagaaggcgaggcagcgcagagcgtcgaagaggaggagggtacctctgctgacaagactgcagaacctaatgtgttggagcaggccgtacaggagattcaggctgtcgccgcagctttgcagcagacagcacctgaaactgaaactgaaattccagttgagactgctgctgctgctcctgaaacttcggctgaaggagacaagcctgaagacacaatcagggaggtggagaaagatgacccaaagaagcggctcgatttcgccgggttcttcgccatgctgtttgagaggttctgctccccggccaacaagaagaaagactgagtgattgcaggtcagctgtggatttctcgttttgtgatcttggacgtggaaattacattttacttgatgtatttattgtgggtggtgtacagtctgcacttgtgttctattaagataaatctgctcttgctttttttactttcttttgtgatgacagggcaatgattacattttacttgatgtatttattgtcgcccttgtggaattgatttaatttatgtgaacgattgatttatttagggtt

SEQ ID NO: 36237 - protein, 175 aa, Zea mays subsp. mays
MDAFSAVMDKVKSHPEMMEKVSAVMDKVKKSHPEAVEKVKDEVMSLADALHLRRHGSKDKEPESEEKAEEGEAAQSVEEEEGTSADKTAEPNVLEQAVQEIQAVAAALQQTAPETETEIPVETAAAAPETSAEGDKPEDTIREVEKDDPKKRLDFAGFFAMLFERFCSPANKKKD

SEQ ID NO: 36238 - protein, 168 aa, Zea mays subsp. mays
MDKVKSHPEMMEKVSAVMDKVKKSHPEAVEKVKDEVMSLADALHLRRHGSKDKEPESEEKAEEGEAAQSVEEEEGTSADKTAEPNVLEQAVQEIQAVAAALQQTAPETETEIPVETAAAAPETSAEGDKPEDTIREVEKDDPKKRLDFAGFFAMLFERFCSPANKKKD

SEQ ID NO: 36239 - protein, 159 aa, Zea mays subsp. mays
MMEKVSAVMDKVKKSHPEAVEKVKDEVMSLADALHLRRHGSKDKEPESEEKAEEGEAAQSVEEEEGTSADKTAEPNVLEQAVQEIQAVAAALQQTAPETETEIPVETAAAAPETSAEGDKPEDTIREVEKDDPKKRLDFAGFFAMLFERFCSPANKKKD

SEQ ID NO: 36240 - DNA, 1507 bp, Zea mays subsp. mays
tcagctacgtaggccccccccccacctgctctgctcctcagccccagcccaggccttcgctctcgctgccctgagccctccgcgttccccgcccgccacgcgatgccggcgtgggccgaagcggcgctcgtgctcgcctcaccatcccccgccaccgcctcctcgaccacgtcatcatgtggcgccaggccgcgcgccgccgtggggtccgtcaggctcttctgcaagggattcccttgtagcattcgttccaaagctggattccagattcataattaccgtacaaggatgtttaagattaaagcaaaagcagaatctggtgatggctacacacggcttgctccacttagatttgaatctccaagtggccagcttctgattcaaatactacaatcacaccctcatcttatccctgcaacagttgatcagcaacttggaaatcttcaatcagagaaatctgcccaaagtgaagaagcctcaaaagttccccaggacctcctctacaagagaattgcagaagtcaaagagaaggaaaggcaaaatgccttagaagagattatctactgttgggttacatataggttcatggaaaatgacatatatatgacacctgcattatcaccagggggtggccctgtacgtgacatatccgcattgcctaatcaagaagacaaattgcgaaacatacactccgcagacgcctttgagatgatacaaaaccatctcaatcttatcatgggagaaaagatagcatcaccgcccgatactgttgttgagatcagcaacttgaatcttggaaagctgtatgcagcatccatcatgtatggttactttctgaagagagtggatgagcgattccaacttgagaaaactatgaagactctcccaccaaagcccaaccagcagatagtatttgaaaacctacagcctaatccattctgggatatggagtccttagtacagattacacctgatggggaggagataagtttggacgatgaaaaatcaaatccaaacaagttgaggtcttatgtctcacaactggatgctgacacattgcaaagatatgctactatcagatcgaaggaagccgtctcactgatcgagaagcaaactcaggcgttgtttggacggccagacatcaaagtattggacgatggttcggtcaatgcaaaggatggcagaatgataacaatcacatttacagagctcaatcatctggtcttggaggcagttgctttcggttccttcctttgggaagctgagagttacgtagaatcaaaataccattttgtcaacagttgaatgtgccttttcttatttgaattttggaaatggtttgtgtacatgtgatagggtaggatccatatctgatctattttttcagtgtattcatggttcttgctcgctatcagtaacagccaaagcatcaccacccatgaaccatgcctgtaacaggtttgagatttttcatcaaaggaagcgggcctgatccatagtgtaatct

SEQ ID NO: 36241 - protein, 400 aa, Zea mays subsp. mays
MPAWAEAALVLASPSPATASSTTSSCGARPRAAVGSVRLFCKGFPCSIRSKAGFQIHNYRTRMFKIKAKAESGDGYTRLAPLRFESPSGQLLIQILQSHPHLIPATVDQQLGNLQSEKSAQSEEASKVPQDLLYKRIAEVKEKERQNALEEIIYCWVTYRFMENDIYMTPALSPGGGPVRDISALPNQEDKLRNIHSADAFEMIQNHLNLIMGEKIASPPDTVVEISNLNLGKLYAASIMYGYFLKRVDERFQLEKTMKTLPPKPNQQIVFENLQPNPFWDMESLVQITPDGEEISLDDEKSNPNKLRSYVSQLDADTLQRYATIRSKEAVSLIEKQTQALFGRPDIKVLDDGSVNAKDGRMITITFTELNHLVLEAVAFGSFLWEAESYVESKYHFVNS

SEQ ID NO: 36242 - protein, 338 aa, Zea mays subsp. mays
MFKIKAKAESGDGYTRLAPLRFESPSGQLLIQILQSHPHLIPATVDQQLGNLQSEKSAQSEEASKVPQDLLYKRIAEVKEKERQNALEEIIYCWVTYRFMENDIYMTPALSPGGGPVRDISALPNQEDKLRNIHSADAFEMIQNHLNLIMGEKIASPPDTVVEISNLNLGKLYAASIMYGYFLKRVDERFQLEKTMKTLPPKPNQQIVFENLQPNPFWDMESLVQITPDGEEISLDDEKSNPNKLRSYVSQLDADTLQRYATIRSKEAVSLIEKQTQALFGRPDIKVLDDGSVNAKDGRMITITFTELNHLVLEAVAFGSFLWEAESYVESKYHFVNS

SEQ ID NO: 36243 - protein, 239 aa, Zea mays subsp. mays
MENDIYMTPALSPGGGPVRDISALPNQEDKLRNIHSADAFEMIQNHLNLIMGEKIASPPDTVVEISNLNLGKLYAASIMYGYFLKRVDERFQLEKTMKTLPPKPNQQIVFENLQPNPFWDMESLVQITPDGEEISLDDEKSNPNKLRSYVSQLDADTLQRYATIRSKEAVSLIEKQTQALFGRPDIKVLDDGSVNAKDGRMITITFTELNHLVLEAVAFGSFLWEAESYVESKYHFVNS

SEQ ID NO: 36244 - DNA, 873 bp, Zea mays subsp. mays
cagctacgtaggccccccccccggtgtctatggaaagcctgcaaatgaagattttgaggcagataatgcccactggaaacgggttgtaagtaaatcgtatgtgaatggcatgggaattgactggtccaaagtgagaaatgtcatggacatgagagctgtctatggaggttttgctgcagctctgagggaccaaaaggtctgggtcatgaatatcgtgccgatcgattcaccagacacgctgcccatcatctacgagcgcggtttgtttggcatgtaccatgactggtgcgagtctttcagcacttacccaagaacgtatgaccttctgcacgcggaccatctgttctcaaagctcagaaagagatgcaaactggctgcagttttcgccgaggtcgaccgtgtactgaggccacagggcaagctgatcgtgagggacaccgcggacacgataaatgagctggagagcatggccaagtccgtgcagtgggaggtgcggatgacctacaccaagggcagcgagggcctgctctgcgtcgagaagtcgatgtggcggcccaaagaactcgacgctagcacgtgaactgtgttgaggaggaactgctaccacgtaggggtgaaattagaggaattttgtcttctagatatgcgtatggctcttgttggtgctgaaaggaccagaaaatatttggtgtaactgtagaacaatacatctgttttttctgccgtttgttttcgtttttgttttttcacaacgttgctgtaagttagtgctggaaatcacaggtacattcagttctactgggcacgttgttggcttgtcggatagcagtcgaacgatcttgtgctgcatatgttatatttgaactgttgtgc

SEQ ID NO: 36245 - protein, 192 aa, Zea mays subsp. mays
SYVGPPPGVYGKPANEDFEADNAHWKRVVSKSYVNGMGIDWSKVRNVMDMRAVYGGFAAALRDQKVWVMNIVPIDSPDTLPIIYERGLFGMYHDWCESFSTYPRTYDLLHADHLFSKLRKRCKLAAVFAEVDRVLRPQGKLIVRDTADTINELESMAKSVQWEVRMTYTKGSEGLLCVEKSMWRPKELDAST

SEQ ID NO: 36246 - protein, 156 aa, Zea mays subsp. mays
MGIDWSKVRNVMDMRAVYGGFAAALRDQKVWVMNIVPIDSPDTLPIIYERGLFGMYHDWCESFSTYPRTYDLLHADHLFSKLRKRCKLAAVFAEVDRVLRPQGKLIVRDTADTINELESMAKSVQWEVRMTYTKGSEGLLCVEKSMWRPKELDAST

SEQ ID NO: 36247 - protein, 145 aa, Zea mays subsp. mays
MDMRAVYGGFAAALRDQKVWVMNIVPIDSPDTLPIIYERGLFGMYHDWCESFSTYPRTYDLLHADHLFSKLRKRCKLAAVFAEVDRVLRPQGKLIVRDTADTINELESMAKSVQWEVRMTYTKGSEGLLCVEKSMWRPKELDAST

SEQ ID NO: 36248 - DNA, 555 bp, Zea mays subsp. mays
atatcaaatggaaggcctggagacctggcaacaacatgctcaacaagcatatgaattgtttgacagggagggcaaccgaccgattgtgatcgaagaacttgcatcggagctcggacttggcccttcggttccacttcatgttgttctccaagactggatcagacattcagacggaaacctcagtttcctcggcttcataaaactattgcatggagtttcttcacgcacaatccctaaagtccaagataaccgtttgcattgaccaatccctaatctcagggccagtgcatgccatgtctggctgtagaagttgcatgagaccatcagaccagtacaaagattaacagatcaggttagggtaagaggtaaaattctctcagtagttgtatatttgctccgcccttgtcctcaagatgttaagaggaatgtacagatttggtttgggaagaatggaaaggctaaaggatttggggctgttttttttttgcttgtttgttccagtaacacaggtattgcatttcttcttcttaatataatgatgtgtagctctcctgc

SEQ ID NO: 36249 - protein, 86 aa, Zea mays subsp. mays
YQMEGLETWQQHAQQAYELFDREGNRPIVIEELASELGLGPSVPLHVVLQDWIRHSDGNLSFLGFIKLLHGVSSRTIPKVQDNRLH

SEQ ID NO: 36250 - protein, 84 aa, Zea mays subsp. mays
MEGLETWQQHAQQAYELFDREGNRPIVIEELASELGLGPSVPLHVVLQDWIRHSDGNLSFLGFIKLLHGVSSRTIPKVQDNRLH

SEQ ID NO: 36251 - protein, 44 aa, Zea mays subsp. mays
MEFLHAQSLKSKITVCIDQSLISGPVHAMSGCRSCMRPSDQYKD

SEQ ID NO: 36252 - DNA, 461 bp, Zea mays subsp. mays
gcttttatagcaaccggctggtgtgtcttgtgtctggccgyaacatggaasagggtagtgaaagtccttgggctatgggattcagtccgtgagattgcaaggatgtacgatgcaggaatgggagccatcatctttgtgcccatcgtcgtcttctcatggttccccttcgtgtcaacattccagtcacgtttcctcttcaatcaagcgtttagtcgaggtctggagatctccctcatccttgcagggaacaaggcgaatcagcagatttgaaaggccctgccgcatccatcgtatttttctgktgtatattctgggaattactgagagctgcttarttagtttgaacaatttaatgagctcgatttgaatgacaaccttctacataattgcccctgtaatttgtacactaattatgcggagargcagctacggcagtaragatgarctgatgtatgtcgatt

SEQ ID NO: 36253 - protein, 89 aa, Zea mays subsp. mays
  misc_feature (14)..(14): Xaa can be any naturally occurring amino acid
  misc_feature (17)..(17): Xaa can be any naturally occurring amino acid
AFIATGWCVLCLAXTWXRVVKVLGLWDSVREIARMYDAGMGAIIFVPIVVFSWFPFVSTFQSRFLFNQAFSRGLEISLILAGNKANQQI

SEQ ID NO: 36254 - protein, 85 aa, Zea mays subsp. mays
  misc_feature (65)..(65): Xaa can be any naturally occurring amino acid
  misc_feature (76)..(76): Xaa can be any naturally occurring amino acid
MQEWEPSSLCPSSSSHGSPSCQHSSHVSSSIKRLVEVWRSPSSLQGTRRISRFERPCRIHRIFLXYILGITESCLXSLNNLMSSI

SEQ ID NO: 36255 - protein, 55 aa, Zea mays subsp. mays
MYDAGMGAIIFVPIVVFSWFPFVSTFQSRFLFNQAFSRGLEISLILAGNKANQQI

SEQ ID NO: 36256 - DNA, 1056 bp, Zea mays subsp. mays
agctgtcttgttcctccgtccgggaggacgaggaggaggaggcgcatccctccatcctctgcgactgcgtgcgtctctcgagctcgagtcgattgatgattcatcttcctagtctcgtctccgcgccattctccaaatccatctatcgtcaccatcccgatcccagccccagacccgatgcagcaacagcaggacccagcacccgccgatcccgacccactgccgccccccgacctcggtgatgccgccgcctcgtccgcaacgcagacgatcccttcccgcaacgcctcctccaagtacgatttcgtcaaggtcaaggtctggctcggggagaacgccgaccactactacgtcctctccaggttcctcctcagcaggatgctcacagtcaccaagattcctaatcatgtcgccatcaagattgcccttgagctcaagaagctgcttgtcgacaacagcctgcttgatgtatcccagagtgatctagaggctaatctgttcaagcttatggaaaaacggggatacggagaggagtatataaatcgctataaaatgatgacaaggttccatcatcaacgggttccactagtaattttggtgtgtggaactgcctgtactggaaaatcaacaatcgctacacaacttgctcagaggctcaatttgcctaatgttttgcagacggacatggtgtatgagctgctgcggacatcaacagatgcgccacttacttcagttcctgtgtgggctcgcgattttaattcacctgaagagcttatcactgaattctgcagagaatgcagagttgtacgcaagggtttggctggcgatttgaagaaggccatgaaagatgggaaaccaattattatagagggaatacatttggatccaagcatttatcttatggatgaggaaaagagtgatggtaattccaggacggagaagacagtaacagattctgaaaatccaggcatctctgtagaaaggaaggttgaacatcaattcaaaaatggactagcagagaacagaatggattctactgaggacaacaaaaacttc

SEQ ID NO: 36257 - protein, 293 aa, Zea mays subsp. mays
MQQQQDPAPADPDPLPPPDLGDAAASSATQTIPSRNASSKYDFVKVKVWLGENADHYYVLSRFLLSRMLTVTKIPNHVAIKIALELKKLLVDNSLLDVSQSDLEANLFKLMEKRGYGEEYINRYKMMTRFHHQRVPLVILVCGTACTGKSTIATQLAQRLNLPNVLQTDMVYELLRTSTDAPLTSVPVWARDFNSPEELITEFCRECRVVRKGLAGDLKKAMKDGKPIIIEGIHLDPSIYLMDEEKSDGNSRTEKTVTDSENPGISVERKVEHQFKNGLAENRMDSTEDNKNF

SEQ ID NO: 36258 - protein, 226 aa, Zea mays subsp. mays
MLTVTKIPNHVAIKIALELKKLLVDNSLLDVSQSDLEANLFKLMEKRGYGEEYINRYKMMTRFHHQRVPLVILVCGTACTGKSTIATQLAQRLNLPNVLQTDMVYELLRTSTDAPLTSVPVWARDFNSPEELITEFCRECRVVRKGLAGDLKKAMKDGKPIIIEGIHLDPSIYLMDEEKSDGNSRTEKTVTDSENPGISVERKVEHQFKNGLAENRMDSTEDNKNF

SEQ ID NO: 36259 - protein, 183 aa, Zea mays subsp. mays
MEKRGYGEEYINRYKMMTRFHHQRVPLVILVCGTACTGKSTIATQLAQRLNLPNVLQTDMVYELLRTSTDAPLTSVPVWARDFNSPEELITEFCRECRVVRKGLAGDLKKAMKDGKPIIIEGIHLDPSIYLMDEEKSDGNSRTEKTVTDSENPGISVERKVEHQFKNGLAENRMDSTEDNKNF

SEQ ID NO: 36260 - DNA, 615 bp, Zea mays subsp. mays
cagctacgtaggccccccccccaataatggatttttcgagattgtatgaagtgtcaaatactgtagatgagcatagagatatgcgtctagatatagacagcatgacgtatgaggagcttttagcattagaagagcagattggagatgtcaatactggtctgacaaaaagtcacattgtagataaattgaggactagcctatatgttccaggaatatcgagcatgtctgatcagccatctaaatcttctctagagaatgatgcttgcataatatgccaggaggagtaccaggctagagactgcgttggcacccttgactgcggtcacaggtaccacgcggagtgcgtgaagcagtggctgatggtgaagaacttgtgccccatctgcaagacgacagcattgtctgccaacagaagacaaggacagtgagcgggaatggagaagcctgttggttatttgctttgacaaacgttcagctcaattttgtatataaagaagtggtagacaatggcgctacctgtatttgttgttcactttgttgtgactgggagtactcagcttcctgaaactgtacagccataacatttgttatttttcttcaaatgtagaatgtttt

SEQ ID NO: 36261 - protein, 133 aa, Zea mays subsp. mays
MDFSRLYEVSNTVDEHRDMRLDIDSMTYEELLALEEQIGDVNTGLTKSHIVDKLRTSLYVPGISSMSDQPSKSSLENDACIICQEEYQARDCVGTLDCGHRYHAECVKQWLMVKNLCPICKTTALSANRRQGQ

SEQ ID NO: 36262 - protein, 115 aa, Zea mays subsp. mays
MRLDIDSMTYEELLALEEQIGDVNTGLTKSHIVDKLRTSLYVPGISSMSDQPSKSSLENDACIICQEEYQARDCVGTLDCGHRYHAECVKQWLMVKNLCPICKTTALSANRRQGQ

SEQ ID NO: 36263 - protein, 108 aa, Zea mays subsp. mays
MTYEELLALEEQIGDVNTGLTKSHIVDKLRTSLYVPGISSMSDQPSKSSLENDACIICQEEYQARDCVGTLDCGHRYHAECVKQWLMVKNLCPICKTTALSANRRQGQ

SEQ ID NO: 36264 - DNA, 598 bp, Zea mays subsp. mays
cagctacgtaggccccccccccggtcttgctccgcagggcagtgagagggtctctaatttcctggagaaggctgcagaagggctggtagagggcggaaagaaggagatcttcacgccaatgtacttctttcttgttcggaagcctcttctggaatgagctcttggatcaccttttcagaaaaagaaggcaagtggtcatttcgaagaagccgaggagagggaacctggaatcaagaaaaccttcagctctcctgtgtaggaggaaagttaacgaacagtgtagtaactgttcagctttgtgtttattcagttgttttgctgcttgaggttattcgtttctaggtgggggttggaattcttttcgccataaacctctcagtggcataaataagatggtttgcataagagtacttcatggataccgtaagggctactgctgaaagagaaatgtttaagcagcatggtatgtgagcaactagtgataattgttccatcctttttttaatataaagcaggagttttgtcatgcgtcgtgtctctgcccacgtgtagcggcgccagtgaaatatataaaaattgttgctagcttggagatttg

SEQ ID NO: 36265 - protein, 62 aa, Zea mays subsp. mays
MSSWITFSEKEGKWSFRRSRGEGTWNQENLQLSCVGGKLTNSVVTVQLCVYSVVLLLEVIRF

SEQ ID NO: 36266 - protein, 51 aa, Zea mays subsp. mays
SYVGPPPGLAPQGSERVSNFLEKAAEGLVEGGKKEIFTPMYFFLVRKPLLE

SEQ ID NO: 36267 - DNA, 542 bp, Zea mays subsp. mays
atttttatggagatttgtagcatcattcaggcaaatgcaaatcgagatcatatagacatgaacttgtgaaatagctacacctaactatagacaggtttacataattacatgtacttcaagacacaccatactaatatatggtagagccagttctatcgcaagtttttagtcagttggatgctaatggaagctgcatccattagcacagttggtaaagcgtttttagtcagttgggatgctttgggagttgcatccagaaaggttcatatggcttgctgtctaatcacttttttcccttcagatgagcttgtgcctgctgactctacgccgaagctggacctgcaaagcgacaagaagaaaggttcccatacttgctgggcatatggtgcctatccatccctctgaattcactgcacctaacttcccggtaacctcatctgcttccaggaatccaagtgcagcttgacctgaagagcaatggggatggcccgcgcgggaagaaggcgcctgctgccaggtcaagarcaaccgggtcaggtggg

SEQ ID NO: 36268 - protein, 75 aa, Zea mays subsp. mays
MLMEAASISTVGKAFLVSWDALGVASRKVHMACCLITFFPSDELVPADSTPKLDLQSDKKKGSHTCWAYGAYPSL

SEQ ID NO: 36269 - protein, 73 aa, Zea mays subsp. mays
MEAASISTVGKAFLVSWDALGVASRKVHMACCLITFFPSDELVPADSTPKLDLQSDKKKGSHTCWAYGAYPSL

SEQ ID NO: 36270 - protein, 54 aa, Zea mays subsp. mays
MSLCLLTLRRSWTCKATRRKVPILAGHMVPIHPSEFTAPNFPVTSSASRNPSAA

SEQ ID NO: 36271 - DNA, 736 bp, Zea mays subsp. mays
atcggcctcctctctctcggtctccgccagatctccccacggaaccctacccgagcatcagccatggcaatcgcggcgcgcgccctgcgccgcctcccgcttcacctctccccctcgatctcccgctctttctgcgcagtttccccggccgccgcctcggcccccgccgccgcgtccgccaaggtcgctgaccgcatcgtgcgcgtcctcgccatccagggcagggcgcaggaggccggcgccgggggaggtgcaggtgccggcgctggcggcggcggcagggcttcctcgtaagcaagtcatccatgcatggattatggatagatgcgcgcgtgcgtgtctatcagtatcagcagccagcagggtcgtcgcggaatgctgtgttcctgtacgtgtgggtgaccgtccttccgtccttcgtctttctccccccgagtgtgtgttacgtatgtcctggtgttcgtcgtgtgtgttcatcgccgctccagttgaattccggtgtctgttcatcgccgctccaggtcgtagatgtgaatatactttgctaggggaataagtgataagtctgtctggaaggtaatgtttgagctttgctagtgtggctgggcactctggtcactggttgtgttgtgcatgcatcagctgtatgatcgtcgtctgttgtggaaaattggtcaatgtattctcttgctgaataatttgtgacatctaattgttatgtatcgtctctttgctc

SEQ ID NO: 36272 - protein, 184 aa, Zea mays subsp. mays
SASSLSVSARSPHGTLPEHQPWQSRRAPCAASRFTSPPRSPALSAQFPRPPPRPPPPRPPRSLTASCASSPSRAGRRRPAPGEVQVPALAAAAGLPRKQVIHAWIMDRCARACLSVSAASRVVAECCVPVRVGDRPSVLRLSPPECVLRMSWCSSCVFIAAPVEFRCLFIAAPGRRCEYTLLGE

SEQ ID NO: 36273 - protein, 97 aa, Zea mays subsp. mays
IGLLSLGLRQISPRNPTRASAMAIAARALRRLPLHLSPSISRSFCAVSPAAASAPAAASAKVADRIVRVLAIQGRAQEAGAGGGAGAGAGGGGRASS

SEQ ID NO: 36274 - DNA, 487 bp, Zea mays subsp. mays
ataattttgggcattaattgcacgtctcctccccacctctccttccctccacccgtgccgtcgcctcgcctatccgatctgccacctcctcccgtctcgcacgttccttcccaactccgcagcgtagcctctccgcggcgcgatccagatccaggtttttcagcatgggcctggtgaaggaaggcatcgacatggaggagggaacccttgagatcggcatggagtacaggactgtatctggtgttgctgggcctctggtcatattggataaagtaaagggcccaaagtaccaagaaattgtaaacatccgacttggagatggcaccaatcgccgtggtcaagtcctggaagttgatggcgaaaaagctgttgtgcaggtctttgaaggaacttctggaatagacaacaaatacacaaccgtgcagtttacaggcgaggttttgaaaactcctgtctcacttgatatgcttgggcgcatttttaatgg

SEQ ID NO: 36275 - protein, 107 aa, Zea mays subsp. mays
MGLVKEGIDMEEGTLEIGMEYRTVSGVAGPLVILDKVKGPKYQEIVNIRLGDGTNRRGQVLEVDGEKAVVQVFEGTSGIDNKYTTVQFTGEVLKTPVSLDMLGRIFN

SEQ ID NO: 36276 - protein, 98 aa, Zea mays subsp. mays
MEEGTLEIGMEYRTVSGVAGPLVILDKVKGPKYQEIVNIRLGDGTNRRGQVLEVDGEKAVVQVFEGTSGIDNKYTTVQFTGEVLKTPVSLDMLGRIFN

SEQ ID NO: 36277 - protein, 89 aa, Zea mays subsp. mays
MEYRTVSGVAGPLVILDKVKGPKYQEIVNIRLGDGTNRRGQVLEVDGEKAVVQVFEGTSGIDNKYTTVQFTGEVLKTPVSLDMLGRIFN

SEQ ID NO: 36278 - DNA, 1226 bp, Zea mays subsp. mays
agtgcgtgccagtcctccggcccaaaccccccgcacccaacccccagccccggcaaccgatggcggggtccgcggccgacgcggagcaggagcaaaagcgggcagcggcggcggcgtacgactacgagggcgacgcgcgctgggccgagtactggtccaacgtactcgtcccgccgaacctcgcctcccgccccgacgtcgtcgaccacttgaagcgcaagttctaccagcgctacatcgaccatgatctggtcgttgagccaaggtcattcaccagttccactcaggccagcaggccagatgtaaggtcttcgtcttcgtcatccaccgagaacgtcagggagcgtaattcaggatctactgcaaggtcagcgcctccaccaccgccaccaacacatacagacagtgccgtcaaccctttacggttcgacgcacgcactatacatttctccatcaacgcatggatacttgtggttgctggtctgggaatgcttcctattttgccaaaacaccttgccgacagagcttgcaaactttcacttctgggaacaatattgtcatcagggtattctctatacagtacttatgggaaaccaagagcatggaacatgccagcaattcaagcttggttgcagtctatacttgcaacaaaggattttatccatttaatgttctcttctatgctcttcacatcccaattgcacttgaagattgctgcactacctgtgttttgctgggcgcttgaccatgttgccagattcttaaggcgtaattttgcgcgatcctctttctataggagatacctggaagaaccttgtctttgggtagagacaaataacactacactaagcctccttagttcgaatgcggagattgccttgggttttcttctgatcatatcactgttctcgtggcgccgtagcatagttcagacattcatgtactggcaggtgttgaagctgatgtaccatgctcccgtgacatccagctatcaccagagtacctgggcgaaaatcggccggattgtgaacccgtacatccaccgctacgctccgttcctccagacgcccatttctgcgatccaaagatggtggttcaggtagagagacaggccgagctgcaaacatagcacagtcgagtcgccgcgttcttatgtaatgctgtaaccttttcccagaattctggagggccattatcataacaagaaggtttttagctgcagggcc

SEQ ID NO: 36279 - protein, 366 aa, Zea mays subsp. mays
CVPVLRPKPPAPNPQPRQPMAGSAADAEQEQKRAAAAAYDYEGDARWAEYWSNVLVPPNLASRPDVVDHLKRKFYQRYIDHDLVVEPRSFTSSTQASRPDVRSSSSSSTENVRERNSGSTARSAPPPPPPTHTDSAVNPLRFDARTIHFSINAWILVVAGLGMLPILPKHLADRACKLSLLGTILSSGYSLYSTYGKPRAWNMPAIQAWLQSILATKDFIHLMFSSMLFTSQLHLKIAALPVFCWALDHVARFLRRNFARSSFYRRYLEEPCLWVETNNTTLSLLSSNAEIALGFLLIISLFSWRRSIVQTFMYWQVLKLMYHAPVTSSYHQSTWAKIGRIVNPYIHRYAPFLQTPISAIQRWWFR

SEQ ID NO: 36280 - protein, 347 aa, Zea mays subsp. mays
MAGSAADAEQEQKRAAAAAYDYEGDARWAEYWSNVLVPPNLASRPDVVDHLKRKFYQRYIDHDLVVEPRSFTSSTQASRPDVRSSSSSSTENVRERNSGSTARSAPPPPPPTHTDSAVNPLRFDARTIHFSINAWILVVAGLGMLPILPKHLADRACKLSLLGTILSSGYSLYSTYGKPRAWNMPAIQAWLQSILATKDFIHLMFSSMLFTSQLHLKIAALPVFCWALDHVARFLRRNFARSSFYRRYLEEPCLWVETNNTTLSLLSSNAEIALGFLLIISLFSWRRSIVQTFMYWQVLKLMYHAPVTSSYHQSTWAKIGRIVNPYIHRYAPFLQTPISAIQRWWFR

SEQ ID NO: 36281 - protein, 204 aa, Zea mays subsp. mays
MLPILPKHLADRACKLSLLGTILSSGYSLYSTYGKPRAWNMPAIQAWLQSILATKDFIHLMFSSMLFTSQLHLKIAALPVFCWALDHVARFLRRNFARSSFYRRYLEEPCLWVETNNTTLSLLSSNAEIALGFLLIISLFSWRRSIVQTFMYWQVLKLMYHAPVTSSYHQSTWAKIGRIVNPYIHRYAPFLQTPISAIQRWWFR

SEQ ID NO: 36282 - DNA, 1035 bp, Zea mays subsp. mays
acatcctaatcgaaaaagaggaacccaaaccacctcggccggtcggcccacgggccacgacccaaaaaaggatcaaggtgggagaaacaaaacacaaggcggcgtccacagcttccccactccacgttccgtgtttccgactccggtgactccaccaccagcaacccgtgcagcgagcgcactccgaccatcgccatgtcgaggcgcggcgactgggtctacgagaacaacggcgggacctgcgtggccatcgccggcgctgattactgtgtcgtcgctgcggacacccgcctctctgtaggatacagtatcctcacgcgtgatcactccaagatctgcgacctggctgacaaatgtgtactggcatcttctggctttcaaggtgatattaaggctctgcagaagaacctagctgccagagaattgctgtaccaacaccagcataataaaaggatgagctgccccgccatggcacagctcctctccaataccctgtactacaagcgattcttcccatattacgccttcaatgtgctcggtgggcttgacagcgaggggaaaggatgcgttttcacctatgatgcagtaggttcctatgagagaaccggttacagtgctcagggaacgggatctactttgatcatgccagtcctggacaatcaactaaaatcaccaagtcctctattactccctgtcagggatgctgtcacaccattgtcggagtcagaggccatcgatctagttaaggacgtgttcgcatctgcaactgagagagacatctacactggagacaagttggaaattgtagtcattaacaaggccggtactatgcgcgagtatatcgacctgagaaaggattaagccaacacttcagttgtgctgcagctgtcatttgctttgaactttttttcctagtctggtgatttatgtctaaagctgttgcttcataggaacacttgtgtttacttgcatatgtaatgtacggtatgtaccaggattcagtgagttttttttctgttgaaacaaattgcttgg

SEQ ID NO: 36283 - protein, 221 aa, Zea mays subsp. mays
MSRRGDWVYENNGGTCVAIAGADYCVVAADTRLSVGYSILTRDHSKICDLADKCVLASSGFQGDIKALQKNLAARELLYQHQHNKRMSCPAMAQLLSNTLYYKRFFPYYAFNVLGGLDSEGKGCVFTYDAVGSYERTGYSAQGTGSTLIMPVLDNQLKSPSPLLLPVRDAVTPLSESEAIDLVKDVFASATERDIYTGDKLEIVVINKAGTMREYIDLRKD

SEQ ID NO: 36284 - protein, 135 aa, Zea mays subsp. mays
MSCPAMAQLLSNTLYYKRFFPYYAFNVLGGLDSEGKGCVFTYDAVGSYERTGYSAQGTGSTLIMPVLDNQLKSPSPLLLPVRDAVTPLSESEAIDLVKDVFASATERDIYTGDKLEIVVINKAGTMREYIDLRKD

SEQ ID NO: 36285 - protein, 130 aa, Zea mays subsp. mays
MAQLLSNTLYYKRFFPYYAFNVLGGLDSEGKGCVFTYDAVGSYERTGYSAQGTGSTLIMPVLDNQLKSPSPLLLPVRDAVTPLSESEAIDLVKDVFASATERDIYTGDKLEIVVINKAGTMREYIDLRKD

SEQ ID NO: 36286 - DNA, 434 bp, Zea mays subsp. mays
aaaaaaaaactcactcgacaaaaacaaatctccctaatttcagtcatgaaggcccaggtcgcagcagcaactgtcttggtcttgctcctcctgacctttgctgcggaggctcgtacgtgcatgtcgcgaagccaggaacagaaagggaggtgctttcacgatacggattgtgccgccgtctgcgtcaaacagagcttcaccggaggcttatgcaacgggcggccgccgttcaagcagtgcttctgcactaagccatgcaagagagagagagctgatgctacactccggtcgtcaggcctctgatcatgttgtgcttgatccgcatgacagcgcgactctcgcttgtatgcctaggttgatgtgtatgtaataaataaacaaaatagtaaatgacatgtttttcttacatgaaagtcaagcgattttgcttatcg

SEQ ID NO: 36287 - protein, 100 aa, Zea mays subsp. mays
KKKLTRQKQISLISVMKAQVAAATVLVLLLLTFAAEARTCMSRSQEQKGRCFHDTDCAAVCVKQSFTGGLCNGRPPFKQCFCTKPCKRERADATLRSSGL

SEQ ID NO: 36288 - protein, 85 aa, Zea mays subsp. mays
MKAQVAAATVLVLLLLTFAAEARTCMSRSQEQKGRCFHDTDCAAVCVKQSFTGGLCNGRPPFKQCFCTKPCKRERADATLRSSGL

SEQ ID NO: 36289 - protein, 82 aa, Zea mays subsp. mays
KKTHSTKTNLPNFSHEGPGRSSNCLGLAPPDLCCGGSYVHVAKPGTEREVLSRYGLCRRLRQTELHRRLMQRAAAVQAVLLH

SEQ ID NO: 36290 - DNA, 529 bp, Zea mays subsp. mays
cctttttgttgttgagcggcggggctagccgtttatacctggcaaccactacacgacgagggcaatgaggcgaacggcggcgttgctatcggcccactgcggccgcagcatcccgttggcgctcgccgacgtgctcgtctgcccactctctaagcaacctcttaggtactgcgaggtcaacgggtctttggtcagcgactccgctggggtggcctttccagtacttgatgggattccttctcttgtaccaaaagatggaaagttactcgacgaccaagaagtgaaatcagaacaagagtccagcactagggattcttctggttgaatccttgtctatgcaacatctaattgaagcaatatgttgtagtaaatcgacggtaataaaaccaagtgcttcttgtcggaaatcgtcaccatattgccctagaggatgaggtgcaccgtttctgttgagaaggctaatatggttgtcttgaaagacaacaatgaaattggcaaacatagtttctgctttattttcttttactgg

SEQ ID NO: 36291 - protein, 86 aa, Zea mays subsp. mays
MRRTAALLSAHCGRSIPLALADVLVCPLSKQPLRYCEVNGSLVSDSAGVAFPVLDGIPSLVPKDGKLLDDQEVKSEQESSTRDSSG

SEQ ID NO: 36292 - DNA, 1094 bp, Zea mays subsp. mays
ttgaaaaggttgatcctgttgttgcacttcatcgagtacttggcattctaaaaggtatctatggcccaaaaggcgttactgttcctgatccggttcaatcagtttgcacgagatggggcagtgatcctttttgctcaggttcatactcgcacatcagagttgggtcttccggtgctgactatgacattctttccgagagtgtgaatgaccgactcttcttcgctggagaagctacgaaccgagcgtaccctgcaaccatgcacggggccctattgagcgggttaagagaagcttccaaaatctatcgtgcctcagatagcttagtgaattatgaccagaagaagaattcactgccaaaaagcctcaaaccaccagatggtgcccttctagatctcttcttggagccggacctagcattcgggagattctcgttcgtgttctcctcactgacacccgacgatccagcggctccagggttacttcgggtttcgctcgacaagcgtttccttctgcagcccaattataatacagagctaaagggcgaccaaaaggatcacagccacagccacgcatctggggccttccatctgtacgccgctgtctctcgggagcaggcagatcggctacaaaggtcaagcgaagatgacagaactaggttaggagtgttatgcaaggatcgtactgtaaagctaatgggttacgatagtacttgcgacgtaggtagcgatctgatctcgagcatcttgggtgcgcggaaagccaggaaactcctgcagcacccaaagaactccaagatcccgcgttgatgtgtacccagttcctctttttttttcccctttgtagaacagaatgcatttttttgttatgtacacaaggtacgaagggccggccgccggctggtggagctcagattttgctgtggcgtgtacaggctacgaactgtgacgcttcggcaggaacgtaactgagatcctccatgttctggtcctcacttgtaaaaattgccgttcatgtgacttcagacttcagttgattagatattgttctgtggatttaactgcaggcaccattgtgatcttgctctatctatcttt

SEQ ID NO: 36293 - protein, 267 aa, Zea mays subsp. mays
EKVDPVVALHRVLGILKGIYGPKGVTVPDPVQSVCTRWGSDPFCSGSYSHIRVGSSGADYDILSESVNDRLFFAGEATNRAYPATMHGALLSGLREASKIYRASDSLVNYDQKKNSLPKSLKPPDGALLDLFLEPDLAFGRFSFVFSSLTPDDPAAPGLLRVSLDKRFLLQPNYNTELKGDQKDHSHSHASGAFHLYAAVSREQADRLQRSSEDDRTRLGVLCKDRTVKLMGYDSTCDVGSDLISSILGARKARKLLQHPKNSKIPR

SEQ ID NO: 36294 - protein, 182 aa, Zea mays subsp. mays
MHGALLSGLREASKIYRASDSLVNYDQKKNSLPKSLKPPDGALLDLFLEPDLAFGRFSFVFSSLTPDDPAAPGLLRVSLDKRFLLQPNYNTELKGDQKDHSHSHASGAFHLYAAVSREQADRLQRSSEDDRTRLGVLCKDRTVKLMGYDSTCDVGSDLISSILGARKARKLLQHPKNSKIPR

SEQ ID NO: 36295 - DNA, 662 bp, Zea mays subsp. mays
ttttttttccattcttggtgacatacctttgtattcgattattctcgtatctacttagttttgttaaaacgcttgattatgtataatggcttatatttttttttgtctggggtgttgaatgtattttctttacagatgaatctagccatgcactggaaatatcccaagcaaatttcgaaccggagaatgaacctcataatgttgacgtgaacatggagcaaccgacagttatgagtagcgccaaggggcaaaagggagctcaaaggagaaacaagaccaaaaaattgaatcaaagaaaaatccttggagatgttgaccttgcgcggcagtctggagtgagaagaagctcaagaatacgctcgaggcctttggagtattggcttggtgaaagattactatatgggccgatacaggacactttgcctgcagttattggcatcaaagcatactctcctggccaggatggcaagaaaacattgaaagtgaaatctttcgtgtctgaacagtattcagatcttgtcgctcaatttgcgaagtactaaacaagacaccatttttctaagaggatcacgccttgtgacttgttgctttgtcacctgactttatgatgttacatgtgttggtggaaccatagtactgcacaatgaaaaggcacacgtcct

SEQ ID NO: 36296 - protein, 109 aa, Zea mays subsp. mays
MEQPTVMSSAKGQKGAQRRNKTKKLNQRKILGDVDLARQSGVRRSSRIRSRPLEYWLGERLLYGPIQDTLPAVIGIKAYSPGQDGKKTLKVKSFVSEQYSDLVAQFAKY

SEQ ID NO: 36297 - protein, 103 aa, Zea mays subsp. mays
MSSAKGQKGAQRRNKTKKLNQRKILGDVDLARQSGVRRSSRIRSRPLEYWLGERLLYGPIQDTLPAVIGIKAYSPGQDGKKTLKVKSFVSEQYSDLVAQFAKY

SEQ ID NO: 36298 - DNA, 991 bp, Zea mays subsp. mays
aggcttcacccgttttgctctcgagtctctcccggttcggatccaaattcagcaatccgacctgagaccaagaccgcgcaccacgcggctcgccgccgatggcgaacgccgacgccgacgaagcgccgctgctctctgtggaacacctccgtccaggatcctgcagccgcgagctcgagctgcgggagttccgcgaccgctacgtgatccgttcgctcgacggcgccgccgctttcgccgtccttcgctccggcggctccatccgccctctctccccagaggaagccgtagctgagagcgactgcaaggtttccagaatatacggcgtggtcggcaccataagattgctcgctggaagctatgtactcgttatcacttctcagaaagatgctggctcttatctgggctcccctgtgtaccaagtgaactcaatgaaattcttatgctgcaacgaggctatcaagcacttgactccacaggaaagaagggatgaggcatacttcatgtctctcctgagaattgcagaaactacttgtggattgtattattcatatgacagggatttgacactaaagtaagtgctttgtcatgcatgtatctgaataaggcaaccaaaagacattggcttaatattcagaaaaggccaacaacctttgtgtagtgattatgcacatccttaagatatttttttttctcaaacaacacatgagaactgtgtgcatttcattaagtagagaaaaaaaaccaaaggagaagcagtgtgtggcgctgttagccttgtactaggtggcctagggaagttggcctcctggaaaaaagccgaaacagtcagagcaccctgaatgtcctggatccagagattctgatctaaatcctcctgtaccgttcatctcctcgtcgacatttgtaactaatcgattgcctgttagttccattattccttgcagatgtgtagtaggttcttgaagtatggatctattgagcacttctt

SEQ ID NO: 36299 - protein, 159 aa, Zea mays subsp. mays
MANADADEAPLLSVEHLRPGSCSRELELREFRDRYVIRSLDGAAAFAVLRSGGSIRPLSPEEAVAESDCKVSRIYGVVGTIRLLAGSYVLVITSQKDAGSYLGSPVYQVNSMKFLCCNEAIKHLTPQERRDEAYFMSLLRIAETTCGLYYSYDRDLTLK

SEQ ID NO: 36300 - protein, 97 aa, Zea mays subsp. mays
GFTRFALESLPVRIQIQQSDLRPRPRTTRLAADGERRRRRSAAALCGTPPSRILQPRARAAGVPRPLRDPFARRRRRFRRPSLRRLHPPSLPRGSRS

SEQ ID NO: 36301 - DNA, 1177 bp, Zea mays subsp. mays
ggcagcgaaggcaactacactttgtatatacactggtagtaatgatcgaacgaacgagaaccatgtacagcagcacgccacgcttacagattgcagtattaatagttgcaccaggtttggtttatatccacaagaagaatgatgcaaattcatgaaagaaaatggtacgatcaatattgcttaacgaagctgttccgttgacgacgccggcagcagcgagcgaaggagatcgcagatcggcatccaccacatcttggacgcctacatcaccagctccgacacccatcccaagtccggcccgtcgtcctccgtgaccgcagccgcaggcaggaccggcgccgacgacgacgccttggccttcctgaatccgagctcccgcatcgcgagcaacagctcctccacctcggcgtccgccggctcgtcgacccacctccggccctccaccggcgacaccggcggcgactcccagggcggcgccagcgtcgacttgggcgagagcgacagcgcgagcggcgagcagccgtccttggcggcgccggcgccggcgccggcgccggcgcggagctcggccgcggcgtgcgcgaagaagcagacgcggcggcggcaggcagcgcccgcgcggcaggggcgcgtgcggtagcgggacgggtggagccacagctcgaaggtgccgtgcgcgagcgggcaggcggccccgcgcgggcacgcggcgcccgcgcccgggcggcgccggaagtccgggcacggctcccccgcgtaggccacgcggcgcgggtcccgccgccgcgcggcctcccccgggtgcgcgtaggggcacgccgtccagtcgtggctccgcgcgcgcgcgcaccgccgcaccttgaactcgtgcatcatgaactcgtcgtccgcctccgtcgcgacgtcgccgccctcggcgcgggtggaggagaggtactctcccagcgcggcgaggagctgcggcgggatctctgcggcggacgggtcggcccacggcgcgcccagagacgccgggtccagcaccaggtgcaaattttcacggctcaccatgcctgccgtcgctctatctgcctcgccctcagtgttgttcaacactcggtccagtccggttagcctgggtggtggtggtgccggggaaagagaggactgtggtgaacgtgccttgaggagatataac

SEQ ID NO: 36302 - protein, 101 aa, Zea mays subsp. mays
MNSSSASVATSPPSARVEERYSPSAARSCGGISAADGSAHGAPRDAGSSTRCKFSRLTMPAVALSASPSVLFNTRSSPVSLGGGGAGEREDCGERALRRYN

SEQ ID NO: 36303 - protein, 50 aa, Zea mays subsp. mays
QRRQLHFVYTLVVMIERTRTMYSSTPRLQIAVLIVAPGLVYIHKKNDANS

SEQ ID NO: 36304 - protein, 50 aa, Zea mays subsp. mays
MVRSILLNEAVPLTTPAAASEGDRRSASTTSWTPTSPAPTPIPSPARRPP

SEQ ID NO: 36305 - DNA, 1021 bp, Zea mays subsp. mays
acctgctgctctatatcctacgactagctagctagctagctactgtgtagctactagcgtactctacgctgcagctgggcaagaatcgacgacgccacacgatgacgacgacgatggcttatttgctcgccagtaataagtgcgtgctgctgtccctctccgtcgtcgtggtcctctgtctcggcggcggcgcctccgccatgggcagcctgcccccgccaccgccgatggtgaacttcagcatcggcgtgcagggcgtggtgtggtgcaacacgtgcaggtaccccggctacttcgcgcccatggacgcgtccccgctcccaggtatatatatatacgacagccagtagcagctagcccagtcgtctgtccattgttgccagtgctcctggacgtcgagacgcatatatacacattgcattgcaggcgcgaaggtgtacctgcggtgcaaacacgggctacgcgcgctgacggtggcggggcagtgcggcccgggcggctacttcctgatccagacgtcgcagcaggtgtcggcgttcacgagccagcagtgccgggtgtacgtgccgcgctcgcccgtgcgcgcctgcggggtgcccgcctacccggcggggcgcagggggatgccgctcaagttccaggagttcgtcaagcgcgacaacggcttgcaggggatgtactccgtcggcaaccgcctcttccgccccaagaaccccgccaagtgctagctatctactcaccgatcgacccagatcgtccctgtccatgctccatgcgtacgtacgtgtatctgttgatgcaagccagagccagctgcatgcagggacatgaatagttttctttaaaagaaaaataagcaagctaggttaattggctgttgagatcgttcatcagttagtcgggtaattttagttgcagttggtcgttagaccgtttctgttatagactgaatcagtgaaactagtttcgctgctgctcggtcgattggatatattgatgtactcataatcaagaacgattg

SEQ ID NO: 36306 - protein, 82 aa, Zea mays subsp. mays
MTTTMAYLLASNKCVLLSLSVVVVLCLGGGASAMGSLPPPPPMVNFSIGVQGVVWCNTCRYPGYFAPMDASPLPGIYIYDSQ

SEQ ID NO: 36307 - protein, 78 aa, Zea mays subsp. mays
MAYLLASNKCVLLSLSVVVVLCLGGGASAMGSLPPPPPMVNFSIGVQGVVWCNTCRYPGYFAPMDASPLPGIYIYDSQ

SEQ ID NO: 36308 - protein, 49 aa, Zea mays subsp. mays
MGSLPPPPPMVNFSIGVQGVVWCNTCRYPGYFAPMDASPLPGIYIYDSQ

SEQ ID NO: 36309 - DNA, 674 bp, Zea mays subsp. mays
acatcctaatcgaaaagcacacggttgcgagtttgcgaccgcattgcatcgtgcgcggctgcagcacgaagacgaagctctggtagatggcgagcagcgcggaggagcgcttcctgaggcagctgagcgcgagcaacggcggcgacgcaggggtctacggcggccagcagctgggccacaaggagtactgcgcggagaggaggggctcccggcggtggtccaggaagcgggccgccgccgcgaggggctactgcggcgccggcggcgggtacgactacgactacgacgtgaagcagcaggcagaggccgcctctgccgccgcgaggaagcgggtgatagtggtggtggacgagacctcgggctccaagcacgccatgatgtgggcgctcacccacgtcgccagcaagggggacttcctgacgctgctccacgtcctgctgccgcactccgcctccggcggcggctgtagcaggggcgaggaggcctcctccctcgccaactcgctcggcacgctctgcaaggcgtccaggccagaggtgcgcatctgcagacacacatgcacttgcgcatctgcagacacactcgctcggcacgctcggtaccttcttttggttagctgctcgttactagtgcacattcacaccaactttggctacagctaaccttcttttggt

SEQ ID NO: 36310 - protein, 191 aa, Zea mays subsp. mays
MASSAEERFLRQLSASNGGDAGVYGGQQLGHKEYCAERRGSRRWSRKRAAAARGYCGAGGGYDYDYDVKQQAEAASAAARKRVIVVVDETSGSKHAMMWALTHVASKGDFLTLLHVLLPHSASGGGCSRGEEASSLANSLGTLCKASRPEVRICRHTCTCASADTLARHARYLLLVSCSLLVHIHTNFGYS

SEQ ID NO: 36311 - protein, 155 aa, Zea mays subsp. mays
HPNRKAHGCEFATALHRARLQHEDEALVDGEQRGGALPEAAEREQRRRRRGLRRPAAGPQGVLRGEEGLPAVVQEAGRRREGLLRRRRRVRLRLRREAAGRGRLCRREEAGDSGGGRDLGLQARHDVGAHPRRQQGGLPDAAPRPAAALRLRRRL

SEQ ID NO: 36312 - protein, 95 aa, Zea mays subsp. mays
MMWALTHVASKGDFLTLLHVLLPHSASGGGCSRGEEASSLANSLGTLCKASRPEVRICRHTCTCASADTLARHARYLLLVSCSLLVHIHTNFGYS

SEQ ID NO: 36313 - DNA, 466 bp, Zea mays subsp. mays
aataattctggatgacaatttttcttctgttgtgaaggtggttcgctggggtcgctctgtttatgcaaatatccaaaagtttattcagttccagcttaccgtaaatgttgcagctcttgtcatcaatgttgttgctgctgtttcctcaggaaatgttcctctaaatgctgttcagcttctctgggttaatctcatcatggacacactcggtgctcttgctttggctactgaaccaccaacagatcaacttatgaggcggccaccagttggacggagagaacctcttgtgactaatatcatgtggagaaacttgtttattcaggctgtctttcaagttgctgttcttctgactctcaactttaggggtcgggatcttttgcatttgactcatgacacactaggacactctagtaaagtgaaaaatacacttatattcaacacatttgtattgtgccaggtgtttaat

SEQ ID NO: 36314 - protein, 155 aa, Zea mays subsp. mays
IILDDNFSSVVKVVRWGRSVYANIQKFIQFQLTVNVAALVINVVAAVSSGNVPLNAVQLLWVNLIMDTLGALALATEPPTDQLMRRPPVGRREPLVTNIMWRNLFIQAVFQVAVLLTLNFRGRDLLHLTHDTLGHSSKVKNTLIFNTFVLCQVFN

SEQ ID NO: 36315 - protein, 90 aa, Zea mays subsp. mays
MDTLGALALATEPPTDQLMRRPPVGRREPLVTNIMWRNLFIQAVFQVAVLLTLNFRGRDLLHLTHDTLGHSSKVKNTLIFNTFVLCQVFN

SEQ ID NO: 36316 - DNA, 1234 bp, Zea mays subsp. mays
acgttcagcatcgtcgtctttcgaaaaatgtggttcggtggcggacccatcgacgcggcgggcgcgctgcgcggcttcgtgcgggaagcaggcgggtgcgcggtggtggacgggggtctcggcacggagctggaggcgcacggcggatctgcacgacgcgctctggagcgccaagtgcctcgcctccgccccgcatctcatccgcaaggtccatctggactacctcgaagcaggtgcggacgtcataatctcggcgtcctaccaggccacgatcgaggggttccagtcgaggggcttctcgcgggacgagagcgaggagctgctgcggcgtagcgtgcacgtcgcgcaggaggcgcgcagggtcttcgcggcggagggcgacaggtcatcgcgccgcggacgcccgccggcgctggtggcggcctcggtcgggagctacggggcgtaccgggcagacggctccgagtacagcggggattatggaaaatcgatgacgaaagaagatctgaagaacttccacaggaggcggctgcaggtgctggcaggcgcggggcccgacctcatcgccttcgagacgatcccaaacaaactcgaagcgcaggtctacgctgagctcctcgaggagaacggcatacggatcccagcctggttctccttcacttccaaggacggggtgaacgcggcgagcggagatccgatcaacgagtgcgcggccgtcgctgattcctgcccgagggtggacgcggtcggagtgaactgcactgctcccaggttcatccacgggcttatcctctccataaagaaggtgacgagcaagccgatcgtcgtgtatccgaacagcggggagacgtacgtcgcggagacgaacgaatgggtggactcggacggcgccacggggacggacgactttgtgtcgcgcgtcggcgagtggaggcgggcgggggccgcgctcatcggagggtgctgcaggacgagcccggccacggtgcgagccatcgcgcgggcggtgcgcgaggcggaatacgacgatatccctgccgtggccgtgctctaagcttttgctagttcttccattcccggcggagaaactgaagacgatcattttcggcaataaagtacacacgctcgagtgccacattgtgcgcagttgtctttgatgtggagaaactggagacggcgattcgtcgtcatgctcacgttccttcggcaataaaaatgcacgtgcacgtgtgcc

SEQ ID NO: 36317 - protein, 350 aa, Zea mays subsp. mays
RSASSSFEKCGSVADPSTRRARCAASCGKQAGARWWTGVSARSWRRTADLHDALWSAKCLASAPHLIRKVHLDYLEAGADVIISASYQATIEGFQSRGFSRDESEELLRRSVHVAQEARRVFAAEGDRSSRRGRPPALVAASVGSYGAYRADGSEYSGDYGKSMTKEDLKNFHRRRLQVLAGAGPDLIAFETIPNKLEAQVYAELLEENGIRIPAWFSFTSKDGVNAASGDPINECAAVADSCPRVDAVGVNCTAPRFIHGLILSIKKVTSKPIVVYPNSGETYVAETNEWVDSDGATGTDDFVSRVGEWRRAGAALIGGCCRTSPATVRAIARAVREAEYDDIPAVAVL

SEQ ID NO: 36318 - protein, 187 aa, Zea mays subsp. mays
MTKEDLKNFHRRRLQVLAGAGPDLIAFETIPNKLEAQVYAELLEENGIRIPAWFSFTSKDGVNAASGDPINECAAVADSCPRVDAVGVNCTAPRFIHGLILSIKKVTSKPIVVYPNSGETYVAETNEWVDSDGATGTDDFVSRVGEWRRAGAALIGGCCRTSPATVRAIARAVREAEYDDIPAVAVL

SEQ ID NO: 36319 - DNA, 625 bp, Zea mays subsp. mays
cacttctgctagcaggcagccatctgcagctagggttcatagttcatagtcagtgaccaacatgagtgaccgaaggtacgggtactcgtacccacacaaccaagggtattacaacggaccgccggtgatggcgccgccgcagtacgccccgccgccgagacggcagacgggattcctcgaaggatgcctggctgctctgtgctgctgctgcctcgtcgacgagtgctgctgcgacccgtccatcatattcgtgagctgatcgaaacacgtacgcggtccagacgacggccgaccgatcgaccgaccgacgaaccatccgagccgagctacgtacctaacgtactggtagtagtacatgtgcgatttatatatgcgtgtcgtgtgtatgtgtgcttcccttgagctgttgctttcagctatagcaatagcatatgcccctagaggcctagaacagagtagaactgcagaaagaatagccagcccgtcctgccgttcggttcagctctccagcggcacgacgggtgggtggtgtgtgttgcatgtatgtatgtatctgatgtgatcccctaaaaaaaagtatctgatgtgagtctacgaataagatgaggaaaaagaaaagttcggc

SEQ ID NO: 36320 - protein, 72 aa, Zea mays subsp. mays
MPGCSVLLLPRRRVLLRPVHHIRELIETRTRSRRRPTDRPTDEPSEPSYVPNVLVVVHVRFIYACRVYVCFP

SEQ ID NO: 36321 - protein, 68 aa, Zea mays subsp. mays
MCDLYMRVVCMCASLELLLSAIAIAYAPRGLEQSRTAERIASPSCRSVQLSSGTTGGWCVLHVCMYLM

SEQ ID NO: 36322 - protein, 65 aa, Zea mays subsp. mays; identical to SEQ ID NO: 15058

SEQ ID NO: 36323 - DNA, 491 bp, Zea mays subsp. mays
catttcgccagtcgccatcgagctctcgcttccgccgcccgctgccgctgtatcaccccggtgctgagccctaggatgtgactggcggacgtctctatggccgagccgtaggtggaggcgacacctcggcgccgtgggagatgaaggacgatgacaccgagggtgtaggcgagagcacctgtcccccgccgccgaccgaggaggctcctcctcggccgccggcggcggcggcgactcgcacggttacactgacatcgagaaggaggtcttcgaccgtctcatggagaagagaatctcggaggtcgtcgcggacccggtggccttccgcgaagagctccaccgccacttcgagcgcctgccgctgagctacgccatcgatgtgaacatcgacaaggcggaggacatgctgctgcaccagaggattctcaacgaatgcgctgaccctgaaaatcgccccatcttccatgtgggcttcctgaactgcatcccgc

SEQ ID NO: 36324 - protein, 74 aa, Zea mays subsp. mays
MKDDDTEGVGESTCPPPPTEEAPPRPPAAAATRTVTLTSRRRSSTVSWRRESRRSSRTRWPSAKSSTATSSACR

SEQ ID NO: 36325 - protein, 70 aa, Zea mays subsp. mays
MEKRISEVVADPVAFREELHRHFERLPLSYAIDVNIDKAEDMLLHQRILNECADPENRPIFHVGFLNCIP

SEQ ID NO: 36326 - DNA, 1531 bp, Zea mays subsp. mays
atcgcattcacgtccaaccgttcgcttgcgccctccgcaacaacgcaacgcatcgtgacgccgccgctttttgcttttccgactgctgtttccgccttttgagtaggcgttgggcgagcttcggtttcgacggacgtagccgtcaccgcctcaccggcccggccatgggcgccgccgccgcctgttctcttcgcctctgccacacgtcaccatccgctgcgacggtagggccgcgatgactccggcggttcgggtggggaaccctcgcgatcccggtccgggcgccgcggtggtggaggacgaggaggaggcggcggtcgcgtggcgggagctgcgcggcaaggccgcggaggtcgcggctgcgggcgaggaaagggcggtcctggcccgccgcatcgaggccgcgctccaggtaaggagggaggcgctgcggcaggcggaggagctggacgagttgacgcggatggtggacctccagcaagcgcgtttggaggcggccgtcgtcggcaggaggcgggcgctcgaggccgtggagcgggggaagaagcggctgcaggagcagatcgaccgggtgctgccgctgtcgaggtccctcaccgccgcgcaccatcgagtgcaggaagcgaaggaggcgttatccggagacaaattcagactcaaggatctgcagaggctgcttcggacgaggcagcagcgcatggttagccaggttgctggtttgtaccctgtgagagtcttccatgatcttccaagacatgcagaaaacccctgtgccgatactaatggggagcatgtgacacttccagaggaaaacagaacattttcaggtggagatggaacacatttacccaccattatcaaatctccagaagcacgtggctggacattttttggttgggacattatgaagcataaaatgaagcaaaaaagttacaggaacaaggtgctacagaggtccgcagctgttctgggatatgcagcgcatgcagtcttgttcatagcttgctatctagatattcccctccgatatcccttgcgctttggagggtcccgatcttatgtgagtgatcgcttgccttcagctgatacagcatcatcggctgctttagcaagtaccaggaacaccgaatcagaactaacagaataccctcttttcctggaatgccaagacgatgactccactagtgcctcctatgccatttatttattgcacaaggatacggagcagcttctgaactatgttggagctgagagttgtggaaggcacgtgtttggtaacctacgagaacttcttaggatcgtgcagtctgataagtttgtgtacagatgatggttccaatccatgtggttttggagtgcttatgctgtagatgtattatagagatgtaagtaggtgtttttcttttctcttcttattctttcgtgtgattcattccctctttccctgcgctaggttttttatatgtgcaggaaataggcaattgtgtttttctagagaaatgaaatgtactcacacgtatggcttttttcg

SEQ ID NO: 36327 - protein, 364 aa, Zea mays subsp. mays
MTPAVRVGNPRDPGPGAAVVEDEEEAAVAWRELRGKAAEVAAAGEERAVLARRIEAALQVRREALRQAEELDELTRMVDLQQARLEAAVVGRRRALEAVERGKKRLQEQIDRVLPLSRSLTAAHHRVQEAKEALSGDKFRLKDLQRLLRTRQQRMVSQVAGLYPVRVFHDLPRHAENPCADTNGEHVTLPEENRTFSGGDGTHLPTIIKSPEARGWTFFGWDIMKHKMKQKSYRNKVLQRSAAVLGYAAHAVLFIACYLDIPLRYPLRFGGSRSYVSDRLPSADTASSAALASTRNTESELTEYPLFLECQDDDSTSASYAIYLLHKDTEQLLNYVGAESCGRHVFGNLRELLRIVQSDKFVYR

SEQ ID NO: 36328 - protein, 288 aa, Zea mays subsp. mays
MVDLQQARLEAAVVGRRRALEAVERGKKRLQEQIDRVLPLSRSLTAAHHRVQEAKEALSGDKFRLKDLQRLLRTRQQRMVSQVAGLYPVRVFHDLPRHAENPCADTNGEHVTLPEENRTFSGGDGTHLPTIIKSPEARGWTFFGWDIMKHKMKQKSYRNKVLQRSAAVLGYAAHAVLFIACYLDIPLRYPLRFGGSRSYVSDRLPSADTASSAALASTRNTESELTEYPLFLECQDDDSTSASYAIYLLHKDTEQLLNYVGAESCGRHVFGNLRELLRIVQSDKFVYR

SEQ ID NO: 36329 - protein, 210 aa, Zea mays subsp. mays
MVSQVAGLYPVRVFHDLPRHAENPCADTNGEHVTLPEENRTFSGGDGTHLPTIIKSPEARGWTFFGWDIMKHKMKQKSYRNKVLQRSAAVLGYAAHAVLFIACYLDIPLRYPLRFGGSRSYVSDRLPSADTASSAALASTRNTESELTEYPLFLECQDDDSTSASYAIYLLHKDTEQLLNYVGAESCGRHVFGNLRELLRIVQSDKFVYR

SEQ ID NO: 36330 - DNA, 1623 bp, Zea mays subsp. mays
cccgttcccccaagtctatcagccaaagcatcgcccgccgatggcgtctccgccccactcagtcgaggtccggacccccggcgactcgccgcggcccaccgccgctctcctctccccctccgtggccgcaccccagccctccaacgcctcccgcctcctgctcctcctcaccgcggccgtcgccgccgctacggccttcgtcctgctccgcccgcccatcaccgtcgtgaccgcggcgtccgccaccgcgcggccgctctccaagctctccaagcccgtggtgctgctcatttcctcggacggcttccgcttcgggtaccagtacaaggcccccctcccgcacatccgccgcctcttcgccaatggcacatccgccgccgagggcctgatccccgtcttccccacgctcaccttccccaaccactactccatcgtcaccggcctctacccctcctcccacggcatcatcaacaactacttccccgatcccatctcgggggactacttcaccatgaaaaaccacgatcccaagtggtggctcggggagccgctctgggccaccgctgccgcccagggggtcctgtctgccacattcttctggccgggttcggaggttacgaagggttcctggaactgccccgacaagtactgccgccactacaatggctcggtgccgtttgaggagagggtcgacaccatccttggctattttgatctcccgcctaaccaaatgccacagttcatgacgctgtactttgaggatcctgatcaccaggggcaccaggtgggtcctgacgatccctcaatcaccgatgcggtcgtacatatagatgagatgctcgggaggctcattgctggtttggaggctaggggaatgtttgaggatgtgaacattatattggtaggtgaccatggtatggttgggacctgcgataggaagcttgtgtttctcgaagagttggctccatggatcgagttgaagtcagattgggttctgtcagtgacgccattgctggcaatcaggccgccagatggtgtgtcgccagctgaggttgtggccaagatgaatgaggggcttggatctgggaaggtgaagaatggggaatatttgaaaatgtacttaaaagaggagttgcctactcgcctgcattattcagagagttacaggatcccaccaatcatcgggctggttggggaagggtataagatcgagatgaagcgctccaagagaaatgagtgtggaggagcccatgggtacgacaatgccttcttctcaatgaggaccatatttgccgcacatggacctcgttttcagggtggtagaactgtgccctcatttgagaatgcggagatatacaatgtcatggcttccattctcaatttgaagcctgctccaaacaatggttcagcttctttccctggcacgattctgttgccgaacaaatgatcatggattggttttgtaggagtaagggcacatggatgtatgatggtgttctcatttggttattgtattgtacctcttaaattagacttctgccacatcactgtatctgagcaaaaatgctgctagtagagagttgcttctctctagtgacaacatttggaaacatgtttcacatc

SEQ ID NO: 36331 - protein, 481 aa, Zea mays subsp. mays
PFPQVYQPKHRPPMASPPHSVEVRTPGDSPRPTAALLSPSVAAPQPSNASRLLLLLTAAVAAATAFVLLRPPITVVTAASATARPLSKLSKPVVLLISSDGFRFGYQYKAPLPHIRRLFANGTSAAEGLIPVFPTLTFPNHYSIVTGLYPSSHGIINNYFPDPISGDYFTMKNHDPKWWLGEPLWATAAAQGVLSATFFWPGSEVTKGSWNCPDKYCRHYNGSVPFEERVDTILGYFDLPPNQMPQFMTLYFEDPDHQGHQVGPDDPSITDAVVHIDEMLGRLIAGLEARGMFEDVNIILVGDHGMVGTCDRKLVFLEELAPWIELKSDWVLSVTPLLAIRPPDGVSPAEVVAKMNEGLGSGKVKNGEYLKMYLKEELPTRLHYSESYRIPPIIGLVGEGYKIEMKRSKRNECGGAHGYDNAFFSMRTIFAAHGPRFQGGRTVPSFENAEIYNVMASILNLKPAPNNGSASFPGTILLPNK

SEQ ID NO: 36332 - protein, 468 aa, Zea mays subsp. mays
MASPPHSVEVRTPGDSPRPTAALLSPSVAAPQPSNASRLLLLLTAAVAAATAFVLLRPPITVVTAASATARPLSKLSKPVVLLISSDGFRFGYQYKAPLPHIRRLFANGTSAAEGLIPVFPTLTFPNHYSIVTGLYPSSHGIINNYFPDPISGDYFTMKNHDPKWWLGEPLWATAAAQGVLSATFFWPGSEVTKGSWNCPDKYCRHYNGSVPFEERVDTILGYFDLPPNQMPQFMTLYFEDPDHQGHQVGPDDPSITDAVVHIDEMLGRLIAGLEARGMFEDVNIILVGDHGMVGTCDRKLVFLEELAPWIELKSDWVLSVTPLLAIRPPDGVSPAEVVAKMNEGLGSGKVKNGEYLKMYLKEELPTRLHYSESYRIPPIIGLVGEGYKIEMKRSKRNECGGAHGYDNAFFSMRTIFAAHGPRFQGGRTVPSFENAEIYNVMASILNLKPAPNNGSASFPGTILLPNK

SEQ ID NO: 36333 - protein, 311 aa, Zea mays subsp. mays
MKNHDPKWWLGEPLWATAAAQGVLSATFFWPGSEVTKGSWNCPDKYCRHYNGSVPFEERVDTILGYFDLPPNQMPQFMTLYFEDPDHQGHQVGPDDPSITDAVVHIDEMLGRLIAGLEARGMFEDVNIILVGDHGMVGTCDRKLVFLEELAPWIELKSDWVLSVTPLLAIRPPDGVSPAEVVAKMNEGLGSGKVKNGEYLKMYLKEELPTRLHYSESYRIPPIIGLVGEGYKIEMKRSKRNECGGAHGYDNAFFSMRTIFAAHGPRFQGGRTVPSFENAEIYNVMASILNLKPAPNNGSASFPGTILLPNK

SEQ ID NO: 36334 - DNA, 2375 bp, Zea mays subsp. mays
ctacttcccggtatcctaaaccctagccgacatgcgccgcccgcagcgccgcgtcgcggcgaagcagactcgcctgcgggaggtcgacgagatacgcctcctcaacgaatggatcgacgccggcaagcccctcccgcgcaccaaacttctgcccccgtcgaaatcagctggaccggttccgaccgccggggagcacccggagtacggcgcgtgcacactgttcgacgagctgccgctgtcgcagaagaccaaggacgggctgcggaaggcggggttcactgagatgagtgagatccagcgcgccgctctgccccacgcgctgtgtggccgcgacatcctcggcgcggccaagaccggctccggcaagacccttgcctttgtcatcccgcttattgagaagctgtatagagagagatggggtccagaggatggtgtgggctgcattattctctccccgacaaatgatttggctgggcagatttttgaggtgatcaagaaagtggggcagttccataactttagtggtggcgtcattgttgctgttggtgcttgacgaggcagatcaaattcttgatcacggattcagaaaccaggttgatgctatcatttctcagattcccaaagttagacaaactttactgttttctgctacacaaacgaagtcagttaaggaccttgcaagggttagcttaagggatcctgaatatataagtgtgcacgaggaggccagaacagccacaccggatacccttgagcagtatgccatgattgtacctcttgagcagaagttaaatatgctctggagcttcattaaaaggcatctaaattcaaagacgatagtcttcttatctagtgtcaagcaggtcaaatttgtttatgaaatttttaagaaacttcgtcctggtattcctttgaaatgtatgcatggacggatgaaacatgtggtacagcaggccatagttgcagatttcaatgaagctacctcagttcttttctcaactgatataacatctcgaggactagatataaagaatgtggattgggtggtgcaggttgattgcccagaaaacattgataattacatccacagagttggccgtacagctcgttacaataagaaaggaaaatcacttatattcctttgtcctgaagaagaagcaatgcttgaaaaattgaaggcaaccgaaagtaaaatacctatacatattcgaaagccaaaggcagaacaactggagcagatatcgcagagtatagcctcagtgctggttaaatttcccaatcttcaggaattgggtaaaagggcttttgttacctatcttaaggcagtatacctccagaaagacaaaaaagtgttcaacctgagcaggttctctgcagagcagtttgctgcatatgctgcttcgcttggtctgcctgttacccccaagatccgcttcataagccacaagaagaatgtgtcgaagaaggatatggaggacattgatatgaaacagatgaaatccagtttggaacatgaagttaccatcactccaaagatcaacattgatttaactttgtgtgatggagatgatgatatcctttatcccaagaagcccactgcagatgctaatatggatgacagacttgatgatgtccttcatcccaaggagtctgccacagatacaaatgtgactggacttgaaagacccttcaaaaagaagaaactgaagataaacgtgaacaggccatcaggaacaagggtcaagtatgatgatgagggcaacgccatcccacctcttgcatctgtcgctgaagaagtatctttagaacctgtggttcacaaggataaaatttcccagcggtatgcagagatgttgagagaaatgcagaaacacgacaaggaggacaagcttgaacacaagaagaccttgcgggagaagaagctgcagaagaagatgaagcttaagcgcaagaggcaggaagacactggagcagggtcagaggaggatagtggatctgaatcagacagaggccaagacacagccaacaaaggtaaaaagaggtacttcaatagcgacgatgaagacaatgacgcagcaaaggacggtgatgttctcgcccagcaggaggcgttggcactgaagctcctgagtaatatgcacagttagctttgggatctgatggtataggttacccttgaatgggggtttgcctattagcgctccagccaggaaggggctgaaattttgaacgtgtcgcggttttttttttctgataaccgggagttaattcccactttcaggcatacgttcatggatgtatgagaaatcagtgtggccgtattaccccaagaaatcggacttagatgaggttttaagtaaaatgcctttgatttt

SEQ ID NO: 36335 - protein, 460 aa, Zea mays subsp. mays
MIVPLEQKLNMLWSFIKRHLNSKTIVFLSSVKQVKFVYEIFKKLRPGIPLKCMHGRMKHVVQQAIVADFNEATSVLFSTDITSRGLDIKNVDWVVQVDCPENIDNYIHRVGRTARYNKKGKSLIFLCPEEEAMLEKLKATESKIPIHIRKPKAEQLEQISQSIASVLVKFPNLQELGKRAFVTYLKAVYLQKDKKVFNLSRFSAEQFAAYAASLGLPVTPKIRFISHKKNVSKKDMEDIDMKQMKSSLEHEVTITPKINIDLTLCDGDDDILYPKKPTADANMDDRLDDVLHPKESATDTNVTGLERPFKKKKLKINVNRPSGTRVKYDDEGNAIPPLASVAEEVSLEPVVHKDKISQRYAEMLREMQKHDKEDKLEHKKTLREKKLQKKMKLKRKRQEDTGAGSEEDSGSESDRGQDTANKGKKRYFNSDDEDNDAAKDGDVLAQQEALALKLLSNMHS

SEQ ID NO: 36336 - protein, 450 aa, Zea mays subsp. mays
MLWSFIKRHLNSKTIVFLSSVKQVKFVYEIFKKLRPGIPLKCMHGRMKHVVQQAIVADFNEATSVLFSTDITSRGLDIKNVDWVVQVDCPENIDNYIHRVGRTARYNKKGKSLIFLCPEEEAMLEKLKATESKIPIHIRKPKAEQLEQISQSIASVLVKFPNLQELGKRAFVTYLKAVYLQKDKKVFNLSRFSAEQFAAYAASLGLPVTPKIRFISHKKNVSKKDMEDIDMKQMKSSLEHEVTITPKINIDLTLCDGDDDILYPKKPTADANMDDRLDDVLHPKESATDTNVTGLERPFKKKKLKINVNRPSGTRVKYDDEGNAIPPLASVAEEVSLEPVVHKDKISQRYAEMLREMQKHDKEDKLEHKKTLREKKLQKKMKLKRKRQEDTGAGSEEDSGSESDRGQDTANKGKKRYFNSDDEDNDAAKDGDVLAQQEALALKLLSNMHS

SEQ ID NO: 36337 - protein, 408 aa, Zea mays subsp. mays
MHGRMKHVVQQAIVADFNEATSVLFSTDITSRGLDIKNVDWVVQVDCPENIDNYIHRVGRTARYNKKGKSLIFLCPEEEAMLEKLKATESKIPIHIRKPKAEQLEQISQSIASVLVKFPNLQELGKRAFVTYLKAVYLQKDKKVFNLSRFSAEQFAAYAASLGLPVTPKIRFISHKKNVSKKDMEDIDMKQMKSSLEHEVTITPKINIDLTLCDGDDDILYPKKPTADANMDDRLDDVLHPKESATDTNVTGLERPFKKKKLKINVNRPSGTRVKYDDEGNAIPPLASVAEEVSLEPVVHKDKISQRYAEMLREMQKHDKEDKLEHKKTLREKKLQKKMKLKRKRQEDTGAGSEEDSGSESDRGQDTANKGKKRYFNSDDEDNDAAKDGDVLAQQEALALKLLSNMHS

SEQ ID NO: 36338 - DNA, 387 bp, Zea mays subsp. mays
  misc_feature (10)..(10): n is a, c, g, or t
  misc_feature (22)..(22): n is a, c, g, or t
  misc_feature (158)..(158): n is a, c, g, or t
cattgtcccntcaaactcgctnctggcctcgggcccgcccgtcgtgaggtccgagctcgatgcagccgatccggcggcgscaccgaggctttgcactcctctgtctctccgccgccctcctcgctgccgccactctgctccccggcgccgccgtcgcngaaggtgtcamgccctccgaggcgcgccggctccgcgacgaggtgaaagatatgttytatcatgcgtttgatggatacatgaagtatgctttcccactcgatgagctgcggcccttaagttgccaaggtgaagactcccttggtggttatgcgctcactcttatcgattctttggatacyttggctttactgggtgatmaggagaamtttggtgctgctgtggagtggg

SEQ ID NO: 36339 - protein, 109 aa, Zea mays subsp. mays
  misc_feature (7)..(7): Xaa can be any naturally occurring amino acid
  misc_feature (33)..(33): Xaa can be any naturally occurring amino acid
  misc_feature (37)..(37): Xaa can be any naturally occurring amino acid
  misc_feature (52)..(52): Xaa can be any naturally occurring amino acid
  misc_feature (93)..(93): Xaa can be any naturally occurring amino acid
  misc_feature (100)..(100): Xaa can be any naturally occurring amino acid
  misc_feature (102)..(102): Xaa can be any naturally occurring amino acid
MQPIRRXHRGFALLCLSAALLAAATLLPGAAVXEGVXPSEARRLRDEVKDMXYHAFDGYMKYAFPLDELRPLSCQGEDSLGGYALTLIDSLDXLALLGDXEXFGAAVEW

SEQ ID NO: 36340 - protein, 75 aa, Zea mays subsp. mays
  misc_feature (3)..(3): Xaa can be any naturally occurring amino acid
  misc_feature (7)..(7): Xaa can be any naturally occurring amino acid
  misc_feature (27)..(27): Xaa can be any naturally occurring amino acid
  misc_feature (53)..(53): Xaa can be any naturally occurring amino acid
  misc_feature (56)..(56): Xaa can be any naturally occurring amino acid
  misc_feature (72)..(72): Xaa can be any naturally occurring amino acid
IVXSNSXLASGPPVVRSELDAADPAAXPRLCTPLSLRRPPRCRHSAPRRRRRXRCXALRGAPAPRRGERYVXSCV

SEQ ID NO: 36341 - protein, 67 aa, Zea mays subsp. mays
  misc_feature (4)..(4): Xaa can be any naturally occurring amino acid
  misc_feature (8)..(8): Xaa can be any naturally occurring amino acid
  misc_feature (27)..(27): Xaa can be any naturally occurring amino acid
  misc_feature (53)..(53): Xaa can be any naturally occurring amino acid
  misc_feature (57)..(57): Xaa can be any naturally occurring amino acid
HCPXKLAXGLGPARREVRARCSRSGGXTEALHSSVSPPPSSLPPLCSPAPPSXKVSXPPRRAGSATR

SEQ ID NO: 36342 - DNA, 796 bp, Zea mays subsp. mays
cccaatcccctcccgccgcgtcacatcgccgccgtcctcgtgccccgttacctctaaaaccctagcggggagccggggatgaagatccagtgcaacgcgtgcggggccgcggaggcgcgggtgctgtgctgcgcggacgaggccccgctctgcgtcgcctgcgacgaggaggtgcacgccgccaacaagctcgccgggaagcaccagcgggtgccgctcctgacggacgccgccgtcgctgccgccgcggcggccccggccgtgcccaagtgcgacatctgtcaggtcaggcacccaggccccgaggcccgagccctcgtctccgctgcctctctctccatccctgtagctcgattgggttggggtgagctggagttgtcgtgcggtagctgccactgccaggctgggaattttctactaaccgtctgatcccaagctaccagggtagtctcgcctaatgatttggctcgcgaagtgaataggcggctgaagcactgcaaagttgttgttgatgcttcgatctgtagcaaactgccttgccttaccttacctgggcagcttcccttgggatgccgagtctgtttctggagcgttggcggaattgctatacgatatacactatgttttactgatgatctgactggaccaggacagcagtgagttcaattttagctcctacaggctttccctatcccggggaaggcatcatgtgtgatctgtggctggtcctgcaggatattgtaattatgaagaaaccgactcggatgttgtactgatgtgccactcttgaggaccc

SEQ ID NO: 36343 - protein, 116 aa, Zea mays subsp. mays
MKIQCNACGAAEARVLCCADEAPLCVACDEEVHAANKLAGKHQRVPLLTDAAVAAAAAAPAVPKCDICQVRHPGPEARALVSAASLSIPVARLGWGELELSCGSCHCQAGNFLLTV

SEQ ID NO: 36344 - DNA, 604 bp, Zea mays subsp. mays
agaaggatcgtaaccgacctcgccagtcggcatgaagcgtgacgttaatccctctcctccctctcctcccctctgctccccatcaactcttcacctcgcccaacgatccccaattcctccttcggatttcacattcaatgcaactcaagtggtaaagaaagcagacatagaggaatggggctcgcgtttgggaagctcttcagccggctcttcgtcgataaggatatgcagatccttatggtcggcatcgataccactggtaaaaccaccatcctctacaagctcaagcttggcgagatcgccatggtcaaggaacacattggacaaggttttggacactgttgcagaaggaggaggacagatctcaagtaagatggggatgtcgtgtgcttgagacgacaaggatggagatcttttcaagtaatggctagtctttttatcatagattgagtgcttgaatttgtgaaatctttgtcgaacctgatattttcgttccaaagtggaaccaccatgtttgtgaatttgaatagccacatgtatcaaccgataccgaagctggaatattaataatattcccttttctaataaatatatgtttcttttc

SEQ ID NO: 36345 - protein, 120 aa, Zea mays subsp. mays
MKRDVNPSPPSPPLCSPSTLHLAQRSPIPPSDFTFNATQVVKKADIEEWGSRLGSSSAGSSSIRICRSLWSASIPLVKPPSSTSSSLARSPWSRNTLDKVLDTVAEGGGQISSKMGMSCA

SEQ ID NO: 36346 - protein, 65 aa, Zea mays subsp. mays
MGLAFGKLFSRLFVDKDMQILMVGIDTTGKTTILYKLKLGEIAMVKEHIGQGFGHCCRRRRTDLK

SEQ ID NO: 36347 - DNA, 682 bp, Zea mays subsp. mays
gtcgttatgttgatgaggtgatcattggtgctccatgggatgtttcaaaagacatgattaccacgttcaatatctctttagtcgttcatggaacaattgctgagaacatggacttcacagaggacgatttacacccatatgctgttccaatggctatgggcatctaccgccgactggagagccccctggatatcacaacaagtacaatcatcaggaggattgttgctaaccatgaagcttaccagaagcggaatgagaagaaggaagccagcgagaagaagtactacgagggtaaaagctttgtgaacggggagtgaaggtcggagtagcagcaggactcgcgtggagattgctgcctcgttcattttaggtctcccagccttttagcagaggcaacagttggtcgatctacagttgtaccctttcttttttctttttcatcttcttcagtaatctttgatatcttgctgacatagcttaggaagcataggagcatttctcccccgtgtctgcagccaattttcctcactgtgttgtatatgcgccttccagctgttgtttccagctgctggagctgcatttgagatctataggcttttccacacacacacagagacagacacatacacattttgaaattgtgcgctgcagtatgaagaagatcatgaatgttagcgtgatt

SEQ ID NO: 36348 - protein, 104 aa, Zea mays subsp. mays
RYVDEVIIGAPWDVSKDMITTFNISLVVHGTIAENMDFTEDDLHPYAVPMAMGIYRRLESPLDITTSTIIRRIVANHEAYQKRNEKKEASEKKYYEGKSFVNGE

SEQ ID NO: 36349 - protein, 87 aa, Zea mays subsp. mays
MITTFNISLVVHGTIAENMDFTEDDLHPYAVPMAMGIYRRLESPLDITTSTIIRRIVANHEAYQKRNEKKEASEKKYYEGKSFVNGE

SEQ ID NO: 36350 - protein, 72 aa, Zea mays subsp. mays
MEQLLRTWTSQRTIYTHMLFQWLWASTADWRAPWISQQVQSSGGLLLTMKLTRSGMRRRKPARRSTTRVKAL

SEQ ID NO: 36351 - DNA, 902 bp, Zea mays subsp. mays
aacctactcacaaagcaaccagacaacacatacatctctcatctctctattctctctcactgtaaacttcaaataatgatgggataccaaacaaacgctaatttctccatgttgtacgaccaagaccaccctcataattatgattatgatgacctctcttcatcaacttctgttgattgcactctctcccttggaacaccatctactcgtctcgacaaacaccgtagattttcttctgccaattctaacaacatctccggcgacttcttctttcacggaggaagcgcaaaaacgacgtcttacaaaaagagcggtagtgagcacaacctgcctcgccgttgtgctagctgcgacacttcttctactcctctatggagaaacggaccaaaagggcctaagtcgttatgcaatgcgtgtggaatcagattcaagaaggaagagaagcgtgcagctgccagaaactcaataacgtccggtggtggttcatcagtggcagaagttccggcagagaacccgtacaacggaggtggaaactattacactcatcatcaccatgcttcctcgtcaccgtcgtgggctcatcagaacacacaaagagttcagtatttctcgccggcaccggagatggaatatccgttcgttgatgacgtcacggctgcctcgtttatgtcttggaattaacgtcacggaaaccactggccttctccaccatttttgacgagatgaatgaagaaacgttacctatggaaggtcttgtcatagattctcacccaaagtaaatcagtcctggtcaaattcattataaagtttctttttatttatttatttcttacatcgacactatctccttgtgttttctttttatgtctttttgaaagatatatatacgtactgtagtgttt

SEQ ID NO: 36352 - protein, 226 aa, Zea mays subsp. mays
NLLTKQPDNTYISHLSILSHCKLQIMMGYQTNANFSMLYDQDHPHNYDYDDLSSSTSVDCTLSLGTPSTRLDKHRRFSSANSNNISGDFFFHGGSAKTTSYKKSGSEHNLPRRCASCDTSSTPLWRNGPKGPKSLCNACGIRFKKEEKRAAARNSITSGGGSSVAEVPAENPYNGGGNYYTHHHHASSSPSWAHQNTQRVQYFSPAPEMEYPFVDDVTAASFMSWN

SEQ ID NO: 36353 - protein, 201 aa, Zea mays subsp. mays
MMGYQTNANFSMLYDQDHPHNYDYDDLSSSTSVDCTLSLGTPSTRLDKHRRFSSANSNNISGDFFFHGGSAKTTSYKKSGSEHNLPRRCASCDTSSTPLWRNGPKGPKSLCNACGIRFKKEEKRAAARNSITSGGGSSVAEVPAENPYNGGGNYYTHHHHASSSPSWAHQNTQRVQYFSPAPEMEYPFVDDVTAASFMSWN

SEQ ID NO: 36354 - protein, 200 aa, Zea mays subsp. mays
MGYQTNANFSMLYDQDHPHNYDYDDLSSSTSVDCTLSLGTPSTRLDKHRRFSSANSNNISGDFFFHGGSAKTTSYKKSGSEHNLPRRCASCDTSSTPLWRNGPKGPKSLCNACGIRFKKEEKRAAARNSITSGGGSSVAEVPAENPYNGGGNYYTHHHHASSSPSWAHQNTQRVQYFSPAPEMEYPFVDDVTAASFMSWN

SEQ ID NO: 36355 - DNA, 649 bp, Zea mays subsp. mays
atggttagcaataaagcagtgaccaagagaacgaaggaaccgaagaaagaaagctacaccagagggaggacggagatcagctactagcgtaccatagtctctcgtttcgggtagtcaagccacaacggtatgcacgggagaaccgccatggcagtggcctgccttctgtgcatgacggctctgctgctagtccaggatgtccagtccaggaggctactgtggacggagcaggagaagaaacaatcccatggtggccttggcaaccatggcgccgctgaccggcgaagcacctccctggaaccgtgcagtggcgctatgggaggaggcggcacaggaagtgcagacaagcagggcgaattcccgtgtgatgatgatacgtcaaaatggacagaactgcacacggattacatatacacccaagacttcaagcacccataaactgttagctagctggctcgatcgcgtgtgccaagtttctgaagattattagttttgtctgtaggcgttgcgcgttcaatgctgtagtataggtgtataattaattagctagccagtcatcagtgactactgtagttaagacttaagagtacgctgaatgagtatcatgtatggacgcattagatggtttaatatatgcatgcatgtttgt

SEQ ID NO: 36356 - protein, 102 aa, Zea mays subsp. mays
MHGRTAMAVACLLCMTALLLVQDVQSRRLLWTEQEKKQSHGGLGNHGAADRRSTSLEPCSGAMGGGGTGSADKQGEFPCDDDTSKWTELHTDYIYTQDFKHP

SEQ ID NO: 36357 - protein, 97 aa, Zea mays subsp. mays
MSSPGGYCGRSRRRNNPMVALATMAPLTGEAPPWNRAVALWEEAAQEVQTSRANSRVMMIRQNGQNCTRITYTPKTSSTHKLLASWLDRVCQVSEDY

SEQ ID NO: 36358 - protein, 96 aa, Zea mays subsp. mays
MAVACLLCMTALLLVQDVQSRRLLWTEQEKKQSHGGLGNHGAADRRSTSLEPCSGAMGGGGTGSADKQGEFPCDDDTSKWTELHTDYIYTQDFKHP

SEQ ID NO: 36359 - DNA, 750 bp, Zea mays subsp. mays
ggcttcattcataaggggagatcattacaaacttgagaccaactcatcttgagtcggcctcgtcacccctgggtcattacatcacagtacactacactgctactcacactacactacgatactaactaacactaccttattctactactactactattgttacctatactaatatttacaccaacggcgttatgtcgctggccatgccgtcgccgccgtcgccctcgccgccatcgcccttgctgctgtcatcgcccttgccgtcgcccttgctactgtcgtcgtcgtcgcccttgctatctccgtcgccatcaccctcgccatcttcgccgtcaccatcgccgccgcccttgccgtcgtcgttgttgccgctgccgtcgtcctcgtcgccgttgcttttgccgctgctccactcctcagagttggaggagtcttccacctagggttgaaaacggtttcggaatttttcggtttttcggataccgttttcgattttttccgaccagattcaacaataacggtatttttcggaatcgaaatcggttatcggaattttataccggaatcggtatcgaaatcggtacagccttttaccgaccgtttccttcgattaccgaatttaatcggaatttaccgattttaaatttcgaaattttccgaagatactaaaaaacaaaagtatttcaaaaataaaaaataaagtaggcagtcaggcccacacttaagtcaggcctagctattcagaaaaat

SEQ ID NO: 36360 - protein, 83 aa, Zea mays subsp. mays
MSLAMPSPPSPSPPSPLLLSSPLPSPLLLSSSSPLLSPSPSPSPSSPSPSPPPLPSSLLPLPSSSSPLLLPLLHSSELEESST

SEQ ID NO: 36361 - protein, 79 aa, Zea mays subsp. mays
MPSPPSPSPPSPLLLSSPLPSPLLLSSSSPLLSPSPSPSPSSPSPSPPPLPSSLLPLPSSSSPLLLPLLHSSELEESST

SEQ ID NO: 36362 - DNA, 2081 bp, Zea mays subsp. mays
agcacatgaacgtcaatctaagttgacatgataccctgatgaaattcatctgaaggtaaagatggccattgtagagccgagacaaggaaaaaagatctgtgggcagatggttgctaataaaatgtatatgacagaattttcatgaaacattcatcactttaaattcccagctttaaaataggcaaaaagcaccaaccttagaccgatcaatccaagaaatctttcaatccaaacaaaattgggaagcctctcttccaatgtccactgcagtctgcaggccaataaatcattttcgtgtagaacatttctcaaatacttcacaaacacccccatcctagatcatttcgcagtgacggctgcaagactacattggaagcagtcccactcccaccgtagcagttgagttcctctttctgcaatcctcatttcaaactttccatcttatatctctgcagttatgtacaccactggctcatcaggcatctccatccagcctcatccagcgaaatactcagtccagtgctcccatatgccctgagaagtgctcttgtagccacaaagatcttcacttatgcaagccaccaagaagcctattataagaggcaatatttggtataaatcctaaatcaagcatttcatccaacacagccttcccttcctttcttttcccctgcctcccaaatccttgcaccagcatacgataagtttcaccgtcagcctcaaaacccttctccttagcgaacacccttagctggttagcatcagctgtcctcccagcttcgcaaagcgcctcaaagatgcagttacaagaaattgaatccggaacaatcccttgatcaatcattctccacatcaaccggtaaacctcatccagcttccctgcctccatcaggcactccaaaactgtggcgccagcaggtgcactcatacagcatttggtattcctctctaataccatgtctactgcttccactgctctgtccaccttcccaccacggcaaagagcctcaacgacttcaaagcaatcaaacccttctggcaccaccccatcccccaaaaactcaacaaacagctcagccgcctctagagccttgctaccacggcacaatccaccgatcaaaatctccatggacgcaacggacagcccaaccccaagctcaagcatctcgcgtgccacctttgttccctccttatacctgccttctctgatgaacccacgcataagtgtgttgaaactaacgaccgtcggtgcacagctccggcgctgcatctcaccaaaccaccgcatggcggcgtctacgccttccacccggcatgagctactgatgagtatgttgaaggtgtggacatccggagcgacgcggtagacggaggtcatttcgccgtagaagcgaatggcatcgtcgtggcgacggaggcgggagagagcttggaggatgatgttgtagaactcggcgggtagtggggagtcagcgacgcgccggagagaggcgagggcatgcgatgcggaggggatgtcgccggaggcggcgaaggcgacgatggccttgcggaaggtggggaggagctcggggcatgcaaagatggagtcgtcggcacaggggcaggggcgggtgaggacgagctccaggaggcgctggagcgaagggaggcggcgggaagccgcgaggcgggcggcgacgagggacgtgaggctgtggtcgggtcggaaagcggaggacgcgtctgcggcggccagcaggatgtggaggtcgagcgccacgagtcgggggtggtggcgggctcggcggaggagacgaaagagagaggcgggggaggaagcgtgagcggaggggagcaccgggagcgggttaggcggcgagaggtgggagacggcgagcggaaggacagggagtgaggggtcaaacgggatggatgcggaggtggtgggggcttcggtgagttcaggcgcgtcagtctccggggagatgaggcgctcataccgggagatcagagacggcagcttccgcgcgaggcggcgagaggcggccatcgtccggcggtgaagggggaaaggttgggatcgaccattccaaagagac

SEQ ID NO: 36363 - protein, 136 aa, Zea mays subsp. mays
MSTASTALSTFPPRQRASTTSKQSNPSGTTPSPKNSTNSSAASRALLPRHNPPIKISMDATDSPTPSSSISRATFVPSLYLPSLMNPRISVLKLTTVGAQLRRCISPNHRMAASTPSTRHELLMSMLKVWTSGATR

SEQ ID NO: 36364 - protein, 132 aa, Zea mays subsp. mays
MRCGGDVAGGGEGDDGLAEGGEELGACKDGVVGTGAGAGEDELQEALERREAAGSREAGGDEGREAVVGSESGGRVCGGQQDVEVERHESGVVAGSAEETKERGGGGSVSGGEHRERVRRREVGDGERKDRE

SEQ ID NO: 36365 - protein, 103 aa, Zea mays subsp. mays
MSPEAAKATMALRKVGRSSGHAKMESSAQGQGRVRTSSRRRWSEGRRREAARRAATRDVRLWSGRKAEDASAAASRMWRSSATSRGWWRARRRRRKREAGEEA

SEQ ID NO: 36366 - DNA, 1152 bp, Zea mays subsp. mays
aaattcccacgttgctctcccgtcttccctcctcccctccccaaacccccaccccaacgcccagatctaccctccccatttacagctttctctccggccctgcgccccagggcaccgcgccgcccgaaaccgtcggcgccggcgcgatgcgcgtgccatgctgctcgttatgcaacgtcagatatgacgaggaggagcggacgccgctgctcctccactgcggccatggattctgccgcgcgtgcctctcccgcatgctagcggcagcccccggagccacgctgccgtgcccgcgatgtcgccatccgaccgccgtaggcaactcagtctctgcgctgcggaagaacttccccattctatcgctcctctccgcatccccctcatccccgtctttcctccactccgactcggggtcatcctccgacggctccgaagatgaggatgacttcttcgcacggcccactcgccgccccgcgcccgcgcccgccgccgcgtcgcccggatgcagctccttcgacctcgcctcgcacccggacctcaagctcgcccgtcgcatcgggagcggcccgcctgggcccgccgggcaggacgtgtgggtcggcacgctgtctcgtggcggcggcggggtcaagcggtgcaagcaccaggtggcagtgaagagggtgccccaaaccgcgggggatgggctcgaggttgttcaagaggaggtggagcggctgaggcgtgcctccacatggtgtcggaacgtgtgcaccttccatggtgctgtgagggtcggcggccacctctgtttcgtgatggatcattatgtcgggtctgtgcaggcggagatgcggcagaatggtggacgcctcacgctggagcagattctcaggtgtggcattgcatcaaaatgtcggtacttagtaatattgtgcggctattctttctgctgctgtcttaccaataatcgctgcaaacatattacattgcaacatagctgctctcttttattattactcagtagtcagcaagaagcatgcctagctagaaccttcactaaatgtggcaaattgtgtacgtgtagtgtatgatagcttgctttgtgacatgtaaagtggttgccttgttaatggcgttatgcagtttgaactttgatttcattggttctgc

SEQ ID NO: 36367 - protein, 356 aa, Zea mays subsp. mays
IPTLLSRLPSSPPQTPTPTPRSTLPIYSFLSGPAPQGTAPPETVGAGAMRVPCCSLCNVRYDEEERTPLLLHCGHGFCRACLSRMLAAAPGATLPCPRCRHPTAVGNSVSALRKNFPILSLLSASPSSPSFLHSDSGSSSDGSEDEDDFFARPTRRPAPAPAAASPGCSSFDLASHPDLKLARRIGSGPPGPAGQDVWVGTLSRGGGGVKRCKHQVAVKRVPQTAGDGLEVVQEEVERLRRASTWCRNVCTFHGAVRVGGHLCFVMDHYVGSVQAEMRQNGGRLTLEQILRCGIASKCRYLVILCGYSFCCCLTNNRCKHITLQHSCSLLLLLSSQQEACLARTFTKCGKLCTCSV

SEQ ID NO: 36368 - protein, 308 aa, Zea mays subsp. mays
MRVPCCSLCNVRYDEEERTPLLLHCGHGFCRACLSRMLAAAPGATLPCPRCRHPTAVGNSVSALRKNFPILSLLSASPSSPSFLHSDSGSSSDGSEDEDDFFARPTRRPAPAPAAASPGCSSFDLASHPDLKLARRIGSGPPGPAGQDVWVGTLSRGGGGVKRCKHQVAVKRVPQTAGDGLEVVQEEVERLRRASTWCRNVCTFHGAVRVGGHLCFVMDHYVGSVQAEMRQNGGRLTLEQILRCGIASKCRYLVILCGYSFCCCLTNNRCKHITLQHSCSLLLLLSSQQEACLARTFTKCGKLCTCSV

SEQ ID NO: 36369 - protein, 272 aa, Zea mays subsp. mays
MLAAAPGATLPCPRCRHPTAVGNSVSALRKNFPILSLLSASPSSPSFLHSDSGSSSDGSEDEDDFFARPTRRPAPAPAAASPGCSSFDLASHPDLKLARRIGSGPPGPAGQDVWVGTLSRGGGGVKRCKHQVAVKRVPQTAGDGLEVVQEEVERLRRASTWCRNVCTFHGAVRVGGHLCFVMDHYVGSVQAEMRQNGGRLTLEQILRCGIASKCRYLVILCGYSFCCCLTNNRCKHITLQHSCSLLLLLSSQQEACLARTFTKCGKLCTCSV

SEQ ID NO: 36370 - DNA, 745 bp, Zea mays subsp. mays
ggcttgctggatcagaccgaaacaacatccaggtctgctggaggcgccatacagtcccggatcccggtggtttacccctgcggcctccgccgctccgcggctctgcctcttcctccgcttctccttgccccgcgtgcgcgaccgacgccgccgccgcctccgccctaagagtcttcgtaggacactccgtcaggaattcttcgggacccttcgccggcgacgatctgacgtgacgatgtctggtcatacccaacctgaaggaccacaccaacttgattcaaaacatgctgcaaattcatgccgaaagaatgtacccggtacatcgttcgtctcagatttgagggatcacatccacgagttcatcaatgcctctgcagatgaacaccggacatgcttcacaaagactctcaaaaggatgttcgatatgtcaaagactgtcactgatagatcctctgaagcagaggaagctggacccgaaagtgtcttgccacttcagaccacagtgtcgcggtagaagtttcgccacttcatattgcctccgtagaaataggataaagctagaaagcctcgccctccgcggatggagaaatttgttattttgtcactctcaattttgactctattaggtctataactggtcggatcatctgtgtctatgatttgtgggtctgattacatattgacaaagcccacagataataatagcaaaattatcaatcgctcccgctgaggaggccagttgccc

SEQ ID NO: 36371 - protein, 170 aa, Zea mays subsp. mays
ACWIRPKQHPGLLEAPYSPGSRWFTPAASAAPRLCLFLRFSLPRVRDRRRRRLRPKSLRRTLRQEFFGTLRRRRSDVTMSGHTQPEGPHQLDSKHAANSCRKNVPGTSFVSDLRDHIHEFINASADEHRTCFTKTLKRMFDMSKTVTDRSSEAEEAGPESVLPLQTTVSR

SEQ ID NO: 36372 - protein, 92 aa, Zea mays subsp. mays; identical to SEQ ID NO: 35592

SEQ ID NO: 36373 - DNA, 1174 bp, Zea mays subsp. mays
atccatccgtctgagaggcagaggaggagccactgaaaagccactgaaattgggactactctctcgctccctacctcaagcatagtgagtagtgactggggcttgcagtagctctgttttgatgagccattgaggcaaattgaagagggatttgtttggcttgcaagtggcatgatattcttattttattttttgcaacttaaaaactattagtttggggctactagctaggctaacgttgccatttgcttcttcaaagaaagttggaggatgtttatttgatctcaaacagaagtgtcaacgatttgggcttggagccagctttgatttaccattcctttcgacatagccaaagtgcagatccagctgcaaaggaaggcaccattaccaccaccacctgtggctgcaacagccacaactgctgctggtggagggacactagccacaatcatgtgcatcgccagagaggaaggggttgtcgcgctctagaagggcgtcatccctggcctccactgtcagtttctctatgatggcctccacatcagcttgtgaaggctttcttcgtcagatgtgctgttgtgggtgatgtcagtttactaagcaagattcttgctgcgcttgccacaggtgtgatagctattgttgtggcaaatccaactgatctcgttaaagttaggttgcaagctgatggaaaggctaacacagtcaagaggagttattctggagcccttaatgtatatgctacaataatcagacatgttactttaaccatcatgggcacatggctcatttttgaatgtttgctggtgggaggatcgtctcttctatgtctacaagaatattttgccagtgatgacggtgtttagaggatgggatccttgcaattgtcaaacaagatgagagaccccttgaattgcttgctaaagaatatgctatcaactcttttgacatagatcctcaaaacccctctgatgttgttttcacgttagaatgggaatcaatcggtgtcctaccttgtggctagaagaaagaaaatttttactaccgagggatctcaattagaattttaggctcattcatacattcactacaatgccttcgaactcatgaacatttatctctggctctattgtggtgggttacatgaatagagtttttgcatgttcttcgtttc

SEQ ID NO: 36374 - protein, 30 aa, Zea mays subsp. mays
MGTWLIFECLLVGGSSLLCLQEYFASDDGV

SEQ ID NO: 36375 - DNA, 615 bp, Zea mays subsp. mays
attcaattcacagtcgagagacacttcttgtcgtttcaaccaagatgggaagggtttttatcgtggatctggaagggcaaatctatagttgcaaacactgtaacacccatcttacaaaagaacaagacatcatgtccaagtcatttcaatgcaggtatggacaagcttatctcttcaatgaagttgtaaccatttcaactggaaatgaagaagacagaatgttgatgacgggacttcatacggtaactgacatcttctgtgttggttgtggatcaaacgttggctggaaatacgtgactgcccatgatattaaccaaaaatacaaggaaggaaaatcagttcttgaattgtataagattgtgggtccttacgatagcaacgacttggtctgtcaagaaatttcacgacttgagatataataatcacatgattctgatgactctgcttgagcttttttccttcgctttttgagatttctcttagaatgtacattcttcaattttagcttatttttatttatttctttttggaattagtacatttggtacctgaaatgacgcgtagtttcataggttttaatttagagtttaatctcatttgggcttttgagctttt

SEQ ID NO: 36376 - protein, 138 aa, Zea mays subsp. mays
SIHSRETLLVVSTKMGRVFIVDLEGQIYSCKHCNTHLTKEQDIMSKSFQCRYGQAYLFNEVVTISTGNEEDRMLMTGLHTVTDIFCVGCGSNVGWKYVTAHDINQKYKEGKSVLELYKIVGPYDSNDLVCQEISRLEI

SEQ ID NO: 36377 - protein, 124 aa, Zea mays subsp. mays
MGRVFIVDLEGQIYSCKHCNTHLTKEQDIMSKSFQCRYGQAYLFNEVVTISTGNEEDRMLMTGLHTVTDIFCVGCGSNVGWKYVTAHDINQKYKEGKSVLELYKIVGPYDSNDLVCQEISRLEI

SEQ ID NO: 36378 - protein, 95 aa, Zea mays subsp. mays
MSKSFQCRYGQAYLFNEVVTISTGNEEDRMLMTGLHTVTDIFCVGCGSNVGWKYVTAHDINQKYKEGKSVLELYKIVGPYDSNDLVCQEISRLEI

SEQ ID NO: 36379 - DNA, 437 bp, Zea mays subsp. mays
atacttggagcaaagaagagtacaggcaaatgatagagtcaaacaagctgaaaggcacattcggcctccctcgaagtccatgccatctcgaccagtctcctctaatggaattcgcgatgatcatgcaaagagaaagcaagtggtaaaaagaagatttgatgacgacgacgatgaggacgaccccttggcaatgatcagaaatatgttcgggtatgatcctagtagatatgcagggagagatgaggatgtcagtgacatggaagcagattttgctactatagaaatggaagagaaaagaagtgcgaggatagctaggcaggaggacgaagagcaacttcgcttgattgaggaagaagagagacgcgagcaggagaggaagaggcgaaagatggcacgaggccgatagtccaacacgcgtcatatttgggtgttataat

SEQ ID NO: 36380 - protein, 134 aa, Zea mays subsp. mays
YLEQRRVQANDRVKQAERHIRPPSKSMPSRPVSSNGIRDDHAKRKQVVKRRFDDDDDEDDPLAMIRNMFGYDPSRYAGRDEDVSDMEADFATIEMEEKRSARIARQEDEEQLRLIEEEERREQERKRRKMARGR

SEQ ID NO: 36381 - protein, 108 aa, Zea mays subsp. mays
MPSRPVSSNGIRDDHAKRKQVVKRRFDDDDDEDDPLAMIRNMFGYDPSRYAGRDEDVSDMEADFATIEMEEKRSARIARQEDEEQLRLIEEEERREQERKRRKMARGR

SEQ ID NO: 36382 - protein, 71 aa, Zea mays subsp. mays
MIRNMFGYDPSRYAGRDEDVSDMEADFATIEMEEKRSARIARQEDEEQLRLIEEEERREQERKRRKMARGR

SEQ ID NO: 36383 - DNA, 707 bp, Zea mays subsp. mays
gtcatttttaagacaacaaggagttcatcttcactaagtacatctgctgctgctgagcaagatgaaagtgcaagtgtctccgtttctctcgacaaggtgctcaactgtgctgcatctagcatcactattgctttgccacaagatattatccaccaaaagaagaatatgttagaggttctgctgaactctctttcacccgaggagggttggcaagttaaattgtcatccttcttgtgtatcaaagaattgtgctacaaattttcggattctggtggtagcacggcgtggcctgaaggcacagatgattttgttcaggagatgtttcattcagtggcgtcaaaagtagtagactccatacgcttagttaagattgctcaggttcacgttgctgcttcagagtgccttcttgagttgatcaaattgtatagagacttcccattggaagagagaagagaggccaagttcgagggtgaactaatccaactctgcgagtcagaaaaaagtgaacaggcaaaggcacttctgaagcaatgcttggctgctctcaaagagctcactggcgtaaccatgacgatgggttagatacactcttttcgatacatgtaaaatctgatacatgaaaatactgccagtggcatacttgaaatttatggcaaaatgattgcattgcacatttttaagctatgcaatacgaaaatcagcaattt

SEQ ID NO: 36384 - protein, 193 aa, Zea mays subsp. mays
VIFKTTRSSSSLSTSAAAEQDESASVSVSLDKVLNCAASSITIALPQDIIHQKKNMLEVLLNSLSPEEGWQVKLSSFLCIKELCYKFSDSGGSTAWPEGTDDFVQEMFHSVASKVVDSIRLVKIAQVHVAASECLLELIKLYRDFPLEERREAKFEGELIQLCESEKSEQAKALLKQCLAALKELTGVTMTMG

SEQ ID NO: 36385 - protein, 138 aa, Zea mays subsp. mays
MLEVLLNSLSPEEGWQVKLSSFLCIKELCYKFSDSGGSTAWPEGTDDFVQEMFHSVASKVVDSIRLVKIAQVHVAASECLLELIKLYRDFPLEERREAKFEGELIQLCESEKSEQAKALLKQCLAALKELTGVTMTMG

SEQ ID NO: 36386 - DNA, 631 bp, Zea mays subsp. mays
accgcgagaaatctcaatctcaatccccaaaccgtagcagcagcatcatccctcccctcgcatccgacccccccagccccgatggcccgcacgaagcagacggcgcgcaagtccaccggcggcaaggcgccgaggaagcagctggcgaccaaggcggcgcgcaagtccgccccggccaccggcggcgtgaagaagccccaccgcttccgcccggggaccgtcgccctccgcgagatccgcaagtaccagaagagcacggagctgctcatccgcaaactccccttccagcgcctcgtccgggagatcgcccaggacttcaagaccgacctccgcttccagtcctccgccgtctccgccctgcaggaggccgccgaggcctacctcgtcggcctcttcgaggacaccaacctctgcgccatccacgccaagcgcgtcaccatcatgcccaaggacatccagctcgcgcgccgcatccgtggggagcgcgcctaggctccgcacgcgccctgcccgcttcgcttggttgctagcagctgtctatgattctgtagttgtttgccctccttgtatgtcctgtggatgccatcgattgttcaaatctctggtttgattaatggaatcacacatcttt

SEQ ID NO: 36387 - protein, 175 aa, Zea mays subsp. mays
REKSQSQSPNRSSSIIPPLASDPPSPDGPHEADGAQVHRRQGAEEAAGDQGGAQVRPGHRRREEAPPLPPGDRRPPRDPQVPEEHGAAHPQTPLPAPRPGDRPGLQDRPPLPVLRRLRPAGGRRGLPRRPLRGHQPLRHPRQARHHHAQGHPARAPHPWGARLGSARALPASLGC

SEQ ID NO: 36388 - protein, 163 aa, Zea mays subsp. mays
TARNLNLNPQTVAAASSLPSHPTPPAPMARTKQTARKSTGGKAPRKQLATKAARKSAPATGGVKKPHRFRPGTVALREIRKYQKSTELLIRKLPFQRLVREIAQDFKTDLRFQSSAVSALQEAAEAYLVGLFEDTNLCAIHAKRVTIMPKDIQLARRIRGERA

SEQ ID NO: 36389 - protein, 136 aa, Zea mays subsp. mays; identical to SEQ ID NO: 13956

SEQ ID NO: 36390 - DNA, 1265 bp, Zea mays subsp. mays
tttatgaagtggagtttaaaacgagagataaaaaatgattaagccgctagagatagcctcaccggttgcatcatcgacaatcctgtacctctgtcagtctgtatcctttgcattctctggaacatgtatttcaaacgcaatcaacaatcgtgaatcgtgtgttccaaattgaaacacctgcagctgaggaacctcctgtggcctacttcgaagcacgacgtgtacctggtgcagagctactccgtgacgcactggtctgccctgctccggagaggaagagaggttctcaacgtggccggccggttggccccgacccagaacgtgaagggggctggaccgttgtcgagggttcagatcagcgctatggctgtgaaggacaacctcatggtggccggtggcttccagggagaactcatatgcaagtacgttgatagacccggggtggcattctgcaccagcctgaccggtggcagcagttccatcacgaacgccgtcgacatccaccaggcacccagcggcgccacgcgagtgatggcggcgaacaacgactgcgtcgtcaggacgttcgacgccgagagatacagccttctcacgcagctcaccttcccgtggtccgtcaacagcacgtcggtgagccccgacggcaagctgctggcggtcctgggcgacagcacggagtgcgtgttcgccgacccgcagtcgggcaaggcgctggcgacgctgcgcgggcacctggactactccttcgcgtcggcgtggcaccccgacagccgcgtcctggcgacggggaaccaggacgcgacgtgccggctgtgggacgcgcgcagcctgtcggagccgttcgccgtgctcggggcccggatcggcgccgtccggggcctccgcttctcccccgacggcaggttcctggccgcggccgaggccgccgacttcgtgcacgtgtacgacgccgcggccgggtacgccgacgccgcgcaggaggtggacgtgttcggggaggtcgccggcgccgcgttcagccccgacggcgaggcgctgttcgtgagcgtcgccgaccgtacctacggcggcctgctcgagttccggcgccggcgggcggaccgcttcctcgacgcgtgtttcttctgagggagaggcgcgcgcgcgcgccgtcagttgtgtactgtgcatgtgcctgccggcggccggcacgtatacatacttgtgtggtgtgttgtgtagtgtaaaacgcagagttttggtgcgtatcggacagcgtactggcc

SEQ ID NO: 36391 - protein, 254 aa, Zea mays subsp. mays
MAVKDNLMVAGGFQGELICKYVDRPGVAFCTSLTGGSSSITNAVDIHQAPSGATRVMAANNDCVVRTFDAERYSLLTQLTFPWSVNSTSVSPDGKLLAVLGDSTECVFADPQSGKALATLRGHLDYSFASAWHPDSRVLATGNQDATCRLWDARSLSEPFAVLGARIGAVRGLRFSPDGRFLAAAEAADFVHVYDAAAGYADAAQEVDVFGEVAGAAFSPDGEALFVSVADRTYGGLLEFRRRRADRFLDACFF

SEQ ID NO: 36392 - protein, 247 aa, Zea mays subsp. mays
MVAGGFQGELICKYVDRPGVAFCTSLTGGSSSITNAVDIHQAPSGATRVMAANNDCVVRTFDAERYSLLTQLTFPWSVNSTSVSPDGKLLAVLGDSTECVFADPQSGKALATLRGHLDYSFASAWHPDSRVLATGNQDATCRLWDARSLSEPFAVLGARIGAVRGLRFSPDGRFLAAAEAADFVHVYDAAAGYADAAQEVDVFGEVAGAAFSPDGEALFVSVADRTYGGLLEFRRRRADRFLDACFF

SEQ ID NO: 36393 - protein, 198 aa, Zea mays subsp. mays
MAANNDCVVRTFDAERYSLLTQLTFPWSVNSTSVSPDGKLLAVLGDSTECVFADPQSGKALATLRGHLDYSFASAWHPDSRVLATGNQDATCRLWDARSLSEPFAVLGARIGAVRGLRFSPDGRFLAAAEAADFVHVYDAAAGYADAAQEVDVFGEVAGAAFSPDGEALFVSVADRTYGGLLEFRRRRADRFLDACFF

SEQ ID NO: 36394 - DNA, 986 bp, Zea mays subsp. mays
actcgactcgactgatttgtatcttcctctcccactggtgtaacggagatgcgagggatctcgagtagatcgctttattctttgagccgatcgctgttatcacgcgtaagtcacgggatcacagtggcgacatcaggtggatgctccggggaaactcgtgcgcttggttcactgtggtctgctcttcaaagccgcggcgttaaagttaacgccattcagttaaggccagggaacgttattgaacgaacaggacgtactttccgggttgtagaatcagagcataaacaacaaggcagaggaggagcctccatacaggtagagcttcgagatgttgacaacgggagcaaacttaacctgcggtttggacctgaggagtccgttgaaaaggtttttgttcaggagaaatcgttcacatgtttatatacagagggagatacttcattcctgattgagcccgatacgtttgagcaagttgaggtgccattggacatatttggcaaagctgctgtatatttaaaagaggaaatgagagtccagttgcagctgtatgatggaagagctttatctgcatctgtccctaagcatgtcacatgcacgatccaagaaactcaactaccaatgaaaggcttaacctcagctcctcgttacaagagggctctcctggataatggttctactattcaagtaccatcttatctggaggcaggtgaaaagattgtgataaacaccgaggatgattcttttgtcaagagagacaacaaataaaacgacttgcatagtcaaaatggcgctgtctctcatggaggaagttttatgttgagaagcgttttaatagaaagattaagatgctaatgttactgttattcaagttctcataatctatgaacaccttcattgattaaggtgttacaatttctatacgaaaatttacagattcttgtaaaacatgagtgggtgtctgtctttcaataaaagcgagggctttg

SEQ ID NO: 36395 - protein, 238 aa, Zea mays subsp. mays
MRGISSRSLYSLSRSLLSRVSHGITVATSGGCSGETRALGSLWSALQSRGVKVNAIQLRPGNVIERTGRTFRVVESEHKQQGRGGASIQVELRDVDNGSKLNLRFGPEESVEKVFVQEKSFTCLYTEGDTSFLIEPDTFEQVEVPLDIFGKAAVYLKEEMRVQLQLYDGRALSASVPKHVTCTIQETQLPMKGLTSAPRYKRALLDNGSTIQVPSYLEAGEKIVINTEDDSFVKRDNK

SEQ ID NO: 36396 - DNA, 1592 bp, Zea mays subsp. mays
aatgataattattggagcaagaaaaaagatacttatctactaaggtgaacataaaaacatttttcttccatgtcatctatatttaggtgaaaatacaagtcaattaaccatgcttagtagaacctatcagcaagcagccgcgcagagattatgattatccataatctattgaggtcaatgatgctggatccttccagttagatagctatcatcttcagtctttttcatctcactatagtattttgagggtccagttgctcgcttaactcaattccaaggtgtcaaaaatctattattttccaaattttactgaaacttgtaattttttgcatatgccaggaggagctagtggcattggtctggagacatcaagagtcttccgctgagaggagcccatgtggtcatcgctgctagaaacacagaagctgcatcagaagcaagaaagaccatcatggagaagaacccaacggcacgtattgatgttctgaagctagacctcagctccctcaagtctgtcagggcttttgtggaccagttcaactcgatcaaactccctctgaacatcctgatgtaaccctattcacctcttgttcatgcttgttttttattttcatatatatgaaagtttcctttgatttcgttgaatctatctccagcatatacgtattattacttttagcgcttgttttttttcattcatatatatgaaagtttcctttgcttgttttttctttcatatatatgaaagtttccgcctattttagcgctttcctctttgcactggatcaaggcttgagggaatccttttctgttccacagaaataatgcaggcgtcatgttttgcccttttcagctgtctaaagacggggtcgagatgcagtttgcgacaaatcatctaggtattctctcactgacagcatgacttgcttgaaattgtttttttatcaggacactttctgcttaccaatctcctccttgataccatgaaggccactgccaagtctacgggtattgagggccgcattgtgaatttgtcatcagtcgcccaccaccatacgtatccgaagggaattgacttcgataacctcaatgatgagaaaatgtatgtgcgtttatggttctgctttgtaggaattgtctgttgattgaactgcaagtaatgatcttttattaacttgcagatacaacgacaaaatggcttatggacagtctaagctggcgaacttgctgcatgcgaaggagctctctagaaggctgaaggtatttttttcagggtatcctaatagtattatccatgtctgttactctttcgggaagggtagaaacctgaagagaaacaatttgtccatcatggccctaatgctctgtcctgcttcactgtcatgacgcactaactatataaggggcacccagtaagcaatggccattgcgaactttgggatttagataacttcggaacctttgggatcttgatacatatcagtgtgacttgcagagatgatatgatctcgttcccttttacctatgtatgaaaatccatggttctgatgcatgcctacactggttaaaactctgaaacctactcctggttc

SEQ ID NO: 36397 - protein, 63 aa, Zea mays subsp. mays
MAYGQSKLANLLHAKELSRRLKVFFSGYPNSIIHVCYSFGKGRNLKRNNLSIMALMLCPASLS

SEQ ID NO: 36398 - protein, 53 aa, Zea mays subsp. mays
MKATAKSTGIEGRIVNLSSVAHHHTYPKGIDFDNLNDEKMYVRLWFCFVGIVC

SEQ ID NO: 36399 - protein, 40 aa, Zea mays subsp. mays
MEKNPTARIDVLKLDLSSLKSVRAFVDQFNSIKLPLNILM

SEQ ID NO: 36400 - DNA, 843 bp, Zea mays subsp. mays
aaatagcctcccagccctctctgcctcccgaaaaaacaaacaaacagagatcgcgcttccaatctagctctgcggctgtcgcgaggctccacatttccctccccgcagcgccgaagtaagcatgtgtcccggcggcaggtacgcgggccttgacctccccgccggcgccggcgcgggggacctgcggccggcgttcgacgtgctggacgcggaccacgacggccgcatcagccgcgacgacctcaagaccttctacgccaacgcgggcgccaccgacgagcgcttcgacgacgacgacatcgaggccatgatcaccgccgccgacgccgacctcgacggcttcgtgcagtaccacgagttcgagggcctccttggccgcgcagctaaggcgggggcggacagcggctgccgctcggcgatggaggacgccttccggctaatggaccgcgacggggacggcaaggtcgggttcgaggacctcaaggcctacctcgggtgggccgggatgccggtcgccgacgacgagatccgcgccatgataagtatggctggtgacggcgacagcggcgtggggctcgaggcgctcgccagaatactcgccgtggactttgatgccatcgtctgaagaatctaaaataatcctactgtaaagcactagacttgattttttgggactttttccccctaaaatttggttggtggggagagcaggctggcgtgagattgattgttgtgagtggttctcgttaaccgtgagttttgaatgtatcgtactgttacccataaaaaatcgaaaatctttgagaaacatgaaagatactatgcgtgtatccttggaaactc

SEQ ID NO: 36401 - protein, 167 aa, Zea mays subsp. mays
MCPGGRYAGLDLPAGAGAGDLRPAFDVLDADHDGRISRDDLKTFYANAGATDERFDDDDIEAMITAADADLDGFVQYHEFEGLLGRAAKAGADSGCRSAMEDAFRLMDRDGDGKVGFEDLKAYLGWAGMPVADDEIRAMISMAGDGDSGVGLEALARILAVDFDAIV

SEQ ID NO: 36402 - protein, 105 aa, Zea mays subsp. mays
MITAADADLDGFVQYHEFEGLLGRAAKAGADSGCRSAMEDAFRLMDRDGDGKVGFEDLKAYLGWAGMPVADDEIRAMISMAGDGDSGVGLEALARILAVDFDAIV

SEQ ID NO: 36403 - DNA, 1932 bp, Zea mays subsp. mays
ttgagccacctgttggttgcagggaggtcttacacctattgatgttttttctgttgaatggattcaaagtgggacaatgcattatggtacaaccgtatcatattttggttttgttagcgatgttcttgagctctcagagaagtatcagaagcattttggtcctttacgatactttgtagctggttttctcaaattcctgtgtttgccaaagtacagttttgaattggaatatcttccagtatcagatgttaatggcgccgagcataaaattttggtaggacaagaaaaggttgacacatctgatctatatgatgatgtaattcggagatcaagagcagaatgtttaccacgcgcctcaagtttatctagcattgattcaataatgtctacaggcatcatgtctggggcagagctggaggtttgtagtcctcgtgcaaataatgaaccttctgaggttgttcgtggacttgatccgaaatcaaagcgcttatcgttaggaagagctagtacatttaaagaaccagaagaagtgctccatccccactcccatggtacatctactcccagctggcgtagatctaagtcaaaatcaaggactgaaaaggcaaggccaggcttgtctgctacacacgatgcaaaatcttctaaggttaatgcagcagacaaagaggacacgtcatccacaatttctgatcctggacctgtggctgtatgggattcaggaccaaagtgggacgatgaacctaaatgggataatcaacctaactgggaacccgagacttcaattgagctccatagccctcgcgaggatattgagcttggtctgactaaggagctggtacctagtttagatgaaaggtggactgttaggaaaggacgctatcttggtgtactggtgtgcaaccattcatgcaagactgtgcagagtctgagctctcaggttgttgctcctaaggctgaatatgatgacaattgtttggacctgctgttagttggtggtagtggaagactgagattactgaggtttttggtgcttttgcagtttggaaagcacatatctcttccaaatgtagaatatgtaaaggtgaaatctgtgaggctcaaagcaggcccaaatacacacgacggatgtggtatcgatggcgaactactccatgtcaaggggcaagttcgctgtagtttgttgcctcaacaatgtcaattgatgggcaggccagtgaaaaaccctgtacagtagctgtaaatacactatgcggactgtctgcagctctgaggtcagcccagaatcttgcacctgtggtgtgtacaagcggcgaaccatggattttcgtctgcatccacatgtcagtaaattatattcagaagtgagaacatgaacatcctagctggcactcagctacagagatgtacatttgtggttgacgagcagaaggtgctgagtgggtgctatttcatcccatatgtaaagccaaagcctatctcggacagcagcttgttgcgcacctcttgcttttgcctttttctcgtccgatagaatgcatctactatacagccatcctgatgagtgtacttggttgctccagaacatagtgtccacctccaccagccgggtgtctttggaggttccctgatgccggccacttgatactcattgtagggacaacaccccagtgcccgtgtccttgatcagtctgttgtgtttgcgaagtgtgaataagatataggactgtttgattcccggtacagcgcagggtttcagcagaaagggctggatggatgatgttttgtggcgatgctgcctcgttgagtctttaaaacgggtgtaactcttcttcttttgtgagtcgtgatgatgtatgaaccgtgtactgatttgtaaaccttgcctggcaggcatacaactgtttctgaggtgtggtattctctgccggg

SEQ ID NO: 36404 - protein, 386 aa, Zea mays subsp. mays
MHYGTTVSYFGFVSDVLELSEKYQKHFGPLRYFVAGFLKFLCLPKYSFELEYLPVSDVNGAEHKILVGQEKVDTSDLYDDVIRRSRAECLPRASSLSSIDSIMSTGIMSGAELEVCSPRANNEPSEVVRGLDPKSKRLSLGRASTFKEPEEVLHPHSHGTSTPSWRRSKSKSRTEKARPGLSATHDAKSSKVNAADKEDTSSTISDPGPVAVWDSGPKWDDEPKWDNQPNWEPETSIELHSPREDIELGLTKELVPSLDERWTVRKGRYLGVLVCNHSCKTVQSLSSQVVAPKAEYDDNCLDLLLVGGSGRLRLLRFLVLLQFGKHISLPNVEYVKVKSVRLKAGPNTHDGCGIDGELLHVKGQVRCSLLPQQCQLMGRPVKNPVQ

SEQ ID NO: 36405 - protein, 284 aa, Zea mays subsp. mays
MSTGIMSGAELEVCSPRANNEPSEVVRGLDPKSKRLSLGRASTFKEPEEVLHPHSHGTSTPSWRRSKSKSRTEKARPGLSATHDAKSSKVNAADKEDTSSTISDPGPVAVWDSGPKWDDEPKWDNQPNWEPETSIELHSPREDIELGLTKELVPSLDERWTVRKGRYLGVLVCNHSCKTVQSLSSQVVAPKAEYDDNCLDLLLVGGSGRLRLLRFLVLLQFGKHISLPNVEYVKVKSVRLKAGPNTHDGCGIDGELLHVKGQVRCSLLPQQCQLMGRPVKNPVQ

SEQ ID NO: 36406 - protein, 279 aa, Zea mays subsp. mays
MSGAELEVCSPRANNEPSEVVRGLDPKSKRLSLGRASTFKEPEEVLHPHSHGTSTPSWRRSKSKSRTEKARPGLSATHDAKSSKVNAADKEDTSSTISDPGPVAVWDSGPKWDDEPKWDNQPNWEPETSIELHSPREDIELGLTKELVPSLDERWTVRKGRYLGVLVCNHSCKTVQSLSSQVVAPKAEYDDNCLDLLLVGGSGRLRLLRFLVLLQFGKHISLPNVEYVKVKSVRLKAGPNTHDGCGIDGELLHVKGQVRCSLLPQQCQLMGRPVKNPVQ

SEQ ID NO: 36407 - DNA, 1395 bp, Zea mays subsp. mays
ggcggtttcgaaaaacctttttttttttttttttcttttttttttttttttttttttttttttttttttttttttttttttttttttttttttttttttttttttttttttttattcgatattgaagttatggggtaggtcgcgtaatcaagaactgaagttaaagattttgctacacacctagatatatgtatctagataaaaacattatttgaaacagagagaatacatgtaaacactggaaaataggacatatattcctgttgatatagttgctctggaatacactacagtgatcatggagtaacccatgcaccttggaataattggctcactgtttttcccaagatccattccaaatctgactgggaaactggtatcttgctggcgacatgagaaatcgcctcccttcctcctttgtaaccacattcaggaacaacataggggaagtcacttccccacattactcgactggctccatagtgagatatcacactggaaagaagctgagcagtgtcttcatatggatatgcttctcttgttatgcggaaaagagcactgtatttgacataaacctgtgggaatctggataagcttagaaatgaagagaatgccttctcttcttcatcgttcgttggtggcttgcagaaagccatatggtcaagaataacggtagttgcaggataatccctacacagttcctctatttcttgaatatatggaccaactcccttcatcgtcattattccaagtggtactccaagttcccctgccttcgaaaataatgaccttccaacctcattggtcatcttttgaccagatggccataagtttgggttgaacctcacagcacggtatttttcttgtacaatcagatgttcaagctgtttaatcccagtcccatcgtctgcaggattcgcaagacagcaaccaacgaacttggatgggtatttcttcaacacactagttaccaacgaatgatcaaacatatgattaataggttgaacaataacagccccgtccactccagcttcactcatacactcgagtaagaagtcggcgtcgccacgcagcgtgggttcctggcctgggaagtacgggtactcctccttggcctgctgtggcgtggcccagacgtgcaggtgggagtcgatgaccttgcaggaggaagaagcggccatggcggcggcaatggtggtggtggcggtggagaggagcagccgcctccttgttgctgtggtcgcgaaagagaggaggtcgtgagaggcggtagtggcgcgggggcacaggaaccggcacggggacggggcaaccactggtgatgatgacgataaagccatagagtgcctgccgccgagtactgcgctccacttttcgattaggatgttctaggta

SEQ ID NO: 36408 - protein, 85 aa, Zea mays subsp. mays
MHLGIIGSLFFPRSIPNLTGKLVSCWRHEKSPPFLLCNHIQEQHRGSHFPTLLDWLHSEISHWKEAEQCLHMDMLLLLCGKEHCI

SEQ ID NO: 36409 - protein, 66 aa, Zea mays subsp. mays
MRNRLPSSFVTTFRNNIGEVTSPHYSTGSIVRYHTGKKLSSVFIWICFSCYAEKSTVFDINLWESG

SEQ ID NO: 36410 - protein, 60 aa, Zea mays subsp. mays
AVSKNLFFFFFLFFFFFFFFFFFFFFFFFFFFFFFFFYSILKLWGRSRNQELKLKILLHT

SEQ ID NO: 36411 - DNA, 485 bp, Zea mays subsp. mays
caagttatcatgtttacagaattttcttgcacatgatttcaatatcttggaatctaggctctgcagcattagagaagctatttcaaatgctgaactgcttctgggcattagcctcttgcatagcacaacatcaggtcttccactccatcctttcattgttgaaacgctagaaaatactatggatatgtttagtggaggagagtactcagattttactgaagataagaagtatcaacataccaacttcctgtttgactgcattatagagtcactggattcaaaattctgcaatcttggcaaatgtggatacaaggcttggctgaagttgcctcacagtttgagcaaagatctgttgaagcgccagctattggaaaacatcagcaactggagggagtcaagtgggactgctcttagacaagtttctgacaaagaagtggaccaagtgactgacaggtgggatgcaaaccttgaagcatttgatataa

SEQ ID NO: 36412 - protein, 161 aa, Zea mays subsp. mays
KLSCLQNFLAHDFNILESRLCSIREAISNAELLLGISLLHSTTSGLPLHPFIVETLENTMDMFSGGEYSDFTEDKKYQHTNFLFDCIIESLDSKFCNLGKCGYKAWLKLPHSLSKDLLKRQLLENISNWRESSGTALRQVSDKEVDQVTDRWDANLEAFDI

SEQ ID NO: 36413 - protein, 102 aa, Zea mays subsp. mays
MDMFSGGEYSDFTEDKKYQHTNFLFDCIIESLDSKFCNLGKCGYKAWLKLPHSLSKDLLKRQLLENISNWRESSGTALRQVSDKEVDQVTDRWDANLEAFDI

SEQ ID NO: 36414 - protein, 100 aa, Zea mays subsp. mays
MFSGGEYSDFTEDKKYQHTNFLFDCIIESLDSKFCNLGKCGYKAWLKLPHSLSKDLLKRQLLENISNWRESSGTALRQVSDKEVDQVTDRWDANLEAFDI

SEQ ID NO: 36415 - DNA, 1601 bp, Zea mays subsp. mays
gccgactaggctattgccgccgccgccctacaccagatgcccagttcttcgtcagccccttctccggcaacgagcacctaacaggctgaaaaaaaatcattgatacacgtacgccgtcagaggctgcagtatattctgtgagaatggcatggggtcaaggtgctaagaggtccatactagggcttctctttcgttctcagcaccaaactgctcgggcatactcttcttcagcattccagactcaccaattgagcactcatgttccccaagatggagtgtttattaggagattcggctctgaggtgtcttcttcagagcaaatgaaccttattaagcaactcagacaaagaacgagtgctccaatcaaagatgtcaaggcctctctagttacctgcaactgggatattgaggctgcacagaaggacctaaggaagagaggtgttgctcttgctgccaaaaagtcttcacgcactgctgctgaaggtttgctagctatcgcacaagatgacaaaagggctgctgtagttgagcttaactgtgaaactgatttcgtagcaagaaatgatgttttccagtacctggcttcatcattggcaaagatggctttatctgctcagggtcctggtgaattgttcatccttttggtcctgagcttttagagaacatgcctatcaatctagatcaccctaagctcagtgtggaaacaactgtccaaagtgccgttacagaagttgctgcaatggttggggagaatgtgaaactcagaagaggcttcatgctttccacaactgcacatggtgttgtttcatcttatatgcatacctgccctcagccaggtatgggtcgtatagctggattggtcacactagaaacagaagacagcagtactcttcttgattctgtcaaaagtgttgggtcatctattgcgatgcatattgttgcggcaaagccattattcttatcaaaagaactggtttctgcttcggctttagaaaatgagcgtgaaatacttcgaactcaggcccaaagttcagggaaatcccaaatggctatggataagatggtggaaggacgattgaggaagtactttgaggaagttgtgctcatggagcaaaaatatgttttaaatgacagcactaacattaagaccgtgctgaatgacttgtcgaaagaggttggttctaaggtaacaatcggtaacttcatcagaatggaggttggcgaagggattgagagaactgaagccgctgatggtttagaggttgctggtggcgctatgtagattccaggcagagatggttcgaacgagatcattaggatctatatgaaggtcccacttctctaaagttggggggccttggttttttccaataaaacttttgggctctcatctttgctccattggattgttacaggtgtgggctaggacggagataatgtttaggcaggcactagcgttctgggacctgcgaggctgcctagttgatttgtcagttcctagcttgtttggttacagttttggttgaaccctctctgattgaattacagttcgtgtggacgtataaaaaatcgaaatagagtgggaattgccccttgaactc

SEQ ID NO: 36416 - protein, 205 aa, Zea mays subsp. mays
MPINLDHPKLSVETTVQSAVTEVAAMVGENVKLRRGFMLSTTAHGVVSSYMHTCPQPGMGRIAGLVTLETEDSSTLLDSVKSVGSSIAMHIVAAKPLFLSKELVSASALENEREILRTQAQSSGKSQMAMDKMVEGRLRKYFEEVVLMEQKYVLNDSTNIKTVLNDLSKEVGSKVTIGNFIRMEVGEGIERTEAADGLEVAGGAM

SEQ ID NO: 36417 - protein, 180 aa, Zea mays subsp. mays
MVGENVKLRRGFMLSTTAHGVVSSYMHTCPQPGMGRIAGLVTLETEDSSTLLDSVKSVGSSIAMHIVAAKPLFLSKELVSASALENEREILRTQAQSSGKSQMAMDKMVEGRLRKYFEEVVLMEQKYVLNDSTNIKTVLNDLSKEVGSKVTIGNFIRMEVGEGIERTEAADGLEVAGGAM

SEQ ID NO: 36418 - protein, 171 aa, Zea mays subsp. mays
MAWGQGAKRSILGLLFRSQHQTARAYSSSAFQTHQLSTHVPQDGVFIRRFGSEVSSSEQMNLIKQLRQRTSAPIKDVKASLVTCNWDIEAAQKDLRKRGVALAAKKSSRTAAEGLLAIAQDDKRAAVVELNCETDFVARNDVFQYLASSLAKMALSAQGPGELFILLVLSF

SEQ ID NO: 36419 - DNA, 405 bp, Zea mays subsp. mays
acgaattactgtacctttgatactcgttcaacggagttcgagacctcgtccggtaatgtccgccgcggcggcgcttttaccacggccaccaccgccaaatcctgccgccaccgtccattcactcttcgcctacctatccgacccggccgccctccaccacctacccgccccgctccttgccttctcccaactccgccacctgctgccgcccgccgccgccacccaactcctccttcgccccatcgcctcgctcctccaactccaccgctccgacctccgcataggcctccagcttcacgggctctccctgtccctcggcctctcctgctactcgcacttactgccccgcctcctctccttctactcacttaccccaaagtgctccgtgcctgtgccgagaccggg

SEQ ID NO: 36420 - protein, 135 aa, Zea mays subsp. mays
TNYCTFDTRSTEFETSSGNVRRGGAFTTATTAKSCRHRPFTLRLPIRPGRPPPPTRPAPCLLPTPPPAAARRRHPTPPSPHRLAPPTPPLRPPHRPPASRALPVPRPLLLLALTAPPPLLLLTYPKVLRACAETG

SEQ ID NO: 36421 - protein, 134 aa, Zea mays subsp. mays
RITVPLILVQRSSRPRPVMSAAAALLPRPPPPNPAATVHSLFAYLSDPAALHHLPAPLLAFSQLRHLLPPAAATQLLLRPIASLLQLHRSDLRIGLQLHGLSLSLGLSCYSHLLPRLLSFYSLTPKCSVPVPRP

SEQ ID NO: 36422 - protein, 116 aa, Zea mays subsp. mays
MSAAAALLPRPPPPNPAATVHSLFAYLSDPAALHHLPAPLLAFSQLRHLLPPAAATQLLLRPIASLLQLHRSDLRIGLQLHGLSLSLGLSCYSHLLPRLLSFYSLTPKCSVPVPRP

SEQ ID NO: 36423 - DNA, 440 bp, Zea mays subsp. mays
agcagaagcgatgtggcgcatgtaggtttcgtgtaccctttttacagatgctatttctgttctatcacaaaagaggtcagttggaaaaaaaaaaccttttctctggtcgatcagctgtgtagctagaacacaagaacagttattagctacacgcgatcgaggcccgcctgatggaaactgctgcatgcttgtgagtaggggactgccaacaccaaaggggagaagaacatgtgcgtggtcggagccatcaacaactacacggcggcgctgaaagactcatcaagtccatttgatccgacggaragcttgatgttcctggcgcacttcgtcggcgacgtccaccagcctctccactgcggccacaccgacgacctcggcggcaacaccatcgtcgtccactggtaccgaaggaagaccaacctgcaccacgtctgggacgt

SEQ ID NO: 36424 - protein, 70 aa, Zea mays subsp. mays
  misc_feature (25)..(25): Xaa can be any naturally occurring amino acid
MCVVGAINNYTAALKDSSSPFDPTXSLMFLAHFVGDVHQPLHCGHTDDLGGNTIVVHWYRRKTNLHHVWD

SEQ ID NO: 36425 - protein, 43 aa, Zea mays subsp. mays
MFLAHFVGDVHQPLHCGHTDDLGGNTIVVHWYRRKTNLHHVWD

SEQ ID NO: 36426 - protein, 41 aa, Zea mays subsp. mays
SRSDVAHVGFVYPFYRCYFCSITKEVSWKKKTFSLVDQLCS

SEQ ID NO: 36427 - DNA, 565 bp, Zea mays subsp. mays
atgctcgataaatctctccatcaggcagcacctagctagcagcagccaatgacgaagccttcgcaggtgctgttggcggcgctcgccgcctgggcggtggtcctgctgctgctgtgcgccgccgcgccgcggggcgccgacgcggtgacggcgtgcgacgccacgcagctgacgccgtgcgccggcgccatcatcatcgggaggtcgcccagcgcggcgtgctgcagtaggctcaaggagcagcagccgtgcctgtgcacgtacgcgcgcgaccccaatcttcagcgctacgtcaactcgcccaacggcaagaaggccatggccgcgtgcaaggtgcccgtgccgtcgtgctagttaacttctgtttgcgccgccgccgcgtacgtgtcgtgtcgtgcctgtgtcagtagcagcaaggcccactggacagggacagagtatggcgtcactttctgtttccgtacatacgtacctggatcgtgccgtgtatgcgtgttccctggtggtactcgatccgctgcctgttgtgtctaccgagctctttggacagctacgcgtgcgtatg

SEQ ID NO: 36428 - protein, 101 aa, Zea mays subsp. mays
MTKPSQVLLAALAAWAVVLLLLCAAAPRGADAVTACDATQLTPCAGAIIIGRSPSAACCSRLKEQQPCLCTYARDPNLQRYVNSPNGKKAMAACKVPVPSC

SEQ ID NO: 36429 - DNA, 835 bp, Zea mays subsp. mays
ggttaactttcacgtccggatgcaaattcgcctcggtcgttcaaccaaacaagctcactcccggccatcaggcgcacaccgctctcccgccgccgtcctgcgtcggagcgatatccctacatccccacctcatttgcacccggattggcttcttcttctactactactggaactctctttgcgatcccaaaatcgcaaaataaaggtaaatcaaaaggaaccgacttaggagctggaatgacatctaggagctttacgaaggaagagatctctaaacataacacaaggaaggactgttggatcgtcatcaaggacaaggtctatgatgtcactccttatgtagaggagcatccaggcggagatgccattctaaataatgctggtggtgattccacagagggcttttttgggccacagcacggcactagggtcttcgatatcatcgaggatttctgcatcggtcagttgaaggcatagggtagcttgtattgaattcgtggaattttccggaaatcaagttttgagaagctacatgttatccaacattttaagcattgcaaccttcaagcatttgagatgccagtataattgttccacaattgtcatcggggctgctaggagctgtgatgtagcacttcgtttttattctgctgttgtgtgactgtgtctttacatttctgttgttggacaagactccaaaacgcttgtaattgttctggctaagggcccgttcggttattcaggaatctactccagaaaggatttcagctggaataattgtataatttgtataacaattagtaacctggaatagttcctagtcttgttccagcct

SEQ ID NO: 36430 - protein, 79 aa, Zea mays subsp. mays
MTSRSFTKEEISKHNTRKDCWIVIKDKVYDVTPYVEEHPGGDAILNNAGGDSTEGFFGPQHGTRVFDIIEDFCIGQLKA

SEQ ID NO: 36431 - protein, 75 aa, Zea mays subsp. mays
VNFHVRMQIRLGRSTKQAHSRPSGAHRSPAAVLRRSDIPTSPPHLHPDWLLLLLLLELSLRSQNRKIKVNQKEPT

SEQ ID NO: 36432 - protein, 69 aa, Zea mays subsp. mays
MQIRLGRSTKQAHSRPSGAHRSPAAVLRRSDIPTSPPHLHPDWLLLLLLLELSLRSQNRKIKVNQKEPT

SEQ ID NO: 36433 - DNA, 1483 bp, Zea mays subsp. mays
acccgattcggatccgattccgcggcaggcggcattcccagcctcccaaacccatttccctctccgatcaaatcaaatcaaactcaaaccgacacgggacccacgccgcatctccgcctccgcagatcgccgccgcctactcgcgcccctccgcgcgccgatggccgccgcggacccgccgccgcgcggggaggccgcgcccgcgctgaagcggagcgccagcatcgaccggataccggcggacgcgcgccgcatcctgcaccgcctcgccggggacctctggggcggcgacgtggaccccggcgcgctggccgtgtcccagctcaggggcgccatgaccaacgaggtcttccggatcacctggcccggcggcgaggccgagggcaacggcccgcgcaaggtgctcgtgcgcatctacggccggggcgtcgaggtcttcttcgaccgcgccgacgaggtccgcaccttcgagtgcatgtcgcgccacggccagaggccccgcctcctgggccgcttcgccaacggccgcgtcgaggagttcatcaacgccaggaccctctccgccgcggatctgcgcgacccggagatgtccgcgctgattgccaggaagctgcgcgagtttcacgatctcgacatgcctggacctagggacgtgtcattgtggcagaggctcaagcggtggcttggggaggctcgtgacaggtgttctgaggaagagtctaaccaatttcagctgaataaactaggtgatgagatttcagtgctggagaagacgctctcggggctccaacagtcagtaggattctgccataacgatctgcagtatggaaatattatgatatatgaagagaccagacaagtcaccttgatagactatgaatatgcgagttttaacccagtcgcattcgacattgctaatcacttctgtgagatggctgctgattaccatacatcaacaccacatgtgttggattttacgaaatatcctgacactggggagcagagaagattcgttgaggcataccttagctctgcaggtaaaaagccaacggatggggaagttgaagaactgctagggttgatagcaaagtacactcttgcgagccatctcttctggggcctgtggggaataatctcggcgcacgtgaacgaaaatatcgacttcgcgtacaaggagtatgcaaggcagcgcttggatcagtactggcaaacaaaacctcgaattcttggacccaagtgatgagtcgttgctttttgtagggggtccttggccagctagtcatgtgaattctgtttgtcagtagcggctagtagctgccagtttttgactgcagattgttcagctcgctgtgacctgtgtcgtgaccatattcttgacttacggggtgtaattattttgcctggtcttaggctaaggtaaccagtctttctatcctaatgtaaatagtacagtctataatgaccttatcctcacatggttctg

SEQ ID NO: 36434 - protein, 412 aa, Zea mays subsp. mays
PDSDPIPRQAAFPASQTHFPLRSNQIKLKPTRDPRRISASADRRRLLAPLRAPMAAADPPPRGEAAPALKRSASIDRIPADARRILHRLAGDLWGGDVDPGALAVSQLRGAMTNEVFRITWPGGEAEGNGPRKVLVRIYGRGVEVFFDRADEVRTFECMSRHGQRPRLLGRFANGRVEEFINARTLSAADLRDPEMSALIARKLREFHDLDMPGPRDVSLWQRLKRWLGEARDRCSEEESNQFQLNKLGDEISVLEKTLSGLQQSVGFCHNDLQYGNIMIYEETRQVTLIDYEYASFNPVAFDIANHFCEMAADYHTSTPHVLDFTKYPDTGEQRRFVEAYLSSAGKKPTDGEVEELLGLIAKYTLASHLFWGLWGIISAHVNENIDFAYKEYARQRLDQYWQTKPRILGPK

SEQ ID NO: 36435 - protein, 359 aa, Zea mays subsp. mays
MAAADPPPRGEAAPALKRSASIDRIPADARRILHRLAGDLWGGDVDPGALAVSQLRGAMTNEVFRITWPGGEAEGNGPRKVLVRIYGRGVEVFFDRADEVRTFECMSRHGQRPRLLGRFANGRVEEFINARTLSAADLRDPEMSALIARKLREFHDLDMPGPRDVSLWQRLKRWLGEARDRCSEEESNQFQLNKLGDEISVLEKTLSGLQQSVGFCHNDLQYGNIMIYEETRQVTLIDYEYASFNPVAFDIANHFCEMAADYHTSTPHVLDFTKYPDTGEQRRFVEAYLSSAGKKPTDGEVEELLGLIAKYTLASHLFWGLWGIISAHVNENIDFAYKEYARQRLDQYWQTKPRILGPK

SEQ ID NO: 36436 - protein, 301 aa, Zea mays subsp. mays
MTNEVFRITWPGGEAEGNGPRKVLVRIYGRGVEVFFDRADEVRTFECMSRHGQRPRLLGRFANGRVEEFINARTLSAADLRDPEMSALIARKLREFHDLDMPGPRDVSLWQRLKRWLGEARDRCSEEESNQFQLNKLGDEISVLEKTLSGLQQSVGFCHNDLQYGNIMIYEETRQVTLIDYEYASFNPVAFDIANHFCEMAADYHTSTPHVLDFTKYPDTGEQRRFVEAYLSSAGKKPTDGEVEELLGLIAKYTLASHLFWGLWGIISAHVNENIDFAYKEYARQRLDQYWQTKPRILGPK

SEQ ID NO: 36437 - DNA, 669 bp, Zea mays subsp. mays
acctcctcacgacgtgaggaatcgatcaggccaccgccgtacccgtcggagatccgctccgcccgcgcgatttcgatccgaaacacctcgtcggatcttcagggatctgactgaggggcagcgcgccggctgctgacacggcgggcacgcgcgcagccagccatggcgcgtggtggcggaggcggctgctgcccgccaatggatctgatgcgatcggaggcgatgcagctggtgcaggtcatcatacccgctgagtcagcgcacctcaccgtctcctacctcggagacctcggcctcctccagttcaaagacgtatggttgcttgcccctgctcgtcccttcgattacgggggtggggcgatccaacttgctccggagctgaatccctttcgatctaagatagtggtttggtgataagtaggacttcgtgatcggggcttcctgggagttagagagggtgtcctgtgggcattgcgattttggggaatttgcagctataacgtgcaattgtttgctgtttactgttcttcagcgttggaattgtggtataatggttcacattggtgtgattggttgtagttggagccatgaatttagcataggaatgtttttattgggaattatcttgcatatgcagaatttccagtagtcaatgaaaattacagttcc

SEQ ID NO: 36438 - protein, 83 aa, Zea mays subsp. mays
MARGGGGGCCPPMDLMRSEAMQLVQVIIPAESAHLTVSYLGDLGLLQFKDVWLLAPARPFDYGGGAIQLAPELNPFRSKIVVW

SEQ ID NO: 36439 - protein, 71 aa, Zea mays subsp. mays
MDLMRSEAMQLVQVIIPAESAHLTVSYLGDLGLLQFKDVWLLAPARPFDYGGGAIQLAPELNPFRSKIVVW

SEQ ID NO: 36440 - protein, 68 aa, Zea mays subsp. mays
MRSEAMQLVQVIIPAESAHLTVSYLGDLGLLQFKDVWLLAPARPFDYGGGAIQLAPELNPFRSKIVVW

SEQ ID NO: 36441 - DNA, 1741 bp, Zea mays subsp. mays
atcctgactgcaactctgaacagcgaagcacccatggccctcgccaccacagccgtctccctccaccttttcctcacccggcccgcctccgtgctccgcgtaggccgcggcctcccatgcctcctcctccgagccacttcgtccacctccgcctccccggacttcaacatcaccttcgcggagcccgcgccgtccaaaaaggccccgtccgcgcagccgctggtcccgtggatcgtccgcggggaggacggcaagccccgcctcagcacctccccgccgccggacgtaatccaggccatcgcgctcgcggaggcggaggccaagaaggccgccaacaaggaaaccctcaagggccagaatggccagttgccgccgccgccgcggctgcttccaatgccagcgtcaagggcaaggaaaggaagcccgccccgaccgtgccgcccaagttctccaaggcagccaggaggttttacaatgagaatatcaaggagcgggagccgcaacggctcgccaaggtccttgccgccgcaggagtggcatcaagaaggaccagtgaggagctcatcttccaagggaaggtgactgtcaatggttcagtctgtacttctcctcagaccaaagttgacatctcaaaggattctatctacgttaacgggaaccgcatttccaagaagttgcctccaaagctgtattttgctgttaacaagccaaaggggtacatttgctcatgtggtgaagagtcaaaatctgttgtctccttatttaatgattatttgaagggctggaacaagattcaaccagggttgccaaaaccacgcttgtttactgtgggtcgtcttgatgttgccacggctggtctgataatagtcacaaatgatggtgagtttgctcaaaagcttgcacatccttcttcaaatgtaacaaaagaatatgtggtgactattgatggtgccgtgcacaaaaaacatctcatagctatcagtgaaggcacaaaaattgatggggtcatgtgcattcctgatttagtagaaccattggctgcccaatcagatacaagaaagacccgcctaaggatagtggttcatgaaggacggaatcatgaagttcgtgaacttgtacagaatgcagggctacaggtttatgcattgaaacgtgttcggataggcaggttcaggcttccagcagatctgggaattgggaagtttgttgagctcaaacaggctgatatcaaggcactagatggcaacaactagagatgacatctgatgtggctaataagcgcatcttgtccaaagatggtagtaatcctcaaagtcacaatacatgagctgctactcaactcagaaagcttgtgaatgttctggatgtccattggtggtggtggctgatgatcaagtgtggcaaacatgttttgccttgaagaacttgtgaactactccatacttcgcctgcgctgcgaatctccacatcatatcaaacggcagaaccaagtccgcgatgcagcagtcgtttggtgaggatggaacattgtcaaatagcgatcttctgttggcatatacattttactctctattctaaattataatttttttagatgcattgtttttactaaattaaaatatcttatagtttagaatgcatcttgtccaacaggtagtcaataatggcagacgagttatatttggccaaattacattgtactccgtgtaccgagaactgtttttttaagaatcctttattg

SEQ ID NO: 36442 - protein, 416 aa, Zea mays subsp. mays
PDCNSEQRSTHGPRHHSRLPPPFPHPARLRAPRRPRPPMPPPPSHFVHLRLPGLQHHLRGARAVQKGPVRAAAGPVDRPRGGRQAPPQHLPAAGRNPGHRARGGGGQEGRQQGNPQGPEWPVAAAAAAASNASVKGKERKPAPTVPPKFSKAARRFYNENIKEREPQRLAKVLAAAGVASRRTSEELIFQGKVTVNGSVCTSPQTKVDISKDSIYVNGNRISKKLPPKLYFAVNKPKGYICSCGEESKSVVSLFNDYLKGWNKIQPGLPKPRLFTVGRLDVATAGLIIVTNDGEFAQKLAHPSSNVTKEYVVTIDGAVHKKHLIAISEGTKIDGVMCIPDLVEPLAAQSDTRKTRLRIVVHEGRNHEVRELVQNAGLQVYALKRVRIGRFRLPADLGIGKFVELKQADIKALDGNN

SEQ ID NO: 36443 - protein, 378 aa, Zea mays subsp. mays
MPPPPSHFVHLRLPGLQHHLRGARAVQKGPVRAAAGPVDRPRGGRQAPPQHLPAAGRNPGHRARGGGGQEGRQQGNPQGPEWPVAAAAAAASNASVKGKERKPAPTVPPKFSKAARRFYNENIKEREPQRLAKVLAAAGVASRRTSEELIFQGKVTVNGSVCTSPQTKVDISKDSIYVNGNRISKKLPPKLYFAVNKPKGYICSCGEESKSVVSLFNDYLKGWNKIQPGLPKPRLFTVGRLDVATAGLIIVTNDGEFAQKLAHPSSNVTKEYVVTIDGAVHKKHLIAISEGTKIDGVMCIPDLVEPLAAQSDTRKTRLRIVVHEGRNHEVRELVQNAGLQVYALKRVRIGRFRLPADLGIGKFVELKQADIKALDGNN

SEQ ID NO: 36444 - DNA, 548 bp, Zea mays subsp. mays
aaaagaagggagtgaagcgtgtacacgtacggccctataatatatatagatagcaagacagagcattcccttgcaccaccacaaccagtcctcacataatcatcttcattcactcactctcttcgatcactgtactgaagataccatggccaagtcgaccgcgatgtttgtagccgccctggccctggtggtggtgatggcgacgacgagcacaggcggtggcagggcggcagcggcgtgcgatcccaagccgctggtggtgtgcgatccggcgttcatggacggagcgaaacccgcggcagcatgctgctccaccctgcgtgcgcaggaggcatgcttgtgcgtgtacgccaaagaccccaagtttgcaaaatacatcaacaaccccaacaccgccaaaacctttacctcatgcggcatagccatccccaaatgctaagcaagcgctctgcgtcgtcgcttcgcttgctcttgctcttgtgtgtaacatatccagcttatgaataaattatgtggatcagttaattaaaaaaaaaaaaaaaaaagct

SEQ ID NO: 36445 - protein, 97 aa, Zea mays subsp. mays
MAKSTAMFVAALALVVVMATTSTGGGRAAAACDPKPLVVCDPAFMDGAKPAAACCSTLRAQEACLCVYAKDPKFAKYINNPNTAKTFTSCGIAIPKC

SEQ ID NO: 36446 - protein, 91 aa, Zea mays subsp. mays
MFVAALALVVVMATTSTGGGRAAAACDPKPLVVCDPAFMDGAKPAAACCSTLRAQEACLCVYAKDPKFAKYINNPNTAKTFTSCGIAIPKC

SEQ ID NO: 36447 - protein, 80 aa, Zea mays subsp. mays
MATTSTGGGRAAAACDPKPLVVCDPAFMDGAKPAAACCSTLRAQEACLCVYAKDPKFAKYINNPNTAKTFTSCGIAIPKC

SEQ ID NO: 36448 - DNA, 1074 bp, Zea mays subsp. mays
aatcgaaaacagcgcaagtgttgtagtatactgaaccctcaaaaaaactaactagctagcttagctaaccccatggacatggaccccaggttcaacgtcgactggagtgccaacgagatcgagatggtgagatctctcatcgcttgtcacggcgccagcaacagcacgaacgacgacattctggatgagctccaggcaatgttcccagggaaggataagcgccaggtaactgacttgtacgttgagcttgtggtggagatgataaacagtggggcagagctgagcagcaaccagctcctgctcaactctggtggggtgcacagcaggacgatggatgggtatttagcagacgagatgaaggcgaagaggatgctgctggaggaacagcgccgtaggaaattagttgctgttcctcgacaggataaccaacaacgtgcagggaggttttggactctagaggagcacaggaatttcctgcgtggcctgcgtgtgtacgggcgcggcaattggaagaacatctccaaggacttcgtcaccactaagacgccggtgcaggtctccagccatgcacagaagtacttccggaggcaggagagcaccacaaggaagcagcgctacagcatcaacgacgtcggcctctacgatgctgagccatgggaggagcagcagcagcagcagcagaacagctcactgccggctttcactagcaccaacaataatgcttattacaacccatactgctatgcctttggtggtggccagcagcagctcgcatcatcccccttccagtgccatgccagtcaggcgagcagcagcagccagacagcagtcacctgggctgcaggaggtcagcagccaccgatttgctcttctgcagctccacccatgatggaggggggtggggctgaaatgtcatggaccacttattattagctagctactagcttcgagattttgttcctaagctgttaaatctcgttgttgaagacaacatgtatggtagtttaagtagtagtttcttcatttcaatgaactagtaacaattaatgtgttcccgaaaaaaaaaaaaaaaaa

SEQ ID NO: 36449 - protein, 286 aa, Zea mays subsp. mays
MDMDPRFNVDWSANEIEMVRSLIACHGASNSTNDDILDELQAMFPGKDKRQVTDLYVELVVEMINSGAELSSNQLLLNSGGVHSRTMDGYLADEMKAKRMLLEEQRRRKLVAVPRQDNQQRAGRFWTLEEHRNFLRGLRVYGRGNWKNISKDFVTTKTPVQVSSHAQKYFRRQESTTRKQRYSINDVGLYDAEPWEEQQQQQQNSSLPAFTSTNNNAYYNPYCYAFGGGQQQLASSPFQCHASQASSSSQTAVTWAAGGQQPPICSSAAPPMMEGGGAEMSWTTYY

SEQ ID NO: 36450 - protein, 284 aa, Zea mays subsp. mays
MDPRFNVDWSANEIEMVRSLIACHGASNSTNDDILDELQAMFPGKDKRQVTDLYVELVVEMINSGAELSSNQLLLNSGGVHSRTMDGYLADEMKAKRMLLEEQRRRKLVAVPRQDNQQRAGRFWTLEEHRNFLRGLRVYGRGNWKNISKDFVTTKTPVQVSSHAQKYFRRQESTTRKQRYSINDVGLYDAEPWEEQQQQQQNSSLPAFTSTNNNAYYNPYCYAFGGGQQQLASSPFQCHASQASSSSQTAVTWAAGGQQPPICSSAAPPMMEGGGAEMSWTTYY

SEQ ID NO: 36451 - protein, 269 aa, Zea mays subsp. mays
MVRSLIACHGASNSTNDDILDELQAMFPGKDKRQVTDLYVELVVEMINSGAELSSNQLLLNSGGVHSRTMDGYLADEMKAKRMLLEEQRRRKLVAVPRQDNQQRAGRFWTLEEHRNFLRGLRVYGRGNWKNISKDFVTTKTPVQVSSHAQKYFRRQESTTRKQRYSINDVGLYDAEPWEEQQQQQQNSSLPAFTSTNNNAYYNPYCYAFGGGQQQLASSPFQCHASQASSSSQTAVTWAAGGQQPPICSSAAPPMMEGGGAEMSWTTYY

SEQ ID NO: 36452 - DNA, 1552 bp, Zea mays subsp. mays
ctcaatccgcctcgcccgcagcgcccccccccccacttcctttccctctctcacggcggcggcgagatgaaggtaacggtaatgaccggcgacgagcagatcgtcaccctcgacgtcgaccgcgacgaatccgtggaaaatctcaaggcgctactcgaagtggagactcgggtgccgctgcggcagcagcagattcacttcaatgggaaggagatgcagaacacggagaagctcagcgccgctggggtccaggacggcgaccttgtcatgatgttttccaccagcgaaaggccatctcaggatggcttaagggtaaatcctgatggaactgctgtgaatcctcaagcttttcaacaacatgctcgaggtgattcacaacttatggcacagctccttcagaatgatcctcaactagcacaagctatccttggggatgacaccactgagctacagaatatcctgcggtcccgccaccaacaaagaacagaactaaaacgtaaacaagaagaagagcttgctttattgtatgctgatccttttgatgtggaagcccagaagaaaattgaagctgcaatccggcagaaaggcatagatgaaaattgggaggctgcattagagcacaatcctgaagcatttgcccgagtggtaatgctatatgtggatatggaggtcaatggtgtacctttgaaggcttttgttgacagcggagcgcaatcgactatcatatcaaaaagttgcgctgaacgttgcgggttgctgaggcttcttgatcagcggttccgagggattgctgttggagtcggtcaatcagagatactaggaagaatacatgtagccccaataaagattgggaatatattctatccttgttctttcaccgtattggatgctcctaatatggaattcctattcggacttgacatgctgcgaaagcatcagtgcatgattgacctaaaggacaatgttctcagagtgggaggtggcgaagtttcagtgcccttcttacaagagaaagacatccctgcacacatacgcaatgaagagaaactgtctaagttagggtctctcagccaagcaactggagagtcatcaaggacacgtgagggtactcccaatgcgctacaacaaacccctccaggagctccagctgcaaaccctccacagggaggagattttgaagcgaaagtcacgaagcttgtggagctcggttttgacagggcgtcggtgacacaagcgctcaagttgttcaacgggaatgaggagcaagctgctgcgttcttgtttggtggttagactggtgggagcagccgttcctggctttgtgttcgctcaaccctttccagggttgagtacttgaatatttgatacgaaagtgattaaagtatttggatactgtttgtccagtgaaaggacttacttttagaggttttatgttttctcttgtttctgagaacaaacatttgttttctgtacctgatacatagactgatagacaccagaatggagacagaactgtgaagatttttttttattaagagtgtttatttgagcc

SEQ ID NO: 36453 - protein, 430 aa, Zea mays subsp. mays
LNPPRPQRPPPHFLSLSHGGGEMKVTVMTGDEQIVTLDVDRDESVENLKALLEVETRVPLRQQQIHFNGKEMQNTEKLSAAGVQDGDLVMMFSTSERPSQDGLRVNPDGTAVNPQAFQQHARGDSQLMAQLLQNDPQLAQAILGDDTTELQNILRSRHQQRTELKRKQEEELALLYADPFDVEAQKKIEAAIRQKGIDENWEAALEHNPEAFARVVMLYVDMEVNGVPLKAFVDSGAQSTIISKSCAERCGLLRLLDQRFRGIAVGVGQSEILGRIHVAPIKIGNIFYPCSFTVLDAPNMEFLFGLDMLRKHQCMIDLKDNVLRVGGGEVSVPFLQEKDIPAHIRNEEKLSKLGSLSQATGESSRTREGTPNALQQTPPGAPAANPPQGGDFEAKVTKLVELGFDRASVTQALKLFNGNEEQAAAFLFGG

SEQ ID NO: 36454 - protein, 408 aa, Zea mays subsp. mays
MKVTVMTGDEQIVTLDVDRDESVENLKALLEVETRVPLRQQQIHFNGKEMQNTEKLSAAGVQDGDLVMMFSTSERPSQDGLRVNPDGTAVNPQAFQQHARGDSQLMAQLLQNDPQLAQAILGDDTTELQNILRSRHQQRTELKRKQEEELALLYADPFDVEAQKKIEAAIRQKGIDENWEAALEHNPEAFARVVMLYVDMEVNGVPLKAFVDSGAQSTIISKSCAERCGLLRLLDQRFRGIAVGVGQSEILGRIHVAPIKIGNIFYPCSFTVLDAPNMEFLFGLDMLRKHQCMIDLKDNVLRVGGGEVSVPFLQEKDIPAHIRNEEKLSKLGSLSQATGESSRTREGTPNALQQTPPGAPAANPPQGGDFEAKVTKLVELGFDRASVTQALKLFNGNEEQAAAFLFGG

SEQ ID NO: 36455 - protein, 403 aa, Zea mays subsp. mays
MTGDEQIVTLDVDRDESVENLKALLEVETRVPLRQQQIHFNGKEMQNTEKLSAAGVQDGDLVMMFSTSERPSQDGLRVNPDGTAVNPQAFQQHARGDSQLMAQLLQNDPQLAQAILGDDTTELQNILRSRHQQRTELKRKQEEELALLYADPFDVEAQKKIEAAIRQKGIDENWEAALEHNPEAFARVVMLYVDMEVNGVPLKAFVDSGAQSTIISKSCAERCGLLRLLDQRFRGIAVGVGQSEILGRIHVAPIKIGNIFYPCSFTVLDAPNMEFLFGLDMLRKHQCMIDLKDNVLRVGGGEVSVPFLQEKDIPAHIRNEEKLSKLGSLSQATGESSRTREGTPNALQQTPPGAPAANPPQGGDFEAKVTKLVELGFDRASVTQALKLFNGNEEQAAAFLFGG

SEQ ID NO: 36456 - DNA, 1097 bp, Zea mays subsp. mays
attccattcgccgttcccgttctcctctccccctgtcgcctccatagcagcagcagctccagctcgagcaagaaagaactagtttgatctgtgaaaatgttggccatcttccagaagcaggtggcgcacgcgccgcaggagctcaacagcccgcgcggcagcaccgccaagcccaagaaccccgacgagatcctccgcgacttccacgccgcccacccctccgacgccttctccacctccttcggcggcggcgccgccctcgcctgcatcgccgcgcagccccgcaacctcgccgccggcgggtaccagaggatgttctgcgggctggacgacatctactgcgtcttcatggggacgctggacaacctgagcgcgctgatgcggcagtacggcctcacgggccgctccaccaacgaggcgctgctggtgatcgaggcctaccgcaccctgcgcgaccggggcccctaccctgctgaccaggtggtgaaggacctgtcgggctccttcgccttcgtcgtcttcgacaaccgcggccggtccggctccggggcggccgtgttcgcggcgcagagcacggacggcggcgtgccgctgcactggggcgtggcggcggacgggtcggtggtgatctgcgacgaccgcgccgtggccaaggccgggtgcgggcggtcctacgcgccgttcccgcccgggtgcatgttccacagcgagggcgggctcaagagcttcgagcaccccatgaaccggctcaaggcgctcccgcgggtggacagcgagggcgtcatgtgcggcgccaacttcaaggtcgacgccttcaccaagatcaactccatgccccgcgtcggtagcgccaccaactgggccgccacctgggacgaagccgccatctgatatagccatcgtcgctccccggcgccggcgacgctcgcctagctcgtcggacttctggatttgggcttactgcattttacttatttttttctttggcaatgtacattctgaatctgatctgatctgagccgtgtgtgggcgtgggcacgctgacacgtacggttgtttgcttgtacgatggaggaataagactttgcttccagtcc

SEQ ID NO: 36457 - protein, 264 aa, Zea mays subsp. mays
MLAIFQKQVAHAPQELNSPRGSTAKPKNPDEILRDFHAAHPSDAFSTSFGGGAALACIAAQPRNLAAGGYQRMFCGLDDIYCVFMGTLDNLSALMRQYGLTGRSTNEALLVIEAYRTLRDRGPYPADQVVKDLSGSFAFVVFDNRGRSGSGAAVFAAQSTDGGVPLHWGVAADGSVVICDDRAVAKAGCGRSYAPFPPGCMFHSEGGLKSFEHPMNRLKALPRVDSEGVMCGANFKVDAFTKINSMPRVGSATNWAATWDEAAI

SEQ ID NO: 36458 - protein, 192 aa, Zea mays subsp. mays
MFCGLDDIYCVFMGTLDNLSALMRQYGLTGRSTNEALLVIEAYRTLRDRGPYPADQVVKDLSGSFAFVVFDNRGRSGSGAAVFAAQSTDGGVPLHWGVAADGSVVICDDRAVAKAGCGRSYAPFPPGCMFHSEGGLKSFEHPMNRLKALPRVDSEGVMCGANFKVDAFTKINSMPRVGSATNWAATWDEAAI

SEQ ID NO: 36459 - protein, 180 aa, Zea mays subsp. mays
MGTLDNLSALMRQYGLTGRSTNEALLVIEAYRTLRDRGPYPADQVVKDLSGSFAFVVFDNRGRSGSGAAVFAAQSTDGGVPLHWGVAADGSVVICDDRAVAKAGCGRSYAPFPPGCMFHSEGGLKSFEHPMNRLKALPRVDSEGVMCGANFKVDAFTKINSMPRVGSATNWAATWDEAAI

SEQ ID NO: 36460 - DNA, 725 bp, Zea mays subsp. mays
aaaaaccctagcagttcggtagtccctctcctctcgaggtggcggcgctccccccgtcttcttcttcttcttcttcctgtactatatagcctcccctcgcaaatcgtcactgacgttcattccgcttgcttgattgttccaggtattagcagtcgaccggttcctcggagcacgatgaagtttgttgctgcctacctgcttgctgtcctcgctgggaacgccagcccctccgctgacgatttgactgccattctggagtcagttggctgtgaagttgacaatgaaaagatggaactcctgctgtcccaactgagcggtaaggacatcaccgagctcattgccgcgggcagggagaagtttgcttcagtcccatgtggtggcggcggtgtcgctgttgcggcagctgcacctgctgctggcggagctgctcctgcagctgaggcaaagaaagaagagaaggtggaagagaaggaagaaagcgatgatgatatgggcttcagcctcttcgactaggctgcacagtcatcacagtattgttttgggcagtgaaaccagaggaaaaccagagtcatgtttagattttaagcttgttttatgttggaaagtactggaaagactgctacttgtctttatatttggtaattcagccgtagattgctatgctggttgggatttactcgtgaaccagagtttttctgtcttatatatcctgaattggttatccc

SEQ ID NO: 36461 - protein, 170 aa, Zea mays subsp. mays
KNPSSSVVPLLSRWRRSPRLLLLLLPVLYSLPSQIVTDVHSACLIVPGISSRPVPRSTMKFVAAYLLAVLAGNASPSADDLTAILESVGCEVDNEKMELLLSQLSGKDITELIAAGREKFASVPCGGGGVAVAAAAPAAGGAAPAAEAKKEEKVEEKEESDDDMGFSLFD

SEQ ID NO: 36462 - protein, 112 aa, Zea mays subsp. mays
MKFVAAYLLAVLAGNASPSADDLTAILESVGCEVDNEKMELLLSQLSGKDITELIAAGREKFASVPCGGGGVAVAAAAPAAGGAAPAAEAKKEEKVEEKEESDDDMGFSLFD

SEQ ID NO: 36463 - DNA, 1757 bp, Zea mays subsp. mays
ggttggcgcgcgctcccgtcctaaccaagcaaaacccacaaccctagcctccgccgcgccgccatctgccgggcctccctccggtcccggccgaccgtagcctcgcagcaccctaaccctatccctcccccgctgccgcgggagcagggtaaaaaaatgccgcgtgagatcatcacgatccaggtggggcaatgtggaaaccagatcgggatggagttctggaagcagctctgtctcgagcacggtatcggcaaggacggcctgctcgaggacttcgccactcaggggggcgacaggaaggacgtcttcttttaccaggctgatgatcagcacttcatacccaggtctctgcttattgacctggagccgagagtgatcaatggaatccagaacagtgagtacaggaacctgtacaaccacgagaacatatttgtcgctgagcatggtggtggtgccgggaacaactgggccagtgggtatcatcagggtgaacaagttgttgatgatatcatggacatggttgacagagaagcagatggaagtgatagccttgagggttttgtcctttgtcattctattgctggtggaactggttcaggtatgggttcttatctgttggagacactgaatgatcgatacagtaaaaagcttgtgcagacatatagtgttttcccaaatcagatggaaacaagtgatgttgtcgtccaaccttacaactcacttttaactctgaagcgtctgacactgaatgctgactgtgtggtggttcttgacaatacggctcttaataggattgcggtcgagcgtcttcatttatcaaatcctacatttgcacaaacaaactctttggtctccacagttatgtctgcaagcacaactacattgcggtatcctggatatatgaacaatgatctggttggccttcttgcctccctgatccccactccaaggtgtcattttttgatgacaggctatactccactgactgttgagcgccaggttaacatgatacgcaaaacaacagtattggatgttatgagaagacttctgcagacaaagaatgtaatggtgtcatcatatgctcgaacaaaagaagccagccaggctaaatatatctccatattgaacatcattcaaggggaggtggaccctacacaggttcatgagagcctgcaaaggatacgtgaaaggaagcttgttaactttatagactgggcacctgcaagcattcaggttgccctgtcaagaaaatccccatatgttcaaacaacccacagggttagtggtctgatgttagctaatcatacgagcatccgccacctgttcggcaaatgcctgggacaatatgaaaagctaaggaaaaagcaggcttttcttgacaactataggaaattcccaatgtttgcagataatgatctctctgaatttgatgaatctcgagagataatagagagcctagttgatgaatacaaggcctgtgagtcgccagactacattaaatggggaatggaggaccctggagaggcaaacgttgcagcagatcttgactctaagttggtagtgtaaatataaaggtaccatttcatgaatcatgatcaggcactttatatgcggaaacaatttgatgtcctatcatattgattattgattgaattgacaatccacttgaacaccactctttcttttgatagccatgtggactacatcaattattataaatgatccacaatctctgctacatgttgaaaatgattgct

SEQ ID NO: 36464 - protein, 469 aa, Zea mays subsp. mays
MPREIITIQVGQCGNQIGMEFWKQLCLEHGIGKDGLLEDFATQGGDRKDVFFYQADDQHFIPRSLLIDLEPRVINGIQNSEYRNLYNHENIFVAEHGGGAGNNWASGYHQGEQVVDDIMDMVDREADGSDSLEGFVLCHSIAGGTGSGMGSYLLETLNDRYSKKLVQTYSVFPNQMETSDVVVQPYNSLLTLKRLTLNADCVVVLDNTALNRIAVERLHLSNPTFAQTNSLVSTVMSASTTTLRYPGYMNNDLVGLLASLIPTPRCHFLMTGYTPLTVERQVNMIRKTTVLDVMRRLLQTKNVMVSSYARTKEASQAKYISILNIIQGEVDPTQVHESLQRIRERKLVNFIDWAPASIQVALSRKSPYVQTTHRVSGLMLANHTSIRHLFGKCLGQYEKLRKKQAFLDNYRKFPMFADNDLSEFDESREIIESLVDEYKACESPDYIKWGMEDPGEANVAADLDSKLVV

SEQ ID NO: 36465 - protein, 451 aa, Zea mays subsp. mays
MEFWKQLCLEHGIGKDGLLEDFATQGGDRKDVFFYQADDQHFIPRSLLIDLEPRVINGIQNSEYRNLYNHENIFVAEHGGGAGNNWASGYHQGEQVVDDIMDMVDREADGSDSLEGFVLCHSIAGGTGSGMGSYLLETLNDRYSKKLVQTYSVFPNQMETSDVVVQPYNSLLTLKRLTLNADCVVVLDNTALNRIAVERLHLSNPTFAQTNSLVSTVMSASTTTLRYPGYMNNDLVGLLASLIPTPRCHFLMTGYTPLTVERQVNMIRKTTVLDVMRRLLQTKNVMVSSYARTKEASQAKYISILNIIQGEVDPTQVHESLQRIRERKLVNFIDWAPASIQVALSRKSPYVQTTHRVSGLMLANHTSIRHLFGKCLGQYEKLRKKQAFLDNYRKFPMFADNDLSEFDESREIIESLVDEYKACESPDYIKWGMEDPGEANVAADLDSKLVV

SEQ ID NO: 36466 - protein, 351 aa, Zea mays subsp. mays
MDMVDREADGSDSLEGFVLCHSIAGGTGSGMGSYLLETLNDRYSKKLVQTYSVFPNQMETSDVVVQPYNSLLTLKRLTLNADCVVVLDNTALNRIAVERLHLSNPTFAQTNSLVSTVMSASTTTLRYPGYMNNDLVGLLASLIPTPRCHFLMTGYTPLTVERQVNMIRKTTVLDVMRRLLQTKNVMVSSYARTKEASQAKYISILNIIQGEVDPTQVHESLQRIRERKLVNFIDWAPASIQVALSRKSPYVQTTHRVSGLMLANHTSIRHLFGKCLGQYEKLRKKQAFLDNYRKFPMFADNDLSEFDESREIIESLVDEYKACESPDYIKWGMEDPGEANVAADLDSKLVV

SEQ ID NO: 36467 - DNA, 1441 bp, Zea mays subsp. mays
accatccactgcgatacttcagacagctcttcttgcgttgcctactaagctctctctctctctctttctctcttgtgttcttgccttctgcctactacgagtgatggccagcctcactgacctcgtcaacctcgacctgagtgactgcacagacaggatcatcgccgagtacatctgggttggaggatccggcatagacctcaggagcaaagcaaggacggtgaaaggccccatcaccgatccgagccagctgccaaaatggaactacgacggctccagcaccgggcaggctcccggagaggacagcgaagtcatcctctaccctcaagtcattttcaaggacccgttcaggaagtgtaacaacatccttgtgatgtgtgactgctacacgccacaaggcgagccaatccccagtaacaagaggtacaaagctgccacggttttcagccaccccgatgttgcagctgaggtgccatggtacggtattgagcaggagtacactctccttcagaaggatgtgagctggccccttggctggcctgttggtggataccctggtccccagggaccatactactgtgctgccggtgccgataaggcctttgggcgcgacgtggttgacgcccactacaaagcctgcctctacgccggcatcaacatcagcggcatcaacggcgaagtcatgcctggacagtgggagttccaagtcgggccgtccgttgggatctctgccggcgacgagatatgggtcgcccgctacattctcgagaggatcactgagatggccggaatcgttctctccctcgacccgaagccgatcaagggtgactggaacggcgccggcgctcacaccaactacagcaccaagtcgatgagggaggccggtggctacgaggtgatcaaggaggcgatcgagaagctggggaagaggcacagggagcacatcgccgcgtacgacgggggcaacgagcgccgcctcacgggccgccacgagaccgccgacatcaacaccttcaaatggggcgtggcgaaccgcggcggctccatccgcgtcggccgcgacaccgagaaggagggcaagggatatttcgaggaccgcaggccggcttccaacatggacccctacgtcgtcaccggcatgatcgccgacaccaccatcctgtggaagggaaactgataaaaccactgttcttctcctgcacgcatgcatccgccccgtgctgtcactttttgttttttcaaatttcgattcccgtcctaaagtttgttaccacttattattacggtctccagtgtactgctcggaaagtccgaataaaaacggctctaatgattttgttttttttaaaaaaaaatttgccttcgccataggtgtacgattggctgcgcttcccgtttattgggtactagtacaattgatatgaatcaattgccattaacg

SEQ ID NO: 36468 - protein, 391 aa, Zea mays subsp. mays
PSTAILQTALLALPTKLSLSLFLSCVLAFCLLRVMASLTDLVNLDLSDCTDRIIAEYIWVGGSGIDLRSKARTVKGPITDPSQLPKWNYDGSSTGQAPGEDSEVILYPQVIFKDPFRKCNNILVMCDCYTPQGEPIPSNKRYKAATVFSHPDVAAEVPWYGIEQEYTLLQKDVSWPLGWPVGGYPGPQGPYYCAAGADKAFGRDVVDAHYKACLYAGINISGINGEVMPGQWEFQVGPSVGISAGDEIWVARYILERITEMAGIVLSLDPKPIKGDWNGAGAHTNYSTKSMREAGGYEVIKEAIEKLGKRHREHIAAYDGGNERRLTGRHETADINTFKWGVANRGGSIRVGRDTEKEGKGYFEDRRPASNMDPYVVTGMIADTTILWKGN

SEQ ID NO: 36469 - protein, 357 aa, Zea mays subsp. mays
MASLTDLVNLDLSDCTDRIIAEYIWVGGSGIDLRSKARTVKGPITDPSQLPKWNYDGSSTGQAPGEDSEVILYPQVIFKDPFRKCNNILVMCDCYTPQGEPIPSNKRYKAATVFSHPDVAAEVPWYGIEQEYTLLQKDVSWPLGWPVGGYPGPQGPYYCAAGADKAFGRDVVDAHYKACLYAGINISGINGEVMPGQWEFQVGPSVGISAGDEIWVARYILERITEMAGIVLSLDPKPIKGDWNGAGAHTNYSTKSMREAGGYEVIKEAIEKLGKRHREHIAAYDGGNERRLTGRHETADINTFKWGVANRGGSIRVGRDTEKEGKGYFEDRRPASNMDPYVVTGMIADTTILWKGN

SEQ ID NO: 36470 - protein, 267 aa, Zea mays subsp. mays
MCDCYTPQGEPIPSNKRYKAATVFSHPDVAAEVPWYGIEQEYTLLQKDVSWPLGWPVGGYPGPQGPYYCAAGADKAFGRDVVDAHYKACLYAGINISGINGEVMPGQWEFQVGPSVGISAGDEIWVARYILERITEMAGIVLSLDPKPIKGDWNGAGAHTNYSTKSMREAGGYEVIKEAIEKLGKRHREHIAAYDGGNERRLTGRHETADINTFKWGVANRGGSIRVGRDTEKEGKGYFEDRRPASNMDPYVVTGMIADTTILWKGN

SEQ ID NO: 36471 - DNA, 1216 bp, Zea mays subsp. mays
gcacgagaccattacctagaacatcctaatcgaaaaatccccgcagttctcattccagtctccacacacctctcacgagcgcgcgcgcgcgcgtccgccatggcgccgtctaagcctttattccccgtcgccgtccccgcccccgacccgtccgacgaggtcgtgcgcgagttcggcccactgctccggatctacaagagcggccgcatcgagcggcccctggtggccccgcccgtggagcctggccacgacgccgccacgggcgtccagtccaaggacgtccacctcggctcctactccgcgcggctctacctgcccccaagcgccggcgccggcgccaagctgcccgtcgtcgtgtacgtccacggcggcggcttcgtggccgagtccgccgcctcgcccaactaccacctcttcctcaacaggctcgccgccgcctgccccgcgctcgccgtctccgtcgactaccgcctggcgcccgagcaccctctgccggcgggctacgacgactgcctcgccgcgctcaagtgggtgctctccgccgccgacccatgggtcgccgcccacggggacctcgcccgcgtcttcgtcgccggggacagcgccggcggcaacgtctgccaccacctcgccatccacccggacgtcgtccaggcccagcgcgcgcgacaggccggcgcgccgccgctcaagggcgccgtgctcatccacccctggttctggggctccgaggccgtgggcgaggagcccagggaccccgccgcgcgcgccatgggcgtcggactctggctcttcgcgtgccccgagaccaacggtctggacgacccgcggataaaccccttggcgcccgccgcgccgggactccacacgctggcgtgcgagcgcgtgatggtgtgcgccgcggagggcgacttccttaggtggcgcggccgcgcgtacgccgaggcggtggccgcggccaggggcggtgacctcggcgaggccgctggcgtcgagctgttggagaccatgggagagggccacgtcttcttcctcttcaaacccgactgccacgaggctaaggagatgatgcacaagatggtcgccttcatcaatgccccctgaggcgtgaggtgcttgtgtcgcgtctcagaatcatcgttggcgtggctagctgtacgccaccgtctcagacaattatcgtgacagcggggaaaataaaggccttggatccgtg

SEQ ID NO: 36472 - protein, 367 aa, Zea mays subsp. mays
ARDHYLEHPNRKIPAVLIPVSTHLSRARARASAMAPSKPLFPVAVPAPDPSDEVVREFGPLLRIYKSGRIERPLVAPPVEPGHDAATGVQSKDVHLGSYSARLYLPPSAGAGAKLPVVVYVHGGGFVAESAASPNYHLFLNRLAAACPALAVSVDYRLAPEHPLPAGYDDCLAALKWVLSAADPWVAAHGDLARVFVAGDSAGGNVCHHLAIHPDVVQAQRARQAGAPPLKGAVLIHPWFWGSEAVGEEPRDPAARAMGVGLWLFACPETNGLDDPRINPLAPAAPGLHTLACERVMVCAAEGDFLRWRGRAYAEAVAAARGGDLGEAAGVELLETMGEGHVFFLFKPDCHEAKEMMHKMVAFINAP

SEQ ID NO: 36473 - protein, 334 aa, Zea mays subsp. mays
MAPSKPLFPVAVPAPDPSDEVVREFGPLLRIYKSGRIERPLVAPPVEPGHDAATGVQSKDVHLGSYSARLYLPPSAGAGAKLPVVVYVHGGGFVAESAASPNYHLFLNRLAAACPALAVSVDYRLAPEHPLPAGYDDCLAALKWVLSAADPWVAAHGDLARVFVAGDSAGGNVCHHLAIHPDVVQAQRARQAGAPPLKGAVLIHPWFWGSEAVGEEPRDPAARAMGVGLWLFACPETNGLDDPRINPLAPAAPGLHTLACERVMVCAAEGDFLRWRGRAYAEAVAAARGGDLGEAAGVELLETMGEGHVFFLFKPDCHEAKEMMHKMVAFINAP

SEQ ID NO: 36474 - DNA, 1916 bp, Zea mays subsp. mays
  misc_feature (1883)..(1883): n is a, c, g, or t
accccacgcccgtcttccttgcctcaacgtcgccaccaaatccaaccgcctggacgccaccgccccgccccaccttggcgccgccgctccatccaactgcctggacgccaccgccctgccccaccttggcgccactgctccatccaactgcctcgacgggtgtctgctcctcactacctggccgtgttcaagatgccccctggaaggatggatggggcaaggacacgcaaagaccttggtgaggtgccaattactgagtatgaaaaggagagggctttaaatgtgatgaggaacaacaaaatgttgagtagtcttggtataactggattaacatcacttattcgatcaagtagtacaaggaagaactctatcgctcgtgaagactttgatccattgtatgaacctgatcatagtgaggacaatgatcatcatgtggctgatcaggatgaacctttctgcattgaaagaaggaccaccaacatgtctactggttttggaggaacaaaaggatccaagagagtggtagcacctaatgtagaagaccaagttggtagagtaactaggcagaagacaaaggaactatccttagttgagaaagatatacatggttcgactgcaaatacagatgagcacacattgatttctgccaatttttctgcacaccatgatgaccagattcagatgtgtgatgaaggtcaaatagatgtcatgacagataaatggataaggggaaaaagtatgggcaaacaattggaaaggataagtcgaggcttaaacactaagatcccattggtcatcactgaagggaatagacgtcctgaggttcctatgcaagctgcaatgcttgcatcagaaggaggaattgtaattaggcaacatatgccgatcctaacacactggaaggaatacaagaatgacaaatcctatttggaagacttcgtcggtagaattggtggtcaatttgccatagacaccaaaaacaaagatgtcaaatatgcatgtgctgatttgatgaggtgtaatcagcgacaaatgagatataagctcaagaaggcttactttaatggtgtggcagctgacaaagtgagaacaacatcaccgttgagtactatgacagatgagcaatggatgcaactcgtcaatatgtggtctaccccaaagcacaaggataaatgtgtgaacaacaaagtgattcgtggaaaagttcggttccagcaaaagacaggatctcggagttacattgcacatatgcatgtcgtgaagcaagccaaatatggagatgcaccaccaagtgcgattgatctttttaaagagtgccattgtagtaggaagactggttttgctgagcctgtaaaggaagcaattgacacaatggaagcacttgtggctgagcctggagtagaagggaaagaatctaagacccctacagaagcagttgctcaagtgttgtcttcatcaaaatttctttataatatcggtcttgtacccaccacaaagaaaagctgcaatggtggtgatcctacatgtgtggcagaacttgaggctgaacttgaatcagagaagcaaaactcattagaagttagagctcagttagataccctaaagaagaaggtagaagaatcagaagaagcaagggctaaggagttagaaaagatcaatgatctgcaaaaaggagcagatgagaccaatgctctccttcgtcgtctctttagcctcaataagtagttggtcgattgtgccctgattttgctgtcctatttgtactctgctttgcactctacttgatgctggtgataaaacatgatgatagttttaattttgatatgtccttttggtactgtccttagcacactactagatgctggtgtgatgaaacatggtgncaattttgaaaaatttgaaggatttggttgttg

SEQ ID NO: 36475 - protein, 574 aa, Zea mays subsp. mays
TPRPSSLPQRRHQIQPPGRHRPAPPWRRRSIQLPGRHRPAPPWRHCSIQLPRRVSAPHYLAVFKMPPGRMDGARTRKDLGEVPITEYEKERALNVMRNNKMLSSLGITGLTSLIRSSSTRKNSIAREDFDPLYEPDHSEDNDHHVADQDEPFCIERRTTNMSTGFGGTKGSKRVVAPNVEDQVGRVTRQKTKELSLVEKDIHGSTANTDEHTLISANFSAHHDDQIQMCDEGQIDVMTDKWIRGKSMGKQLERISRGLNTKIPLVITEGNRRPEVPMQAAMLASEGGIVIRQHMPILTHWKEYKNDKSYLEDFVGRIGGQFAIDTKNKDVKYACADLMRCNQRQMRYKLKKAYFNGVAADKVRTTSPLSTMTDEQWMQLVNMWSTPKHKDKCVNNKVIRGKVRFQQKTGSRSYIAHMHVVKQAKYGDAPPSAIDLFKECHCSRKTGFAEPVKEAIDTMEALVAEPGVEGKESKTPTEAVAQVLSSSKFLYNIGLVPTTKKSCNGGDPTCVAELEAELESEKQNSLEVRAQLDTLKKKVEESEEARAKELEKINDLQKGADETNALLRRLFSLNK

SEQ ID NO: 36476 - protein, 510 aa, Zea mays subsp. mays
MPPGRMDGARTRKDLGEVPITEYEKERALNVMRNNKMLSSLGITGLTSLIRSSSTRKNSIAREDFDPLYEPDHSEDNDHHVADQDEPFCIERRTTNMSTGFGGTKGSKRVVAPNVEDQVGRVTRQKTKELSLVEKDIHGSTANTDEHTLISANFSAHHDDQIQMCDEGQIDVMTDKWIRGKSMGKQLERISRGLNTKIPLVITEGNRRPEVPMQAAMLASEGGIVIRQHMPILTHWKEYKNDKSYLEDFVGRIGGQFAIDTKNKDVKYACADLMRCNQRQMRYKLKKAYFNGVAADKVRTTSPLSTMTDEQWMQLVNMWSTPKHKDKCVNNKVIRGKVRFQQKTGSRSYIAHMHVVKQAKYGDAPPSAIDLFKECHCSRKTGFAEPVKEAIDTMEALVAEPGVEGKESKTPTEAVAQVLSSSKFLYNIGLVPTTKKSCNGGDPTCVAELEAELESEKQNSLEVRAQLDTLKKKVEESEEARAKELEKINDLQKGADETNALLRRLFSLNK

SEQ ID NO: 36477 - protein, 505 aa, Zea mays subsp. mays
MDGARTRKDLGEVPITEYEKERALNVMRNNKMLSSLGITGLTSLIRSSSTRKNSIAREDFDPLYEPDHSEDNDHHVADQDEPFCIERRTTNMSTGFGGTKGSKRVVAPNVEDQVGRVTRQKTKELSLVEKDIHGSTANTDEHTLISANFSAHHDDQIQMCDEGQIDVMTDKWIRGKSMGKQLERISRGLNTKIPLVITEGNRRPEVPMQAAMLASEGGIVIRQHMPILTHWKEYKNDKSYLEDFVGRIGGQFAIDTKNKDVKYACADLMRCNQRQMRYKLKKAYFNGVAADKVRTTSPLSTMTDEQWMQLVNMWSTPKHKDKCVNNKVIRGKVRFQQKTGSRSYIAHMHVVKQAKYGDAPPSAIDLFKECHCSRKTGFAEPVKEAIDTMEALVAEPGVEGKESKTPTEAVAQVLSSSKFLYNIGLVPTTKKSCNGGDPTCVAELEAELESEKQNSLEVRAQLDTLKKKVEESEEARAKELEKINDLQKGADETNALLRRLFSLNK

SEQ ID NO: 36478 - DNA, 842 bp, Zea mays subsp. mays
atcggggaccgtatttgcctgggatctgcggcagccacaggagctgataccaatctctgttctaggtcttaatgaaacagctgagcctgtgtgtgaaagtgaggtttgggaggttcttttcgacacttacactaagtcttccgatatcatctcatctgcatctgcaagaatattgccagtgatgatgtgttcagaggatgggatccttgcagtcgtcgaacaagataagagaccccttgaattgcttgctgaatcttgtgccatcaactccttcgacatagatcctcagaacccctctgatgttgtttgcgcattagaatgggaatcggtcggtgtcctaactcgtggtagagatgcaatgtcagaagaatgaaaattttcatcacccagggatctcaatcagatttttttccaaggtggatgaaactgctatcagaaagaatcttctgaattctgagggcttccatattcagtcaccattctaatgcccgtgaccatgggcaacggtagaaggaataaagcgtgcatgacgaatgccttttcctgtctttgcatactaaccaacactgtcttgtaccgttggaagttttactctgttgtcatgggtagttgcagattgcagaaaccttttctgggctagcttcaagatgtgtaattgctcttggatgccaactgctgacagtttgaaggagtggtcacaaacaattcaatccttttagctgggggctgatgaactgaagctataattagtttcataatgtttgcttgtggtattaaattggctcctgaacaatatggactccgatacatattttatttatctggcttaccatttagattcc

SEQ ID NO: 36479 - protein, 123 aa, Zea mays subsp. mays
SGTVFAWDLRQPQELIPISVLGLNETAEPVCESEVWEVLFDTYTKSSDIISSASARILPVMMCSEDGILAVVEQDKRPLELLAESCAINSFDIDPQNPSDVVCALEWESVGVLTRGRDAMSEE

SEQ ID NO: 36480 - protein, 63 aa, Zea mays subsp. mays
MMCSEDGILAVVEQDKRPLELLAESCAINSFDIDPQNPSDVVCALEWESVGVLTRGRDAMSEE

SEQ ID NO: 36481 - protein, 62 aa, Zea mays subsp. mays
MCSEDGILAVVEQDKRPLELLAESCAINSFDIDPQNPSDVVCALEWESVGVLTRGRDAMSEE

SEQ ID NO: 36482 - DNA, 600 bp, Zea mays subsp. mays
acttcatctgcagctacggatactgctacaacggcatgaagctccacgccacagcaaagtcatcctcatcctcctcttcctcgtcgccgtccggatctgactcctcctcctcctcctctgacaacgatgacgacgactcttcctccccctcgccgcccgccaagaagtccaaggccaagaccagcgccgcgccgccaccgtcagtcctcgctgccacgcccatggctaccgccgccgccgccgccgctctgctcctcaacaggatgctctgatctgatctggtctgcgttactgcgtatgtagtcacgtggctccagatcttgcttgggcgctgatgagctacactacactacactagttttttctgcttcttttagttttttcccccctcaccccttgagattggggaggcctcttctgcttctagcttgcttgcttgctgcttcttgaattgcgtgactgttattggttggttcttgcttccattattttgccttttctttctttctttctttcttgcttccagcttgttgttgacgatgcagtttttttttttcaagggacaagattagtataatgtcaagtgtgaatgaagagctc

SEQ ID NO: 36483 - protein, 89 aa, Zea mays subsp. mays
FICSYGYCYNGMKLHATAKSSSSSSSSSPSGSDSSSSSSDNDDDDSSSPSPPAKKSKAKTSAAPPPSVLAATPMATAAAAAALLLNRML

SEQ ID NO: 36484 - protein, 78 aa, Zea mays subsp. mays
MKLHATAKSSSSSSSSSPSGSDSSSSSSDNDDDDSSSPSPPAKKSKAKTSAAPPPSVLAATPMATAAAAAALLLNRML

SEQ ID NO: 36485 - protein, 58 aa, Zea mays subsp. mays
MTTTLPPPRRPPRSPRPRPAPRRHRQSSLPRPWLPPPPPPLCSSTGCSDLIWSALLRM

SEQ ID NO: 36486 - DNA, 1467 bp, Zea mays subsp. mays
ctcaaaaagatggcagcacagcacagtcgggatttgtttgggatgaaaaatctggttactactatgattctgcatctggattctattatgatggaactactggcctttactatgacagcaactctggagtttggtattcatatgatcaacagactcaacaatatgtcccttgtaatgaccagagcaacactaaggcagccggggaggcggccagcgaaaacacgaaaacctcagatagtaatagtggcaaaaaggttgtgatctctgcgcctgctgccacaattaaacaaagtgagaaaacttcacttcctgacgctgttcaagctgctgcaaatgctgcactggctgcagaaaagagagaaaaggagaaggcaaaagagattaaattggcctcaaaaaatagtctcatagctaataagaagatgagcaatgtcctagctatgtggaagcaaaggaatcaagaagggcaggccgcacgaattgtccttgatgacaaagaaccagcaaattctgatgataaatttagtcattcacgtagtggaactggattctctttgaaaagcaagccaaattctgaccttgaaaatgctatgggcaattctcttggccaaggaatgacatcgactcaaacattggattctgttgtaaagcctagacctgtcagtaacagcttagggactacagttatgggtgtcataagaggttctgctagaggagtgatcaagtcagatactacgtttcacgcattatctgatgctggtagcactgattcccgcaccactataaccacaagagcaagtgggttaatgacaagttctgaggcacttataactcctgcacccttcaaaactgatgtgtctgccttagtctctaatactccatcgggagtttctgggagtggtaaacgtcggttttctgaggcaccgggacaatcccagtacagggatcgagctgcagaaagacgaaatctgtatggatcatctcatggcactgatactgttggattggattcaatgagatagggtcgatgccgtttcctcctggtgtgggtgaacgttccagtggtgaaattggcaacagcgaaaactatgaagttattaccgctgatagagcaatcgatgaaagcaatgtgggcaaccgcattctacgcaacatggggtggcaggagggactgggtctcggaaaggatgccagcggtatcaaggaaccagtcctggcaaaatccgtcgacgccagggctggactgggaagtcagcagcggaagcctgatccatcccttgaagcccaagccggggacagctacaaaaccatcatccagaagaaggccatggcaagattcaaggagatgtcttagctacactgttttatctattttattgctgcattttgtagtccgtttttaacagcatgcatttttttgtttgctcgtgtgttttttaaataaactgagccgctgaattgtgattt

SEQ ID NO: 36487 - protein, 339 aa, Zea mays subsp. mays
QKDGSTAQSGFVWDEKSGYYYDSASGFYYDGTTGLYYDSNSGVWYSYDQQTQQYVPCNDQSNTKAAGEAASENTKTSDSNSGKKVVISAPAATIKQSEKTSLPDAVQAAANAALAAEKREKEKAKEIKLASKNSLIANKKMSNVLAMWKQRNQEGQAARIVLDDKEPANSDDKFSHSRSGTGFSLKSKPNSDLENAMGNSLGQGMTSTQTLDSVVKPRPVSNSLGTTVMGVIRGSARGVIKSDTTFHALSDAGSTDSRTTITTRASGLMTSSEALITPAPFKTDVSALVSNTPSGVSGSGKRRFSEAPGQSQYRDRAAERRNLYGSSHGTDTVGLDSMR

SEQ ID NO: 36488 - protein, 199 aa, Zea mays subsp. mays
MSNVLAMWKQRNQEGQAARIVLDDKEPANSDDKFSHSRSGTGFSLKSKPNSDLENAMGNSLGQGMTSTQTLDSVVKPRPVSNSLGTTVMGVIRGSARGVIKSDTTFHALSDAGSTDSRTTITTRASGLMTSSEALITPAPFKTDVSALVSNTPSGVSGSGKRRFSEAPGQSQYRDRAAERRNLYGSSHGTDTVGLDSMR

SEQ ID NO: 36489 - protein, 193 aa, Zea mays subsp. mays
MWKQRNQEGQAARIVLDDKEPANSDDKFSHSRSGTGFSLKSKPNSDLENAMGNSLGQGMTSTQTLDSVVKPRPVSNSLGTTVMGVIRGSARGVIKSDTTFHALSDAGSTDSRTTITTRASGLMTSSEALITPAPFKTDVSALVSNTPSGVSGSGKRRFSEAPGQSQYRDRAAERRNLYGSSHGTDTVGLDSMR

SEQ ID NO: 36490 - DNA, 1831 bp, Zea mays subsp. mays
aatcaattcgaatcctattcgttgggctcgctttcttcagttgcattacttggcccacacaaactcttcccaataaattacgacccccagccaagctttggagtgcggttcccaaccatggcggcctcccccacttcctccctcgccccgccggtggtgcctatggagcttcacgccggcaaccgcgaccgcctcgtcgccgcgctccgcggccacatctccgcctccgcgcgcccgctccacggcctcgtcctccttcagggcggggaggagaagacacggtactgcaccgatcacctcgagctcttcaggcaggagagctacttcgcctatctctttggagtgcaggaaccagggttctacggcgcaattgacatcgcctctggacagtcaattttgttcgctccaagattgccagctgactatgctgtttggatgggtgaaataaaacctttgtcgtacttcagggatacatacaaggttgatatggtcttctatgttgatgagattgcaagggttgtgcaagatcatttcgggaaccatggaaagcctcttctgtttctgctacatgggaggaatactgactctggaaatttctcaaagcctgctagttttgaggggatggagaactttgatactgatttaattacacttcatccaattttaaccgaatgtcgtgtgattaaatctgatctggagcttgctctcatccggtatgctaatgatgtcagttctgaagctcacattgaggttatgagacgagcaaggccaggcatgaaggaatatcaattagaaagtatcttccttcaccatgtttatatgtatggaggttgccgacattgctcttatacatgtatatgtgctactggagataatagtgctgttctacattatggacatgcggcagctccaaatgaccggactttgaatgatggagacatagcactaatggatatgggagctgaataccatttctatggatctgatatcacatgctcataccctataaatgggaaattcaacagaagtcagacaataatatacaatgctgtgcttaaggctcataatgctgttatatcagacatgcggcctggagttaattggatggatatgcacaaattagcagaacgggcaatacttgaatctctcaggaaggaacaaattgtacaaggggatgttgatgatatgatggctcaaaggttaggggctgttttcatgcctcatggtcttggccacttacttggtattgacacccatgatccaggaggctaccctgagggattggagaggcccaaggatccaggactgaactccttgcggaccacaagagaactgaaagaaggaatggttatcacagtggagccaggctgctatttcattgatgctttgctaactaaaacaagggatgatccaatttcctcaaagttcttcaactggcaagaggttgaaaagtataaaagctttggtggcgttcgcattgaaagtgatgtgtatgtgacggctcaaggatgccggaacctcacaaactgcccgagagagacctgggagatcgaggctgtaatggctggcgcaccatggcctctgccggcttcaagttctatggtggtagcagcagagaatagcaatgacatatctaaagcgtcgtaattttctctatgctcaatccatatcccgagttgaaacaaattcgacctggattcttatattcaataaatagtgaggctgaggcgcaaaacattgttggattgatggctggaaaacatttcatacgctcacttaatttgtaagctttctgttatgtgtttgagatcgatggggaaacgtttagctg

SEQ ID NO: 36491 - protein, 548 aa, Zea mays subsp. mays
NQFESYSLGSLSSVALLGPHKLFPINYDPQPSFGVRFPTMAASPTSSLAPPVVPMELHAGNRDRLVAALRGHISASARPLHGLVLLQGGEEKTRYCTDHLELFRQESYFAYLFGVQEPGFYGAIDIASGQSILFAPRLPADYAVWMGEIKPLSYFRDTYKVDMVFYVDEIARVVQDHFGNHGKPLLFLLHGRNTDSGNFSKPASFEGMENFDTDLITLHPILTECRVIKSDLELALIRYANDVSSEAHIEVMRRARPGMKEYQLESIFLHHVYMYGGCRHCSYTCICATGDNSAVLHYGHAAAPNDRTLNDGDIALMDMGAEYHFYGSDITCSYPINGKFNRSQTIIYNAVLKAHNAVISDMRPGVNWMDMHKLAERAILESLRKEQIVQGDVDDMMAQRLGAVFMPHGLGHLLGIDTHDPGGYPEGLERPKDPGLNSLRTTRELKEGMVITVEPGCYFIDALLTKTRDDPISSKFFNWQEVEKYKSFGGVRIESDVYVTAQGCRNLTNCPRETWEIEAVMAGAPWPLPASSSMVVAAENSNDISKAS

SEQ ID NO: 36492 - protein, 509 aa, Zea mays subsp. mays
MAASPTSSLAPPVVPMELHAGNRDRLVAALRGHISASARPLHGLVLLQGGEEKTRYCTDHLELFRQESYFAYLFGVQEPGFYGAIDIASGQSILFAPRLPADYAVWMGEIKPLSYFRDTYKVDMVFYVDEIARVVQDHFGNHGKPLLFLLHGRNTDSGNFSKPASFEGMENFDTDLITLHPILTECRVIKSDLELALIRYANDVSSEAHIEVMRRARPGMKEYQLESIFLHHVYMYGGCRHCSYTCICATGDNSAVLHYGHAAAPNDRTLNDGDIALMDMGAEYHFYGSDITCSYPINGKFNRSQTIIYNAVLKAHNAVISDMRPGVNWMDMHKLAERAILESLRKEQIVQGDVDDMMAQRLGAVFMPHGLGHLLGIDTHDPGGYPEGLERPKDPGLNSLRTTRELKEGMVITVEPGCYFIDALLTKTRDDPISSKFFNWQEVEKYKSFGGVRIESDVYVTAQGCRNLTNCPRETWEIEAVMAGAPWPLPASSSMVVAAENSNDISKAS

SEQ ID NO: 36493 - protein, 494 aa, Zea mays subsp. mays
MELHAGNRDRLVAALRGHISASARPLHGLVLLQGGEEKTRYCTDHLELFRQESYFAYLFGVQEPGFYGAIDIASGQSILFAPRLPADYAVWMGEIKPLSYFRDTYKVDMVFYVDEIARVVQDHFGNHGKPLLFLLHGRNTDSGNFSKPASFEGMENFDTDLITLHPILTECRVIKSDLELALIRYANDVSSEAHIEVMRRARPGMKEYQLESIFLHHVYMYGGCRHCSYTCICATGDNSAVLHYGHAAAPNDRTLNDGDIALMDMGAEYHFYGSDITCSYPINGKFNRSQTIIYNAVLKAHNAVISDMRPGVNWMDMHKLAERAILESLRKEQIVQGDVDDMMAQRLGAVFMPHGLGHLLGIDTHDPGGYPEGLERPKDPGLNSLRTTRELKEGMVITVEPGCYFIDALLTKTRDDPISSKFFNWQEVEKYKSFGGVRIESDVYVTAQGCRNLTNCPRETWEIEAVMAGAPWPLPASSSMVVAAENSNDISKAS

SEQ ID NO: 36494 - DNA, 766 bp, Zea mays subsp. mays
gaccactccaaaccctcgaatccaagccgcctccgcctccgcctccccgcggatctcccatccatccatggccgccgccgccccggcccgcaggctgctcctgcgcctgcgcctccccctccccctctgcgacccgccgccggcccccgtcccgctcctcccccacctgctgacgccgcacctccacccgcagccaccgccgccggcgcctccgctcccggacccgaagctccgggacctcctcttcgccttccaccccgccgtgcacctatacccgtccctcgtcgacgtcccgagaggagggccaggcgactgcgacgcgcgcgaggacgtaggggaggccaaggagccggaggtgtgggcggacagcgtcaagaagaagcgcaagcgcaagatgaacaagcacaagctccgcaagctccggaagcgcctccgccgccagacctgagccgccgccgcacgtggatcccgtaggcttgaggattgtgattgcaaggaggttctccggtgccgctgccacaccggtttcaagctgatggtttcttccagttattttggtttggttataggagtagcagttctggtaccaacaaagcaattgctgcgactgggcacgacgtacctacaaacactgtaatgacaaggagccaggaacgggctgtttcatgtctggatttctggcaaataaagcttcaaatgcccgtctaactcatttgtactgttctttccccggatcaatgctatagcctgagtatgctcgtgccag

SEQ ID NO: 36495 - protein, 157 aa, Zea mays subsp. mays
DHSKPSNPSRLRLRLPADLPSIHGRRRPGPQAAPAPAPPPPPLRPAAGPRPAPPPPADAAPPPAATAAGASAPGPEAPGPPLRLPPRRAPIPVPRRRPERRARRLRRARGRRGGQGAGGVGGQRQEEAQAQDEQAQAPQAPEAPPPPDLSRRRTWIP

SEQ ID NO: 36496 - protein, 148 aa, Zea mays subsp. mays
TTPNPRIQAASASASPRISHPSMAAAAPARRLLLRLRLPLPLCDPPPAPVPLLPHLLTPHLHPQPPPPAPPLPDPKLRDLLFAFHPAVHLYPSLVDVPRGGPGDCDAREDVGEAKEPEVWADSVKKKRKRKMNKHKLRKLRKRLRRQT

SEQ ID NO: 36497 - protein, 126 aa, Zea mays subsp. mays
MAAAAPARRLLLRLRLPLPLCDPPPAPVPLLPHLLTPHLHPQPPPPAPPLPDPKLRDLLFAFHPAVHLYPSLVDVPRGGPGDCDAREDVGEAKEPEVWADSVKKKRKRKMNKHKLRKLRKRLRRQT

SEQ ID NO: 36498 - DNA, 2807 bp, Zea mays subsp. mays
  misc_feature (690)..(690): n is a, c, g, or t
  misc_feature (720)..(720): n is a, c, g, or t
cctctaagtcgcatagttccgatatctccaaacgagcttaacctttatcggatcgtgattgttctccggcttatcatcctatgtttcttctttcaatatcgtataactcatccagtggaagatgcttatgggttgtggcttgtatctgttatttgtgaagtttggtttgccttgtcttggcttctagatcagttcccaaagtggtatcctatcaaccgtgaaacttacctcgatagacttgcattgagatatgatagggagggtgagccatcccagttggctccaatcgatgtctttgttagtacagtggatccacttaaggaacctcctctaattactggcaacactgtcctgtccattcttgctgtggattaccctgttgacaaagtatcatgttatgtttctgatgacggttcagctatgttgacttttgaagcgctatctgaaaccgcagagtttgcaaggaaatgggttcccttttgcaagaaacacaatattgaacctagggctccagagttttactttgctcgaaagatagattacctaaaggacaaaatacaaccttcttttgtgaaagaaaggcgggctatgaagagggagtgtgaagagttcaaagtacggatcgatgcccttgttgcaaaagcgcaaaaaatacctgaggagggctggaccatggctgatggcactccntggcctgggaataaccctagagatcatccnggaatgatccaagtattcttgggccacagtggtgggcttgacacggatgggaatgagttgccacggcttgtttatgtttctcgtgaaaagaggccaggcttccagcaccacaagaaggctggtgccatgaatgctttgattcgcgtatcagctgtcctgacgaatggtgcttatcttcttaatgtggattgtgatcactacttcaatagcagcaaagctcttagagaggctatgtgtttcatgatggatccagcactaggaaggaaaacttgctatgttcagtttccacaaagatttgatggtatagacttgcatgatcgatatgcaaaccggaacattgtcttctttgatattaatatgaagggtctagatggcattcaaggacctgtttatgtgggaacaggatgctgtttcaataggcaggccttgtatggctatgatcctgtattgacagaagctgatttggagcctaacattatcattaaaagttgctgtggcggaagaaaaaagaaggacaagagctatattgattccaaaaaccgtgatatgaagagaacagaatcttcggctcccatcttcaacatggaagatatagaagagggatttgaaggttacgaggatgaaaggtcactgcttatgtctcagaagagcttggagaaacgctttggccagtctccaatttttattgcatccacctttatgactcaaggtggcatacccccttcaacaaacccaggttccctgctaaaggaagctatacatgtcattagttgtggatatgaggataaaacagaatgggggaaagagatcggatggatatatggctctgttactgaagatattttaactggtttcaagatgcatgcaagaggttggatatccatctactgcatgccacttcggccttgcttcaagggttctgctccaattaatctttctgatcgtctcaaccaagtgttacgctgggctcttggttcagttgaaattctacttagcagacactgtcctatctggtatggttacaatggaaggctaaagcttctggagagactggcatacatcaacaccattgtttatccaattacatctatcccactagtagcatactgcgtccttcctgctatctgtttactcaccaacaaatttattattcctgcgattagcaattatgctggggcgttcttcatcctgctttttgcttccatcttcgccactggtattttggagcttcgatggagtggtgttggcattgaggattggtggagaaatgagcagttttgggtcattggtggcacctctgcacatctctttgctgtgttccaaggtctcttaaaagtgctagcagggatcgacacaaacttcacggttacgtcaaaggcaaccgatgatgatggtgattttgctgagctgtatgtgttcaagtggacaactcttctgatccctcccaccactgtgcttgtgattaacctggttggtatagtggctggagtgtcgtatgctatcaacagtggctaccaatcatggggtccactattcgggaagctgttctttgcaatctgggtgatcctccacctctaccctttcctgaagggtctcatggggaagcagaaccgcacaccaaccatcgtcatcgtttggtccgtccttcttgcttccatattctcgctgctgtgggtgaagatcgaccccttcatatcccctacccagaaggctctttcccgtgggcagtgtggtgtaaactgctgatatgatccgaactgcctgctgaataacattgctccggcacaatcatgatctaccccttcgtgtaaataccagaggttaggcaagacttttcttggtaggtggcgaagatgtgtcgtttaagttcactctactgcatttggggtgggcagcatgaaactttgtcaacttatgtcgtgctacttatttgtagctacttgcagtcagtagtgcctatttcatgttaactgtcgtgactacctgttcaccgtgggctcatggactgtcatgatgtaatctgtatgttggaacttccaagtactgattgagctgtttggtcaatgacattgagggattctctctct

SEQ ID NO: 36499 - protein, 821 aa, Zea mays subsp. mays
  misc_feature (230)..(230): Xaa can be any naturally occurring amino acid
  misc_feature (240)..(240): Xaa can be any naturally occurring amino acid
PLSRIVPISPNELNLYRIVIVLRLIILCFFFQYRITHPVEDAYGLWLVSVICEVWFALSWLLDQFPKWYPINRETYLDRLALRYDREGEPSQLAPIDVFVSTVDPLKEPPLITGNTVLSILAVDYPVDKVSCYVSDDGSAMLTFEALSETAEFARKWVPFCKKHNIEPRAPEFYFARKIDYLKDKIQPSFVKERRAMKRECEEFKVRIDALVAKAQKIPEEGWTMADGTXWPGNNPRDHXGMIQVFLGHSGGLDTDGNELPRLVYVSREKRPGFQHHKKAGAMNALIRVSAVLTNGAYLLNVDCDHYFNSSKALREAMCFMMDPALGRKTCYVQFPQRFDGIDLHDRYANRNIVFFDINMKGLDGIQGPVYVGTGCCFNRQALYGYDPVLTEADLEPNIIIKSCCGGRKKKDKSYIDSKNRDMKRTESSAPIFNMEDIEEGFEGYEDERSLLMSQKSLEKRFGQSPIFIASTFMTQGGIPPSTNPGSLLKEAIHVISCGYEDKTEWGKEIGWIYGSVTEDILTGFKMHARGWISIYCMPLRPCFKGSAPINLSDRLNQVLRWALGSVEILLSRHCPIWYGYNGRLKLLERLAYINTIVYPITSIPLVAYCVLPAICLLTNKFIIPAISNYAGAFFILLFASIFATGILELRWSGVGIEDWWRNEQFWVIGGTSAHLFAVFQGLLKVLAGIDTNFTVTSKATDDDGDFAELYVFKWTTLLIPPTTVLVINLVGIVAGVSYAINSGYQSWGPLFGKLFFAIWVILHLYPFLKGLMGKQNRTPTIVIVWSVLLASIFSLLWVKIDPFISPTQKALSRGQCGVNC

SEQ ID NO: 36500 - protein, 681 aa, Zea mays subsp. mays
  misc_feature (90)..(90): Xaa can be any naturally occurring amino acid
  misc_feature (100)..(100): Xaa can be any naturally occurring amino acid
MLTFEALSETAEFARKWVPFCKKHNIEPRAPEFYFARKIDYLKDKIQPSFVKERRAMKRECEEFKVRIDALVAKAQKIPEEGWTMADGTXWPGNNPRDHXGMIQVFLGHSGGLDTDGNELPRLVYVSREKRPGFQHHKKAGAMNALIRVSAVLTNGAYLLNVDCDHYFNSSKALREAMCFMMDPALGRKTCYVQFPQRFDGIDLHDRYANRNIVFFDINMKGLDGIQGPVYVGTGCCFNRQALYGYDPVLTEADLEPNIIIKSCCGGRKKKDKSYIDSKNRDMKRTESSAPIFNMEDIEEGFEGYEDERSLLMSQKSLEKRFGQSPIFIASTFMTQGGIPPSTNPGSLLKEAIHVISCGYEDKTEWGKEIGWIYGSVTEDILTGFKMHARGWISIYCMPLRPCFKGSAPINLSDRLNQVLRWALGSVEILLSRHCPIWYGYNGRLKLLERLAYINTIVYPITSIPLVAYCVLPAICLLTNKFIIPAISNYAGAFFILLFASIFATGILELRWSGVGIEDWWRNEQFWVIGGTSAHLFAVFQGLLKVLAGIDTNFTVTSKATDDDGDFAELYVFKWTTLLIPPTTVLVINLVGIVAGVSYAINSGYQSWGPLFGKLFFAIWVILHLYPFLKGLMGKQNRTPTIVIVWSVLLASIFSLLWVKIDPFISPTQKALSRGQCGVNC

SEQ ID NO: 36501 - protein, 625 aa, Zea mays subsp. mays
  misc_feature (34)..(34): Xaa can be any naturally occurring amino acid
  misc_feature (44)..(44): Xaa can be any naturally occurring amino acid
MKRECEEFKVRIDALVAKAQKIPEEGWTMADGTXWPGNNPRDHXGMIQVFLGHSGGLDTDGNELPRLVYVSREKRPGFQHHKKAGAMNALIRVSAVLTNGAYLLNVDCDHYFNSSKALREAMCFMMDPALGRKTCYVQFPQRFDGIDLHDRYANRNIVFFDINMKGLDGIQGPVYVGTGCCFNRQALYGYDPVLTEADLEPNIIIKSCCGGRKKKDKSYIDSKNRDMKRTESSAPIFNMEDIEEGFEGYEDERSLLMSQKSLEKRFGQSPIFIASTFMTQGGIPPSTNPGSLLKEAIHVISCGYEDKTEWGKEIGWIYGSVTEDILTGFKMHARGWISIYCMPLRPCFKGSAPINLSDRLNQVLRWALGSVEILLSRHCPIWYGYNGRLKLLERLAYINTIVYPITSIPLVAYCVLPAICLLTNKFIIPAISNYAGAFFILLFASIFATGILELRWSGVGIEDWWRNEQFWVIGGTSAHLFAVFQGLLKVLAGIDTNFTVTSKATDDDGDFAELYVFKWTTLLIPPTTVLVINLVGIVAGVSYAINSGYQSWGPLFGKLFFAIWVILHLYPFLKGLMGKQNRTPTIVIVWSVLLASIFSLLWVKIDPFISPTQKALSRGQCGVNC

SEQ ID NO: 36502 - DNA, 711 bp, Zea mays subsp. mays
cttgttctagacgcaagccatgaagactacatcacgtttctgagctcgatccccgacgtcaaccagagcgaagtatcaaacatagccggctcgacttgcaactccaactccaagggacaacaccctttcgacctcaacatcccctcgatcgccgtctctcagcttcgaggcacggtggtagtgaagcgcaccgtcacgagcgtgtcgcgacgaaaccgagacctacaccatcatgacaaggatgccgccagaggtcgccctggaggtgacgcctccggcggtgaccgtgggccccggagcatcacgagagataactgtgaccctggacggcgaggtccgtgaccggcacctacagtttcggtgagatcgccatgaaaggtgaccgcggccaccttgtcagaatcccagtggtaactatgggattcaagtaggtagaagacgactgtgacatctcctagggagtagaggataggaagacgcgagttgtgcctctgtaatctgaggtcttgagctgcagaggaacgttgtataattttttcataggttgtagagaataagagttggcacaatgctgcccgtgttatgcatgccctccaggttgtaaagtatatttgggtgtcttaaatcctctgtcgacatggtgactagaggacctcttgtatcgtagtccagccttgttttgattctttaatgcatgaaggtttgaatccc

SEQ ID NO: 36503 - protein, 113 aa, Zea mays subsp. mays
LVLDASHEDYITFLSSIPDVNQSEVSNIAGSTCNSNSKGQHPFDLNIPSIAVSQLRGTVVVKRTVTSVSRRNRDLHHHDKDAARGRPGGDASGGDRGPRSITRDNCDPGRRGP

SEQ ID NO: 36504 - DNA, 772 bp, Zea mays subsp. mays
acggcacacgtctcggcagccacaagaaaccacccccttccggcacacgggctcgaccacctgactccatcaccgtgcctgtctgtgttctagggacaagaagagcagagagatccaggagcgagcagaggcggggagaagaggatgagcaccacaacggcgtcgtcgctgaaccccaacgcgccgctcttcatcccggcggcgtaccggcaggtggaggacttctcgcccgagtggtgggagctcgtcaacaccaccgcctggttccgggaccactgcttccggcagcgccagctccacgaggccgcctgcgacgacgtcgccgcgctcctccccgacgacctcctcgacaccaacgacctcttctacgcgcccgacgtcgtccaccaccaaccagcgacggcgctgctgcccgggtacgatgtcctcgacgtgctcgcggcgctgagcctcagctcccccagggccatccgccagcctcgctaggagaagcctgctcatggcgcctggcgggccaccacctccaccacggctgctgtgcctagtgtaaccccaagcaaggctagtctgtttctgtgtatacaatacgactgaaaaactaggagaggggggattcggccaaggcggccggtgctctctcctctcctcgtagctagtttttcctcctgttccagctcagttcttgttcatccagccgtgttaggaaaacaaacccagccccgtgcccatgttgttgaaaaatatattagtctggtatttacaactcttcgcc

SEQ ID NO: 36505 - protein, 180 aa, Zea mays subsp. mays
GTRLGSHKKPPPSGTRARPPDSITVPVCVLGTRRAERSRSEQRRGEEDEHHNGVVAEPQRAALHPGGVPAGGGLLARVVGARQHHRLVPGPLLPAAPAPRGRLRRRRRAPPRRPPRHQRPLLRARRRPPPTSDGAAARVRCPRRARGAEPQLPQGHPPASLGEACSWRLAGHHLHHGCCA

SEQ ID NO: 36506 - protein, 113 aa, Zea mays subsp. mays
MSTTTASSLNPNAPLFIPAAYRQVEDFSPEWWELVNTTAWFRDHCFRQRQLHEAACDDVAALLPDDLLDTNDLFYAPDVVHHQPATALLPGYDVLDVLAALSLSSPRAIRQPR

SEQ ID NO: 36507 - DNA, 743 bp, Zea mays subsp. mays
aatcttgtttggaaacagtcgtttcgcgtgacgttggcaagctagccgcgcgcgcttgttggaggacatcatttgctagatggcgcgtaccaagcagaccgctcgcaagtccactggaggaaaggctcctaggaagcaactcgctacaaaggcagcccggaagtctgcacccacaactggaggagtgaagaagcctcaccgttaccgcccagggactgttgctcttcgtgagatccgcaagtaccagaagagcactgagttgctgattaggaagctgccgttccagaggcttgtcagggagattgctcaggatttcaagacggatctgcgcttccagagccatgccgtgcttgctctgcaggaggcagcagaggcctacctggttggtctcttcgaagataccaatctgtgcgcgatccatgcgaagcgcgtgaccatcatgcccaaggacattcagctggcaagaaggatccgtggcgagagggcgtaagtctgtcgacgggaggaagaactctgcgctcgttttgtgtgttcgcctctctcaccctgtaagttttgtgaaaagataatctagtaaactgtacttggcctgtttgactgtagccgcagtagcgtctgcgcataccgttggctgttggcgtgtctggagtcttttatccatccattctagtactacttaataatcgtgatatatcaccgggttgctaaacgtgtatccagacttaactgtgtgtttggctgcc

SEQ ID NO: 36508 - protein, 136 aa, Zea mays subsp. mays; identical to SEQ ID NO: 8056

SEQ ID NO: 36509 - DNA, 816 bp, Zea mays subsp. mays
acgtgccgtgcccgtgtgcatcggggaaaaaacagcagcaggggccgaatcggagctccgccgccggcagatctgcgccggccggtctgctccgcccagcggacatggaccgcgacggccgcccggggtggctaccgtcgctgggcttcgccttcctcagcttcaactgcgggatggccgtctaccgctcctgggacgacccctacgccgtcgccttcgtcctcgccgcgtacgccgccctcgtcctcctcttccgctgcctccaccttctggagcgccgccgggaccagcgcctcaagctcgccgtctggggcctctccacgctcctcacactcatgttctcgtacaagatcgccgccgtgatgccgccctgggcccagctgctcgtctggggcatggggatcctcaccgtcgttgcgggattctacgccttcttcgtcgcccgcccggaggagccctgacccttcgttcgtctccatgccgccccccccgacatcaacatggatacctgatgagcatcactcaccgcatcggtctcagttatcttgtgtagtacgtatgtctttttgcagcatgccgaagaagttgacgaacgtaccgagaggcgcgtagcaagactcatcactcttttgaatgcaagagttggtagtagaataaagtaggggttccgtgtgtgtgtgcgtgtgggagagagatcgtgaaaaacggtttgcatctagcggtgacctctttacattggtttttccagtgcctgttgcggttagctatgtgttactaattggaatggatgcaagtaagtgaggatagagtcgttcc

SEQ ID NO: 36510 - protein, 183 aa, Zea mays subsp. mays
RAVPVCIGEKTAAGAESELRRRQICAGRSAPPSGHGPRRPPGVATVAGLRLPQLQLRDGRLPLLGRPLRRRLRPRRVRRPRPPLPLPPPSGAPPGPAPQARRLGPLHAPHTHVLVQDRRRDAALGPAARLGHGDPHRRCGILRLLRRPPGGALTLRSSPCRPPRHQHGYLMSITHRIGLSYLV

SEQ ID NO: 36511 - protein, 152 aa, Zea mays subsp. mays
VPCPCASGKKQQQGPNRSSAAGRSAPAGLLRPADMDRDGRPGWLPSLGFAFLSFNCGMAVYRSWDDPYAVAFVLAAYAALVLLFRCLHLLERRRDQRLKLAVWGLSTLLTLMFSYKIAAVMPPWAQLLVWGMGILTVVAGFYAFFVARPEEP

SEQ ID NO: 36512 - protein, 120 aa, Zea mays subsp. mays
TCRARVHRGKNSSRGRIGAPPPADLRRPVCSAQRTWTATAARGGYRRWASPSSASTAGWPSTAPGTTPTPSPSSSPRTPPSSSSSAASTFWSAAGTSASSSPSGASPRSSHSCSRTRSPP

SEQ ID NO: 36513 - protein, 118 aa, Zea mays subsp. mays
MDRDGRPGWLPSLGFAFLSFNCGMAVYRSWDDPYAVAFVLAAYAALVLLFRCLHLLERRRDQRLKLAVWGLSTLLTLMFSYKIAAVMPPWAQLLVWGMGILTVVAGFYAFFVARPEEP

SEQ ID NO: 36514 - DNA, 2109 bp, Zea mays subsp. mays
gtcttctggagcagcgtccgaaagtgtgtggagaacctgcccgattcctcccgccgcctccgacctcaccgtcggcgggctcagcttgttcctggggtctgatcagccatgttcaagaaacctgttgatgtgaaaaccatacagcgcttgtctggggcagacaaaaagaagctaagaagaactgccaagggaaggtttccacaggcttctgatgctgaccttgatgccattcttcctcccaaggctgagataacagttgctaagtacccgaaccatgttcttgtatatggcatagagggagagttcccaatgattttcaacactgacgcaagaggtcatgaactgtttcctacagtttatgcgctttggaaggtcccccatctgttgccagcttttacgcttaaaggtggtgaggtttcacgtttcgtgattggtggcgctgatctgatgtttcctggtatcagcatacctccagaagggtttccatcttttgaagctggccaaccatgggcagtaaaagttcctggtaaccctgctgcaattgcggttgggagcacaactatgagtagtactgaagctttgaaggcaggactacgtggcaaggctttaaagattttacattactacagggatatgttatgggattcggctgatggttgttatgtccctaatgaaggattttttgatgacattgttgttgaagatcctaatcctgtttcgacatctcaggctcctgattctgctgaagaacctgaagtcacgaatgatggtagtgtttcggctgaagatgcaggagtcgatatttcagacaatcatggtacaaatcctggcatccagattgaagcagtggaagagataactgatgttgttaacgaactaaaacttcccgaagataaaactactgaacaagcacctgttgaaatggaacatcataatttgagaactgaggaaattgattctctcttggacaaatgccttctgcaagcgctatacacaagcataaaagaaaaagatcttccaatgccaggaagtacactatgggcaaatcacatactaccgaacagacctcctggtgttactattgatataaaaaagtcatcacacaaaaagttgtcgaagtggttacaatcaaaatcttcatctggccttatttcagcaaaggaggacaaatataagaaggaagttgtattgcttgctatcaatcacaagcatccagactacatggcctttagaccggaaaagagggtacaggagcttgttgaacacgaaaaggatgttgctgaaagtagtgtcactaagcaattggaggttgcagagatttataagccaagttctcatgttaaacccatatttgtggctgtcgaagctgacatggagaagtattacagtgcaccagaggcttcagatatagtcttcaggtacgttgaaaaggaaaaattggttaaacctacagacagggccaaggtgattcttgatgttacattatgtgatgcattgtacaaaggggctatcaaaaagggctcggcatacccaactgaaatccacaagaaagacttaggttcagcattcttaaaccgcatgcaagttcaccacaaggtatcgagaggaactcaggaggtcatacgcaagggtgccataagaactatccagatcatgacagaaagaagacagggcaacaagaagatgactcggctttctgggctcgagtgtttcctgatggatcctgattcattggcttctgagctccagaaaaaatttgcttgcagcaccaccacagcagagcttccaggtaagaaagggcagtacgagatcttggtacaaggtggagtgattgatgaccttgctaaacaccttgtcgaccattacgatgttcctaaaagatacatcgaggtttatgacaaaacaaagaggtaggaagtgggggctgatcatgtccgtttaggtgttggagcgcttggatggtctacgaaatgatcccaggattgtttcatgatactttttgtcatcacatgtctgagcaatattacgacattgttgatctacgagtaccttacgatatttgttttcgttcctgcctttggttgatggaaaatgctattgtgcttactg

SEQ ID NO: 36515 - protein, 601 aa, Zea mays subsp. mays
MFKKPVDVKTIQRLSGADKKKLRRTAKGRFPQASDADLDAILPPKAEITVAKYPNHVLVYGIEGEFPMIFNTDARGHELFPTVYALWKVPHLLPAFTLKGGEVSRFVIGGADLMFPGISIPPEGFPSFEAGQPWAVKVPGNPAAIAVGSTTMSSTEALKAGLRGKALKILHYYRDMLWDSADGCYVPNEGFFDDIVVEDPNPVSTSQAPDSAEEPEVTNDGSVSAEDAGVDISDNHGTNPGIQIEAVEEITDVVNELKLPEDKTTEQAPVEMEHHNLRTEEIDSLLDKCLLQALYTSIKEKDLPMPGSTLWANHILPNRPPGVTIDIKKSSHKKLSKWLQSKSSSGLISAKEDKYKKEVVLLAINHKHPDYMAFRPEKRVQELVEHEKDVAESSVTKQLEVAEIYKPSSHVKPIFVAVEADMEKYYSAPEASDIVFRYVEKEKLVKPTDRAKVILDVTLCDALYKGAIKKGSAYPTEIHKKDLGSAFLNRMQVHHKVSRGTQEVIRKGAIRTIQIMTERRQGNKKMTRLSGLECFLMDPDSLASELQKKFACSTTTAELPGKKGQYEILVQGGVIDDLAKHLVDHYDVPKRYIEVYDKTKR

SEQ ID NO: 36516 - protein, 534 aa, Zea mays subsp. mays
MIFNTDARGHELFPTVYALWKVPHLLPAFTLKGGEVSRFVIGGADLMFPGISIPPEGFPSFEAGQPWAVKVPGNPAAIAVGSTTMSSTEALKAGLRGKALKILHYYRDMLWDSADGCYVPNEGFFDDIVVEDPNPVSTSQAPDSAEEPEVTNDGSVSAEDAGVDISDNHGTNPGIQIEAVEEITDVVNELKLPEDKTTEQAPVEMEHHNLRTEEIDSLLDKCLLQALYTSIKEKDLPMPGSTLWANHILPNRPPGVTIDIKKSSHKKLSKWLQSKSSSGLISAKEDKYKKEVVLLAINHKHPDYMAFRPEKRVQELVEHEKDVAESSVTKQLEVAEIYKPSSHVKPIFVAVEADMEKYYSAPEASDIVFRYVEKEKLVKPTDRAKVILDVTLCDALYKGAIKKGSAYPTEIHKKDLGSAFLNRMQVHHKVSRGTQEVIRKGAIRTIQIMTERRQGNKKMTRLSGLECFLMDPDSLASELQKKFACSTTTAELPGKKGQYEILVQGGVIDDLAKHLVDHYDVPKRYIEVYDKTKR

SEQ ID NO: 36517 - protein, 488 aa, Zea mays subsp. mays
MFPGISIPPEGFPSFEAGQPWAVKVPGNPAAIAVGSTTMSSTEALKAGLRGKALKILHYYRDMLWDSADGCYVPNEGFFDDIVVEDPNPVSTSQAPDSAEEPEVTNDGSVSAEDAGVDISDNHGTNPGIQIEAVEEITDVVNELKLPEDKTTEQAPVEMEHHNLRTEEIDSLLDKCLLQALYTSIKEKDLPMPGSTLWANHILPNRPPGVTIDIKKSSHKKLSKWLQSKSSSGLISAKEDKYKKEVVLLAINHKHPDYMAFRPEKRVQELVEHEKDVAESSVTKQLEVAEIYKPSSHVKPIFVAVEADMEKYYSAPEASDIVFRYVEKEKLVKPTDRAKVILDVTLCDALYKGAIKKGSAYPTEIHKKDLGSAFLNRMQVHHKVSRGTQEVIRKGAIRTIQIMTERRQGNKKMTRLSGLECFLMDPDSLASELQKKFACSTTTAELPGKKGQYEILVQGGVIDDLAKHLVDHYDVPKRYIEVYDKTKR

SEQ ID NO: 36518 - DNA, 1089 bp, Zea mays subsp. mays
gattcttcatttgatgaacttttgaaggttgttataatgaatgatcaactagcttgtgatcaagacgttggcggctgtggaacaccgaatcatatagaccacatcctttctaattccccacatgtctttactgttgttttgggatggcagaacaacaaagagaggctggatgacatatctgcaactttggctggtatttcaactgagatagacattagcatattctaccgtggtctagatcaaggaggcaaacacaccctggggtcagtggtttgttactatggccagcattaccattgttttgccttcaaggatggacggtgggtcatgtatgatgaccagacagtcaaggttattggtagttggggtgatgtgctcgtgatgtgtgaaaagggccatttgcaaccccaagtgcttttctttgaggctgcaaattaattattcttcagagtcgcaaaacgcgctacagcggttaacatgccctcaaatataggttttttccctgcggccatgaagattagaaatagggtagcagattcgttttgagcggggatatatagtactagcattcaacggtgcttttcgttgtgagtccgtaataagcagtcatctgagcattctagagcaaaaaagggagctgtttatcccccccttttttgctttaacctttggtgtaggcgctgaacttctgatctcatctgccaataaatcttcactgccgatcaagcgggtggagcattcgacttgaactgccatccaacagttgtagccgaatctgcatgaactcttcgttatacaccaatcatctatagaattttctgcttacattgggccgggcgggcgttctctctctctctgttttttttttggggtgggggtctggtataggagtgacagttttgaggccaccagatatagaatggaatgatatgggaatgggtgatgcggtgtgaactgtattttgctgtggatgatcttttgaaaagagtaaagctatctggaatatggatatggtaagaaatctgtagtacacgagtctatatatacaatgactcaatgggattatgcgagatgattataacgatgaat

SEQ ID NO: 36519 - protein, 145 aa, Zea mays subsp. mays
DSSFDELLKVVIMNDQLACDQDVGGCGTPNHIDHILSNSPHVFTVVLGWQNNKERLDDISATLAGISTEIDISIFYRGLDQGGKHTLGSVVCYYGQHYHCFAFKDGRWVMYDDQTVKVIGSWGDVLVMCEKGHLQPQVLFFEAAN

SEQ ID NO: 36520 - protein, 133 aa, Zea mays subsp. mays
MNDQLACDQDVGGCGTPNHIDHILSNSPHVFTVVLGWQNNKERLDDISATLAGISTEIDISIFYRGLDQGGKHTLGSVVCYYGQHYHCFAFKDGRWVMYDDQTVKVIGSWGDVLVMCEKGHLQPQVLFFEAAN

SEQ ID NO: 36521 - DNA, 801 bp, Zea mays subsp. mays
ctttcaccgtcccgtcccccgagagcgagagggcggcactggtgacgtcattcacctctcggtcgcgtgcgcttcacgcagcggctcagtcagtcctcacaccacgcatctgattctgatcgcaccgccgtcggcccaccgcttcagttggcagttgcgagtggctccaacaatccaccggcaccaacccagcgcggcgccaccggcgacccgtaccccctcccccggagagcgatggcgacggagctgacggcggcgcagctgcgcgcgtacgacggcaccgacccgtccaagcccatctacgtctccgtccggggcaaggtctacgacgtcacctccggccgcggcttctacggccccggcggcgcctacgccgtcttcgcaggccgcgaggccagccgcgccctcggcaagatgtccaaggacgaggccgacgtctccggggacctctccgggctcaccgacaaggagctcggcgtcctcgccgactgggagatcaagttccaggccaagtaccccgtcgtcgcccgactcgccgccgacgcctgaactcgtcagtctcggtctaaatttactctgtcctgcctcttgcggtgttcagtgctgtgcttgcttgcttgttgctagttgctttgctacccaataatctgaatggaaggacgtatgtgatgtgcctgctgaatagttcctagtccttgcatacactgctgtgctaccacatgacatgatgtactcgtgtgtgtgctttggttgttgtgtaattccatgaccatgatcagtaatctgaataaaaaatattgg

SEQ ID NO: 36522 - protein, 104 aa, Zea mays subsp. mays
MATELTAAQLRAYDGTDPSKPIYVSVRGKVYDVTSGRGFYGPGGAYAVFAGREASRALGKMSKDEADVSGDLSGLTDKELGVLADWEIKFQAKYPVVARLAADA

SEQ ID NO: 36523 - protein, 82 aa, Zea mays subsp. mays
FHRPVPREREGGTGDVIHLSVACASRSGSVSPHTTHLILIAPPSAHRFSWQLRVAPTIHRHQPSAAPPATRTPSPGERWRRS

SEQ ID NO: 36524 - DNA, 934 bp, Zea mays subsp. mays
ctactctctctctctctgcctgcaaagctgcttgatccatcatcgatcacatcactccaccagccgcagcgcacgaacgtacgactcatggcagatcgcgaccgcagcggcatctacggcggcggcgcctacgggcagcagcaggggggcggccgcccgatgggtgagcaggtgaagggcatgatccacgacaaggggccgacggcgtcccaggcgctgacggtggcgacgctgttccctctgggcgggctgctcctggtgctgtcaggcctggcgctggcggcctccacggtggggctggccctggccacgcccgtgttcctgctcttcagccccgtgctcgtccccgccgcgctgctcatcggcacggccgtcgcggggttcctcacgtcgggcgcgctggggctcggcggcctgtcctcgctcacgtgcctcgccaacacggcgcggcaggcgttccagcgcaccccggactacgtcgaggaggcgcgccgcaggatggcggaggccgcggcgcacgcgggccacaagaccgcgcaggccgggcacggcatccagagcaaggcgcaggaggccggtgctggcactggcgccggcggcggcaggacttcctcgtaaataagcaaatcatccatggatgcgtgcgtgtcaatgtcagcagggtcgtcgtggaatgctcttctctgtacgtgggtaaccgtcttttggtcgtcttccccgagtgcgtgataaatatcctggtgttcgtcgtgtgtggtgctgccctaggctggggcctggggtcggctgtgtaccggtatctgttcatcgccgctccgtcgcgttcggagatgtgaataagtgatgtgaaggttaagtttcagctttgctattgctattgtggcttgtgcatcagcggtttgctcgttgactgttatggaaataagcattggtg

SEQ ID NO: 36525 - protein, 205 aa, Zea mays subsp. mays
LLSLSLPAKLLDPSSITSLHQPQRTNVRLMADRDRSGIYGGGAYGQQQGGGRPMGEQVKGMIHDKGPTASQALTVATLFPLGGLLLVLSGLALAASTVGLALATPVFLLFSPVLVPAALLIGTAVAGFLTSGALGLGGLSSLTCLANTARQAFQRTPDYVEEARRRMAEAAAHAGHKTAQAGHGIQSKAQEAGAGTGAGGGRTSS

SEQ ID NO: 36526 - protein, 176 aa, Zea mays subsp. mays
MADRDRSGIYGGGAYGQQQGGGRPMGEQVKGMIHDKGPTASQALTVATLFPLGGLLLVLSGLALAASTVGLALATPVFLLFSPVLVPAALLIGTAVAGFLTSGALGLGGLSSLTCLANTARQAFQRTPDYVEEARRRMAEAAAHAGHKTAQAGHGIQSKAQEAGAGTGAGGGRTSS

SEQ ID NO: 36527 - protein, 152 aa, Zea mays subsp. mays
MGEQVKGMIHDKGPTASQALTVATLFPLGGLLLVLSGLALAASTVGLALATPVFLLFSPVLVPAALLIGTAVAGFLTSGALGLGGLSSLTCLANTARQAFQRTPDYVEEARRRMAEAAAHAGHKTAQAGHGIQSKAQEAGAGTGAGGGRTSS

SEQ ID NO: 36528 - DNA, 939 bp, Zea mays subsp. mays
gccaggagtccaggacatcaggccccagaaaaaagtccgaacgcatctcttctttctactttcttgtaacccaagacgaactcggtgaactctttctcctcgcgcagcaccggagcacaatcaaggattccagtccagtcctgccaatggagtgcgttttgggcttggttggccgcgacttcgcggtggtggcggccgacacctccgccgtgcagagtatcctcgtccacaagactgacgaggacaaagtaatggtcctcgactcgcacaagctgttgggcgcttcaggggagcctggtgaccgggtgcagtttacggagttcatacagaagaacctccacctgtaccagttccgcaacaccatcccgctgtcaaccgccgctgccgccaacttcacacgcggcgagctcgccacagcccttcgtaagaatccatacatggtcaatgttattctcggtggttacgataaggatgttggcgcctcactgtactacatcgactacattgcgaccttgcacaagatcgacaagggcgcttttgggtacggatcgtatttctgcctgtctctgatggacaagctgtaccgcccggacatgaccgttgaggaagcggtagacctcgttgataagtgcattaaggagatccggctgcggctggttgtggcgccccagaacttcgtgatcaagatcgtcgacaaggacggggccagggagtacgcgaggcgtgaactcgtcggcgacagtgcacctgctgaagctgcagctacggttgccgcctgaggcatgaaacttgtttgtgttagttgtttgtttctcagcgaggctactatgtaatcaaatggatactggtgggggtcccacagctgttttttaatcaattttagcccagacatgtaattctgtttctgcactaattcatgtcttcgccgagtacaagttg

SEQ ID NO: 36529 - protein, 258 aa, Zea mays subsp. mays
QESRTSGPRKKSERISSFYFLVTQDELGELFLLAQHRSTIKDSSPVLPMECVLGLVGRDFAVVAADTSAVQSILVHKTDEDKVMVLDSHKLLGASGEPGDRVQFTEFIQKNLHLYQFRNTIPLSTAAAANFTRGELATALRKNPYMVNVILGGYDKDVGASLYYIDYIATLHKIDKGAFGYGSYFCLSLMDKLYRPDMTVEEAVDLVDKCIKEIRLRLVVAPQNFVIKIVDKDGAREYARRELVGDSAPAEAAATVAA

SEQ ID NO: 36530 - protein, 210 aa, Zea mays subsp. mays
MECVLGLVGRDFAVVAADTSAVQSILVHKTDEDKVMVLDSHKLLGASGEPGDRVQFTEFIQKNLHLYQFRNTIPLSTAAAANFTRGELATALRKNPYMVNVILGGYDKDVGASLYYIDYIATLHKIDKGAFGYGSYFCLSLMDKLYRPDMTVEEAVDLVDKCIKEIRLRLVVAPQNFVIKIVDKDGAREYARRELVGDSAPAEAAATVAA

SEQ ID NO: 36531 - protein, 175 aa, Zea mays subsp. mays
MVLDSHKLLGASGEPGDRVQFTEFIQKNLHLYQFRNTIPLSTAAAANFTRGELATALRKNPYMVNVILGGYDKDVGASLYYIDYIATLHKIDKGAFGYGSYFCLSLMDKLYRPDMTVEEAVDLVDKCIKEIRLRLVVAPQNFVIKIVDKDGAREYARRELVGDSAPAEAAATVAA

SEQ ID NO: 36532 - DNA, 553 bp, Zea mays subsp. mays
  misc_feature (523)..(523): n is a, c, g, or t
cgtttttctctccccatctcgcccgccgttttcgtccttatcgatctcctcgcacctcgtggcggcacctctccccttcgatccaccaagggtttaggatcggcggcgatggcggcgaggctggcacagctgcgcgctcaggcggtgcaggcggcggagttcgcctcgaagcacggcggctcctactacaaggagctcatggagaagaacaagcagtacgtcgtgcagccccccaccatcgagaaatgccaggagctctccaagcagctcttctacacccgcctcgcaagcctaccaggtcggtatgagtcattctggaaggagcttgatggtgtcaagcaggtatggaagaacaggaaggacctcaaggttgaggaccttgggattgcgactttatttggagttgagctttatgcatggttctgcgtaggcgagattgttggcagaggtttcaccttaaccggctataaggtctagttgatttccagtgatttaagacctgctttataaatcgacactttanctgatgcttgtcgaaacgacgatgatacct

SEQ ID NO: 36533 - protein, 158 aa, Zea mays subsp. mays
RFSLPISPAVFVLIDLLAPRGGTSPLRSTKGLGSAAMAARLAQLRAQAVQAAEFASKHGGSYYKELMEKNKQYVVQPPTIEKCQELSKQLFYTRLASLPGRYESFWKELDGVKQVWKNRKDLKVEDLGIATLFGVELYAWFCVGEIVGRGFTLTGYKV

SEQ ID NO: 36534 - protein, 122 aa, Zea mays subsp. mays
MAARLAQLRAQAVQAAEFASKHGGSYYKELMEKNKQYVVQPPTIEKCQELSKQLFYTRLASLPGRYESFWKELDGVKQVWKNRKDLKVEDLGIATLFGVELYAWFCVGEIVGRGFTLTGYKV

SEQ ID NO: 36535 - protein, 101 aa, Zea mays subsp. mays
FFSPHLARRFRPYRSPRTSWRHLSPSIHQGFRIGGDGGEAGTAARSGGAGGGVRLEARRLLLQGAHGEEQAVRRAAPHHREMPGALQAALLHPPRKPTRSV

SEQ ID NO: 36536 - DNA, 2442 bp, Zea mays subsp. mays
actttcgcaagcccccttccgaccttgcccctgcggtctcccgagtcccgaagcatccccttccaaaaccctcgccgcgccgcagccacccttgcttccgcacgctatcgcccgggaccagccatctatggcggcgtccctgctcctccgcgccgtgcgccgaagggagcttgcgtcccctctcggatccctgggtgccagcatacagtcaacatgtgttgccaacatatgctcaaaatggggaaggtttgcaagacctttcagtgcaaaagctgctggaaatgaggttattgggattgatttggggacaacgaactcatgtgtttctgttatggagggaaagaacccaaaagttattgagaatgctgaaggtgcgagaacaacaccatctgttgtcgcatttactcagaagggtgaaagacttgttggaactccagccaagcgccaggcagtaaccaacccccagaatactttctttggaacaaagaggttaattgggcgacgctttgatgatccacagacacagaaagagatgaagatggtgccatacacaatcgtgaaggctccaaatggtgatgcttgggttcaaacaacagatggcaagcagtactcaccaagtcaggtcggtgcatttgtgctgaccaagatgaaggagacagctgaatcttaccttggcaagtctatctcaaaggcagtgattactgttccagcttatttcaatgacgctcagcgtcaggccacaaaggatgcaggccgcattgctggccttgatgttgaaaggatcatcaatgaacctacagcagccgctctgtcttatggaatgaacaacaaggaaggcttgatagcggtatttgatcttggaggaggaacttttgatatctctattctggagatctcaaatggagtttttgaggtcaaagcaacaaatggtgatactttcttgggtggtgaagattttgataatacactattggagttcttggtgagtgatttcaagaaaactgagggcatagatctgtcgaaagatagattggccctgcaaaggcttcgtgaagctgctgagaaggcaaaggttgaactttcgtcgacttctcagacagaaatcaatctgccattcataacagctgatgcttcaggggcaaaacatttgaacatcacactgacaaggtcaaaatttgaatctcttgtacacgatctgattgagagaactagagatccatgcaagaactgtttgaaggatgccggaatatctactaaagaggtggatgaagtacttcttgttggtggaatgactagggttccaaaggtgcaggaggtagtctctgaaatctttgggaagaacccaagcaaaggagtcaatccagatgaagctgtggccatgggtgctgcacttcagggtggcattctccgtggagatgttaaggagcttcttcttcttgatgttactcccctgtcactaggtattgagacgctcggtggtatcttcaccagattgatcaacagaaacactacaatccccacaaagaaaagtcaggtgttctcaactgctgctgacaaccagacccaagtgggtatccgggtgttgcaaggtgagcgtgaaatggctacagacaacaagctccttggtgaatttgacctcgtgggcattccacctgccccaagaggcttgcctcagattgaggttacattcgacatcgatgccaatggaattgtgaccgtctcagccaaagataaggctaccgggaaggagcagaacatcaccatacgatcctcgggtgggctgtcagaggctgacatccagaagatggtgcaagaagctgagctgcatgcccagaaggaccaggagcggaaagccctcattgacatcaggaacaatgccgacaccactatctacagcatcgagaagagtcttggagagtacagggacaagatcccggcagaggttgcatctgagatcgaggcagccatcgctgacctccgccaggagatggcctcggatgacattgagaagatcaaggccaagcttgaggctgccaacaaggctgtctcgaagattggacagcacatgtctggtggtggctctggcggctcgcagtcaggatctggacctcagggtggcggcgaccaggcgccggaggcagagtatgaggaggttaagaagtgaggctgcgggagttcaagggaattgtagcggcttgtttagaagtagctcgtttttttttttgggaacgcagatagtcagatgtctcagatgaggtgtaacctgtgttgcaataatctatgaacttacccctcttgttttctcctgcagtgaaacaggtcacacgacattgtcatggcttttattgcatatgaagccttgttctgcccgatgtactcgcacagcgaaaaccatcggcgagttctgttaatggattgaagtatatttgttcctgtgttttg

SEQ ID NO: 36537 - protein, 720 aa, Zea mays subsp. mays
LSQAPFRPCPCGLPSPEASPSKTLAAPQPPLLPHAIARDQPSMAASLLLRAVRRRELASPLGSLGASIQSTCVANICSKWGRFARPFSAKAAGNEVIGIDLGTTNSCVSVMEGKNPKVIENAEGARTTPSVVAFTQKGERLVGTPAKRQAVTNPQNTFFGTKRLIGRRFDDPQTQKEMKMVPYTIVKAPNGDAWVQTTDGKQYSPSQVGAFVLTKMKETAESYLGKSISKAVITVPAYFNDAQRQATKDAGRIAGLDVERIINEPTAAALSYGMNNKEGLIAVFDLGGGTFDISILEISNGVFEVKATNGDTFLGGEDFDNTLLEFLVSDFKKTEGIDLSKDRLALQRLREAAEKAKVELSSTSQTEINLPFITADASGAKHLNITLTRSKFESLVHDLIERTRDPCKNCLKDAGISTKEVDEVLLVGGMTRVPKVQEVVSEIFGKNPSKGVNPDEAVAMGAALQGGILRGDVKELLLLDVTPLSLGIETLGGIFTRLINRNTTIPTKKSQVFSTAADNQTQVGIRVLQGEREMATDNKLLGEFDLVGIPPAPRGLPQIEVTFDIDANGIVTVSAKDKATGKEQNITIRSSGGLSEADIQKMVQEAELHAQKDQERKALIDIRNNADTTIYSIEKSLGEYRDKIPAEVASEIEAAIADLRQEMASDDIEKIKAKLEAANKAVSKIGQHMSGGGSGGSQSGSGPQGGGDQAPEAEYEEVKK

SEQ ID NO: 36538 - protein, 678 aa, Zea mays subsp. mays
MAASLLLRAVRRRELASPLGSLGASIQSTCVANICSKWGRFARPFSAKAAGNEVIGIDLGTTNSCVSVMEGKNPKVIENAEGARTTPSVVAFTQKGERLVGTPAKRQAVTNPQNTFFGTKRLIGRRFDDPQTQKEMKMVPYTIVKAPNGDAWVQTTDGKQYSPSQVGAFVLTKMKETAESYLGKSISKAVITVPAYFNDAQRQATKDAGRIAGLDVERIINEPTAAALSYGMNNKEGLIAVFDLGGGTFDISILEISNGVFEVKATNGDTFLGGEDFDNTLLEFLVSDFKKTEGIDLSKDRLALQRLREAAEKAKVELSSTSQTEINLPFITADASGAKHLNITLTRSKFESLVHDLIERTRDPCKNCLKDAGISTKEVDEVLLVGGMTRVPKVQEVVSEIFGKNPSKGVNPDEAVAMGAALQGGILRGDVKELLLLDVTPLSLGIETLGGIFTRLINRNTTIPTKKSQVFSTAADNQTQVGIRVLQGEREMATDNKLLGEFDLVGIPPAPRGLPQIEVTFDIDANGIVTVSAKDKATGKEQNITIRSSGGLSEADIQKMVQEAELHAQKDQERKALIDIRNNADTTIYSIEKSLGEYRDKIPAEVASEIEAAIADLRQEMASDDIEKIKAKLEAANKAVSKIGQHMSGGGSGGSQSGSGPQGGGDQAPEAEYEEVKK

SEQ ID NO: 36539 - protein, 610 aa, Zea mays subsp. mays
MEGKNPKVIENAEGARTTPSVVAFTQKGERLVGTPAKRQAVTNPQNTFFGTKRLIGRRFDDPQTQKEMKMVPYTIVKAPNGDAWVQTTDGKQYSPSQVGAFVLTKMKETAESYLGKSISKAVITVPAYFNDAQRQATKDAGRIAGLDVERIINEPTAAALSYGMNNKEGLIAVFDLGGGTFDISILEISNGVFEVKATNGDTFLGGEDFDNTLLEFLVSDFKKTEGIDLSKDRLALQRLREAAEKAKVELSSTSQTEINLPFITADASGAKHLNITLTRSKFESLVHDLIERTRDPCKNCLKDAGISTKEVDEVLLVGGMTRVPKVQEVVSEIFGKNPSKGVNPDEAVAMGAALQGGILRGDVKELLLLDVTPLSLGIETLGGIFTRLINRNTTIPTKKSQVFSTAADNQTQVGIRVLQGEREMATDNKLLGEFDLVGIPPAPRGLPQIEVTFDIDANGIVTVSAKDKATGKEQNITIRSSGGLSEADIQKMVQEAELHAQKDQERKALIDIRNNADTTIYSIEKSLGEYRDKIPAEVASEIEAAIADLRQEMASDDIEKIKAKLEAANKAVSKIGQHMSGGGSGGSQSGSGPQGGGDQAPEAEYEEVKK

SEQ ID NO: 36540 - DNA, 1681 bp, Zea mays subsp. mays
aaatcacgccaatccatggcagcccgcgtgccccgctcccccgcagcgcctggctcccctttccttgcgcgacgcgagatcggcgagattgccctcaacgcgctcgcgtcgcgccgcggatcccccaccctcctcccctctgcacgccgccatcaactcgcaccggccctcgcccgtgatccatcctctcccccgcggcaatgatatggcgtcccccctcaaccgaccattcccgcagcggatccgcaccaacccgttcgcgccggcctctggaagaagaatccaccgaaggcgaaaacgacgacggaggtccggctgactcgtctgggtctttgcaatagcggcaagcgggttggagctccgcttcgggcaggggagaaccacgtggagacctggagtcacgctgcctagactcgccgctgggtggattcgtcgcgatggaggtcggattgtgaacacgccgtccagttaggacgctgtcgtcttcagatccaggggatggggttgctcggcatggcggccaagggcccctcgcccacgcgtcgcctaatgccacagccgcacttggccgtctcctcgctggcggcctccgtggctctgatccactgcttcctcaacacccggagatggttgacgtcaccttcgtcgtctcctcgccagtggcctccaccagccccgcagtccaagacaaagccacgacatgagtcaacccaagtccggtcgcacctacaccgatggccgtacccaacaagttgagctttaagaggaacgtggtgtcattgtcatctgagctcaagggtgtgaggagcaagcttgcttcctaggagcagctgtttgtaagggaatctcaaactagaaagcttgcggagacaaaaacaaggagcatggaagaggaagtaatcaagctgcagaaatgcttacaggacaaggatgggcaactgtgttcatccacaagtagcacggaacagtaccatcatgagttggatgatcttagaacacatctgtcatttactcaagctacaggagaagcaggtgttgcatcagctaagttagctcggatgtagtgcatgtcattgctgaaagagcttaatgagaaggacaactcactcaaagaccatagacttcgagtgaacaatctaggtgagcagcttgatcttctccagaaggatgtacaagcaagggaggtcacacaaatgcaacttaaagatatagttataaggatcgagaccaacatcatggatgaagttgccaaagcttttgaaattgcgatgttgagaggggaaatcagaatattgtctactcactggacgaacaaaaccaagaaccttgaatcacagttaaaaaagcaccagagaactgatcaggagctgaagaagagggttctgaagcttgaattttgtctctggtcctgtcatccactggtgcgttcgccaccgcacctaccgctgttactagctcccttgctcttctcttgctgcgactgggatatagcatcgtggatcttgaacctaggccagaatttaggcaggtctagaaccaccatgatgcctggaacatactcctattttatccatgtatgagccttatgggaactctgcaattactatggatcctcttatacattatgttcgacatggagacaaggtagtatattgagttggaccaataatccttcatattg

SEQ ID NO: 36541 - protein, 170 aa, Zea mays subsp. mays
MSLLKELNEKDNSLKDHRLRVNNLGEQLDLLQKDVQAREVTQMQLKDIVIRIETNIMDEVAKAFEIAMLRGEIRILSTHWTNKTKNLESQLKKHQRTDQELKKRVLKLEFCLWSCHPLVRSPPHLPLLLAPLLFSCCDWDIASWILNLGQNLGRSRTTMMPGTYSYFIHV

SEQ ID NO: 36542 - protein, 128 aa, Zea mays subsp. mays
MQLKDIVIRIETNIMDEVAKAFEIAMLRGEIRILSTHWTNKTKNLESQLKKHQRTDQELKKRVLKLEFCLWSCHPLVRSPPHLPLLLAPLLFSCCDWDIASWILNLGQNLGRSRTTMMPGTYSYFIHV

SEQ ID NO: 36543 - protein, 114 aa, Zea mays subsp. mays
MDEVAKAFEIAMLRGEIRILSTHWTNKTKNLESQLKKHQRTDQELKKRVLKLEFCLWSCHPLVRSPPHLPLLLAPLLFSCCDWDIASWILNLGQNLGRSRTTMMPGTYSYFIHV

SEQ ID NO: 36544 - DNA, 1151 bp, Zea mays subsp. mays
gctctacatttctctttctgcaatggcgagattagtgcgtgtggctagatcctcctccctctttggctttggtaaccgtttctactctacttcagccgaagctagccacgcgtcgtcgccttcgccgtttcttcacggcggcggagctagcagggttgctccgaaagatagaaatgttcagtgggtgtttttgggatgtcctggtgttggaaaaggaacttacgctagtagactatcaacccttctcggcgttcctcacatcgccaccggcgatctcgtccgtgaagagcttgcatcttctggacctctctctcaaaagctatcggagattgtaaatcagggaaaattggtttctgatgagatcattgtagacttattgtccaaaagacttgaggctggtgaagctagaggtgaatcagggtttatccttgatggctttcctcgtaccatgagacaagctgaaatactgggagatgtaactgacatcgatttggtggtgaatttgaagcttcctgaggaagttttggttgacaaatgccttggaaggagaacatgtagtcaatgtggcaagggttttaatgtagctcacatcaacttaaagggtgagaatggaagacctggaattagtatggatccacttctccctccacatcaatgtatgtcaaagcttgtcactcgagctgatgatactgaagaggtggtgaaagcaaggcttcgtatatacaatgaaacgagccagcctcttgaagaatactaccgtaccaagggaaagcttatggagtttgacttacctggaggcatcccagagtcatggccaaggctattggaagctttaaggcttgacgattacgaggagaaacagtctgtcgcagcataagttcactatcaaatcccggtatttaaaattctttgcatgtggaatacatatgcgtaatcaattttgtgttggaaataaaagtaaaaagaaaaccttagattgtttttcacctcaatagaaataatcatacacacttgcgcaaactattatttttccaccagccggggattttggctccatgagagaaatatgatgtatcatgattgtttgagattgctagtgacattacaggaatgtatcaatacttctacacctcttgttatgcattgagttt

SEQ ID NO: 36545 - protein, 291 aa, Zea mays subsp. mays
LYISLSAMARLVRVARSSSLFGFGNRFYSTSAEASHASSPSPFLHGGGASRVAPKDRNVQWVFLGCPGVGKGTYASRLSTLLGVPHIATGDLVREELASSGPLSQKLSEIVNQGKLVSDEIIVDLLSKRLEAGEARGESGFILDGFPRTMRQAEILGDVTDIDLVVNLKLPEEVLVDKCLGRRTCSQCGKGFNVAHINLKGENGRPGISMDPLLPPHQCMSKLVTRADDTEEVVKARLRIYNETSQPLEEYYRTKGKLMEFDLPGGIPESWPRLLEALRLDDYEEKQSVAA

SEQ ID NO: 36546 - protein, 284 aa, Zea mays subsp. mays; identical to SEQ ID NO: 6328

SEQ ID NO: 36547 - DNA, 530 bp, Zea mays subsp. mays
agctcgccatagttgattcatacacaatacaagcatcctctctactactgaagagatcaaattccattcagggtagatagaaatggcatcctccagcttttatcttctcagcgttcttctcatcgtgatcgcttctggcgcctgggctacggatcctagtcctctccaggacttctgcgttgcagacaaagaatcgcctgtacttgtcaatgggtttgcctgcaaggatgctaaggatgtcaaggtcgacgacttcttcctagcagccgacctcgacaagccaagggatacgacgatgagcaaggtcaagtcaaatgtcacattgatcaatgtgatgaagctggccggcctaaacaccttgggcatctccatggctagaattgactatgcccctcaaggacagaacccaccacatacgcatccccgtgccactgcgatcttaactgttcttgaaggatcactctatgttggttttgtcacttctaacccagacaacaaattcattagcaagctactcaacaagggagatg

SEQ ID NO: 36548 - protein, 149 aa, Zea mays subsp. mays
MASSSFYLLSVLLIVIASGAWATDPSPLQDFCVADKESPVLVNGFACKDAKDVKVDDFFLAADLDKPRDTTMSKVKSNVTLINVMKLAGLNTLGISMARIDYAPQGQNPPHTHPRATAILTVLEGSLYVGFVTSNPDNKFISKLLNKGD

SEQ ID NO: 36549 - protein, 78 aa, Zea mays subsp. mays
MSKVKSNVTLINVMKLAGLNTLGISMARIDYAPQGQNPPHTHPRATAILTVLEGSLYVGFVTSNPDNKFISKLLNKGD

SEQ ID NO: 36550 - DNA, 798 bp, Zea mays subsp. mays
atccacacgcagagacgaaagccctgcccacctcacgttgctgctcccaaatatctggcagggaaacaaatcctatcccctcctacgccccggccattcactcactcacctagctagtcatcactactcacgttcgtccaccagagacaacaatggccatggagacgtgcttcagagcgtgggcgctgcacgcccccgctggcagcaaggacaggctcctcgtcggcaacctgcaggtgctgccgtcgaagcgggcgctcgcgccgctgtccgtcggccgcgtcgccacgcgccggccgcggcacgtctgccagtccaagaacgcagtggacgaagttgtggtggcggacgagaagaactgggacgggttggtgatggcgtgcgagacgccggtgctggtggagttctgggcgccgtggtgcgggccgtgccggatgatcgcgccggtgatcgacgagctggccaaggactacgccggcaagatcacgtgctgcaaggtgaacacggacgacagccccaacgtggcgtccacctacggcatccgcagcatccccaccgtgctcatcttcaagggcggcgagaagaaggagagcgtcatcggcgccgtcccaaagtccacgctcaccaccctcatcgacaagtacatcggtagctcatgagcatgccatgcatgcatgcatcgacgactaaacacatatgtgtatctctagtagcctttgcatacgggatatgatcaattcaagcagccagccgtctgctactgctgtgttatatataccatacctccatgtcgaatcc

SEQ ID NO: 36551 - protein, 216 aa, Zea mays subsp. mays
STRRDESPAHLTLLLPNIWQGNKSYPLLRPGHSLTHLASHHYSRSSTRDNNGHGDVLQSVGAARPRWQQGQAPRRQPAGAAVEAGARAAVRRPRRHAPAAARLPVQERSGRSCGGGREELGRVGDGVRDAGAGGVLGAVVRAVPDDRAGDRRAGQGLRRQDHVLQGEHGRQPQRGVHLRHPQHPHRAHLQGRREEGERHRRRPKVHAHHPHRQVHR

SEQ ID NO: 36552 - protein, 168 aa, Zea mays subsp. mays
MAMETCFRAWALHAPAGSKDRLLVGNLQVLPSKRALAPLSVGRVATRRPRHVCQSKNAVDEVVVADEKNWDGLVMACETPVLVEFWAPWCGPCRMIAPVIDELAKDYAGKITCCKVNTDDSPNVASTYGIRSIPTVLIFKGGEKKESVIGAVPKSTLTTLIDKYIGSS

SEQ ID NO: 36553 - protein, 166 aa, Zea mays subsp. mays
METCFRAWALHAPAGSKDRLLVGNLQVLPSKRALAPLSVGRVATRRPRHVCQSKNAVDEVVVADEKNWDGLVMACETPVLVEFWAPWCGPCRMIAPVIDELAKDYAGKITCCKVNTDDSPNVASTYGIRSIPTVLIFKGGEKKESVIGAVPKSTLTTLIDKYIGSS

SEQ ID NO: 36554 - DNA, 949 bp, Zea mays subsp. mays
aacatcctaatcaaaaaagaaacggaagaagaacggcaggcgaagcatcgccagattggtatatcgatcgattgatcggtggcggagggaggggaggagggcggcagatggcggcgtgccggggcttcttcgagtgcctgctcaggctgctcaacttcatcctcaccgtcgccggcctcgccatggtcggctacgggatctacctgctcgtcgagtggatgaagatatctgaggacggcagcagcggggggttgacggcggaggtgctggtctccggccggccgttgttgggggctgtcgctctcggtgacagcttcctcgacatgctacccaaagcatggtttatttatttgttcattggtgttggtgctactgttttcctcgtgtctctgtttggctgcattggagcagggacaagaaacacctgctgtttgtgtttctatgccttcttggtcatattgttgatccttgctgaagctggagctgctgcattcattttctttgaccatagctggaaagatgtaattccagtggacaagacacataactttgatgttatgtatggctttctgaagaaaaactgggagattgcaagatgggttgctcttggcgttgttgtttttgaggcagtgctctttctattagctctggttgtcagggcaatgaacaaacctgcggagtatgacagtgatgatgaaattattgcaattggccgaagccctaccatgcggcagccattgatccatgcccaaaatgtgccggccaccggtgttcctgtcccaacactcgatcagcgttcaagtagaaatgatgcctggagccaaaggatgcgagagaagtatggtctggacacgagccagttcacgtacaacccctcagacccaagcaggtaccagcagaatggcgctccacaggctgaagaaaggagtcaatgcactataatgtgaag

SEQ ID NO: 36555 - protein, 314 aa, Zea mays subsp. mays
HPNQKRNGRRTAGEASPDWYIDRLIGGGGRGGGRQMAACRGFFECLLRLLNFILTVAGLAMVGYGIYLLVEWMKISEDGSSGGLTAEVLVSGRPLLGAVALGDSFLDMLPKAWFIYLFIGVGATVFLVSLFGCIGAGTRNTCCLCFYAFLVILLILAEAGAAAFIFFDHSWKDVIPVDKTHNFDVMYGFLKKNWEIARWVALGVVVFEAVLFLLALVVRAMNKPAEYDSDDEIIAIGRSPTMRQPLIHAQNVPATGVPVPTLDQRSSRNDAWSQRMREKYGLDTSQFTYNPSDPSRYQQNGAPQAEERSQCTIM

SEQ ID NO: 36556 - protein, 279 aa, Zea mays subsp. mays
MAACRGFFECLLRLLNFILTVAGLAMVGYGIYLLVEWMKISEDGSSGGLTAEVLVSGRPLLGAVALGDSFLDMLPKAWFIYLFIGVGATVFLVSLFGCIGAGTRNTCCLCFYAFLVILLILAEAGAAAFIFFDHSWKDVIPVDKTHNFDVMYGFLKKNWEIARWVALGVVVFEAVLFLLALVVRAMNKPAEYDSDDEIIAIGRSPTMRQPLIHAQNVPATGVPVPTLDQRSSRNDAWSQRMREKYGLDTSQFTYNPSDPSRYQQNGAPQAEERSQCTIM

SEQ ID NO: 36557 - protein, 254 aa, Zea mays subsp. mays
MVGYGIYLLVEWMKISEDGSSGGLTAEVLVSGRPLLGAVALGDSFLDMLPKAWFIYLFIGVGATVFLVSLFGCIGAGTRNTCCLCFYAFLVILLILAEAGAAAFIFFDHSWKDVIPVDKTHNFDVMYGFLKKNWEIARWVALGVVVFEAVLFLLALVVRAMNKPAEYDSDDEIIAIGRSPTMRQPLIHAQNVPATGVPVPTLDQRSSRNDAWSQRMREKYGLDTSQFTYNPSDPSRYQQNGAPQAEERSQCTIM

SEQ ID NO: 36558 - DNA, 2319 bp, Zea mays subsp. mays
gaaggcacacagccgccgctgtttcttcatcttactcgtgctcggcacgcaggcgacggcgacggcggcggcgttcaggctcgggctctcagcgacggtatcagtggtctcccgcctctcgccagtcgcgtcgcgccctcgcctccggtcctctgcacaccgtccggtgaccttgtgttgtaagtttttccagcactgcttgctcacccatttctcaattagaaaacctcaaattctgtccctgagcaccaaatcaagaccataccaatttagtgagtccggacagatggcaatggccgcagttctagccaatggtgattcacagggtcgtcctcagaggaactatcaagttgttgttgctggcactcgtgacatgggcattgggaaggatggggtcttgccatggaagcttcctggtgatcttaaattctttaaagagcttacactaactacatctgatcctgtcaaaaagaatgcagttataatgggaaggaaaacatgggagagcattccggttaagtcaaggccattgcctggtcgtttgaatgtcatacttactcgatctggtagttttgattttgcaacagtagagaatgttgttatctgtggaagtatggagtctgccttagaactgctagcatcaactccatattgcttatcaattgagaaagtgtttgttataggaggcgggcaggtactgagagaatatcttaaaggacctgcatgtgaggctatccatctaactgacattcagtcaagcattgagtgtgacactttcatccctccggttgacttctcagtgttccagccatggtattcatctttcccggtgatagagagcaacattaggcattcgtttgtgtcttttgttcgtgttagaaagtcagtggcagaaactcatgagtcaaatggcaaggaatcaaccgaggttgataccaagaatgacaaatttgaaacagagaatttctcttttctccccaagatggtatatgaccgccatgaggagtaccaatatctcaatcttgttgaagatattataaggtctggtgctcagaaaaacgacaggacaggaactggaacattgtcaaaatttgggtgtcagatgcggttcaacttaaggaaaaattttcctctgctgacaacaaagagggtattttggcgtggtgttgtcgaagaactcctttggttcatcagtggctcaacaaatgcaaaggttttgcaagagaagggtattcatatctgggatggcaatgcttcaagagagtatctcaacagtgttggcttggcacacagggaggaaggtgatttaggtccaatttatggatttcagtggcgtcactttggtgctgaatacactgacatgcatgctgactatacgggaaaaggttttgatcagctaatggatgtgattgacaagatcaagaatgatcctgaggaccgtcgaataattttgtcggcgtggaatccttcagatctcaagaagatggctcttcctccttgccacatgtttgcacaattctatgtggaaaatggggagctatcttgccagatgtatcaacgctctgcagacatggggcttggtgttccattcaacatcgcatcatattctctcctgacatacatgattgctcaagtttgtgatctttctcctggagattttgtccatgttataggggatgcccatgtctatagaaaccatgttcgagcactggaggagcaaattcagaagatgcctaaaccatttccaattttgaagataaatccttcaaaaaaggatatagattcttttatggcatcagacttcaagctggttggctatgatccccaccagaagatagagatgaaaatggcagtgtaatggtggcttggctggagcccccatcctatggactcggtggatgtaatcagtaggactggtactacataaaaattaaccggacaccgcactagcttgtttttggtgatggtgctgaatgttcagtgggagacgttttctctgatttatcagttgcgatttgcgtactatggtcgcttaagtcaactctacaaaatcggctcccttttatctggagccagttgattactcgattgcgagtgtgagggatgatctaggcataccctgttgcaagggcctactgggtgtgtgccggcccccatgaggctgtgacgattgcgccagtccagtacctcgtgagaattatgtaaccgaagttgccgtgtacctgggagaactcccgtactgtttggtgtttgattgcctatttcactttgcagtttggtcacaagataacgacttgctggtagggtttttgagaacac

SEQ ID NO: 36559 - protein, 618 aa, Zea mays subsp. mays
KAHSRRCFFILLVLGTQATATAAAFRLGLSATVSVVSRLSPVASRPRLRSSAHRPVTLCCKFFQHCLLTHFSIRKPQILSLSTKSRPYQFSESGQMAMAAVLANGDSQGRPQRNYQVVVAGTRDMGIGKDGVLPWKLPGDLKFFKELTLTTSDPVKKNAVIMGRKTWESIPVKSRPLPGRLNVILTRSGSFDFATVENVVICGSMESALELLASTPYCLSIEKVFVIGGGQVLREYLKGPACEAIHLTDIQSSIECDTFIPPVDFSVFQPWYSSFPVIESNIRHSFVSFVRVRKSVAETHESNGKESTEVDTKNDKFETENFSFLPKMVYDRHEEYQYLNLVEDIIRSGAQKNDRTGTGTLSKFGCQMRFNLRKNFPLLTTKRVFWRGVVEELLWFISGSTNAKVLQEKGIHIWDGNASREYLNSVGLAHREEGDLGPIYGFQWRHFGAEYTDMHADYTGKGFDQLMDVIDKIKNDPEDRRIILSAWNPSDLKKMALPPCHMFAQFYVENGELSCQMYQRSADMGLGVPFNIASYSLLTYMIAQVCDLSPGDFVHVIGDAHVYRNHVRALEEQIQKMPKPFPILKINPSKKDIDSFMASDFKLVGYDPHQKIEMKMAV

SEQ ID NO: 36560 - protein, 523 aa, Zea mays subsp. mays
MAMAAVLANGDSQGRPQRNYQVVVAGTRDMGIGKDGVLPWKLPGDLKFFKELTLTTSDPVKKNAVIMGRKTWESIPVKSRPLPGRLNVILTRSGSFDFATVENVVICGSMESALELLASTPYCLSIEKVFVIGGGQVLREYLKGPACEAIHLTDIQSSIECDTFIPPVDFSVFQPWYSSFPVIESNIRHSFVSFVRVRKSVAETHESNGKESTEVDTKNDKFETENFSFLPKMVYDRHEEYQYLNLVEDIIRSGAQKNDRTGTGTLSKFGCQMRFNLRKNFPLLTTKRVFWRGVVEELLWFISGSTNAKVLQEKGIHIWDGNASREYLNSVGLAHREEGDLGPIYGFQWRHFGAEYTDMHADYTGKGFDQLMDVIDKIKNDPEDRRIILSAWNPSDLKKMALPPCHMFAQFYVENGELSCQMYQRSADMGLGVPFNIASYSLLTYMIAQVCDLSPGDFVHVIGDAHVYRNHVRALEEQIQKMPKPFPILKINPSKKDIDSFMASDFKLVGYDPHQKIEMKMAV

SEQ ID NO: 36561 - protein, 521 aa, Zea mays subsp. mays
MAAVLANGDSQGRPQRNYQVVVAGTRDMGIGKDGVLPWKLPGDLKFFKELTLTTSDPVKKNAVIMGRKTWESIPVKSRPLPGRLNVILTRSGSFDFATVENVVICGSMESALELLASTPYCLSIEKVFVIGGGQVLREYLKGPACEAIHLTDIQSSIECDTFIPPVDFSVFQPWYSSFPVIESNIRHSFVSFVRVRKSVAETHESNGKESTEVDTKNDKFETENFSFLPKMVYDRHEEYQYLNLVEDIIRSGAQKNDRTGTGTLSKFGCQMRFNLRKNFPLLTTKRVFWRGVVEELLWFISGSTNAKVLQEKGIHIWDGNASREYLNSVGLAHREEGDLGPIYGFQWRHFGAEYTDMHADYTGKGFDQLMDVIDKIKNDPEDRRIILSAWNPSDLKKMALPPCHMFAQFYVENGELSCQMYQRSADMGLGVPFNIASYSLLTYMIAQVCDLSPGDFVHVIGDAHVYRNHVRALEEQIQKMPKPFPILKINPSKKDIDSFMASDFKLVGYDPHQKIEMKMAV

SEQ ID NO: 36562 - DNA, 438 bp, Zea mays subsp. mays
ttgcacccggacgccaaaggcctcgtcgtctggatcatcgaagccaaggttctgtccaaggctgagctgcagttcctggccatgctcccggacatccgccccaaagtcagggtgatcgcagaatgcggcaactggagaagctttgtttggaagccactgaagcagatcgcaggcctcgagccggacccggacgcggaggaatgatcaagcaagcaggtctagctagttgtctaccagactggctactgctactgctacactctccaattgcttctgggacatctctccctgccattcctgcagctttgcactgaatgagagaggcaattaataaagatatacatacatttttttggcacgagtgtcagaagagaaagaatgcgaaccatgtacagatttccatacatgtgaatagttcacggccgcgacgcgtttagc

SEQ ID NO: 36563 - protein, 67 aa, Zea mays subsp. mays
LHPDAKGLVVWIIEAKVLSKAELQFLAMLPDIRPKVRVIAECGNWRSFVWKPLKQIAGLEPDPDAEE

SEQ ID NO: 36564 - protein, 63 aa, Zea mays subsp. mays
MRQLEKLCLEATEADRRPRAGPGRGGMIKQAGLASCLPDWLLLLLHSPIASGTSLPAIPAALH

SEQ ID NO: 36565 - protein, 40 aa, Zea mays subsp. mays
MLPDIRPKVRVIAECGNWRSFVWKPLKQIAGLEPDPDAEE

SEQ ID NO: 36566 - DNA, 1492 bp, Zea mays subsp. mays
aggatctccctctgcccaaaaccaaacctgcctccgcacctaccatttcctcccccaaaccaccatggacttctccgccggagggagtgggagcggcggaggaggcggaggcgccggcgacggccgggcgcaggcggagcgctggctggagatcgccgagaagctcctcgcggcgagcgacctcgtcggctgcaagcgcttcgcggagcgggcgttggaggcggacccgctcctccctggcgccgacgagatcctcgccgtcgccgacgtcctcctcgcctcccagtccatgggcccctcgggccaccaggacccgctcgccatcctccagctgccgcctggggtcaaccccgaccaggcctccgtctcccgcgcattccgccgcctcgcgctactcctcgggccccgcaacccgcaccatggcgccgagatggcgctccgcctcgtcaacgacgcctacgccttcctctccgatccgtctcgccgcccccctccgcccgccaatcccgccactggtaccccttcctcctcccactatgcggccgctcccgcccccgatccccgggagttctggacggcgtgccccttctgctgctacgtgcaccagtacccgcgtgacctggtcgggcgcgccctcaagtgccccaacgagggctgccgccgcggattcgtggcttctgagatcccgaccccacccaccgttgtgccaggcactgatatgtaccactgcgcctgggggttcttccccctcggatttcccaacgcggccgacctgggcgccaactggaagccattctacaaggcgttcccttggaacacggctcccagtggtcaaggtgctgatggtaggagccatggcaaccgtggtggcaggcaggcacagaatgacagtgctcgtggtggctcctctagaggtaggatcaagaagactaccgcccgcaagaaggtcggggcagggttgaggaggcgttctgcttggtggtggtgtggagagtggcattgattcttcgatgctcgggcaggaaggctgggctggggatgaggacggtggagatggaaggaccgaggaggtgaggggaattaacataaatgaggcggcgcaagctacagacggcactggtagggttaatgttagcggtgctggtggagttgaagatatgggcaacttccatatcgatgttgatgcaaccgaggatatattggggaatttgcacaacctgcccttcctgagggtggacaatcttgggcggatgatttaactgttcttatggtttgctgtggctagaaaagtattgtatgattagccaggccgaaacagatgtctcagggactggcccttgctgttcaactgttcgttttattttaactgttccatctcctgttatgccatgttgtagttgtagacttgttgtctaccttgtacctgtagttacttagcatcagacatgggaaatttgtatctccattagatggagatcatgccctttgcctt

SEQ ID NO: 36567 - protein, 333 aa, Zea mays subsp. mays
GSPSAQNQTCLRTYHFLPQTTMDFSAGGSGSGGGGGGAGDGRAQAERWLEIAEKLLAASDLVGCKRFAERALEADPLLPGADEILAVADVLLASQSMGPSGHQDPLAILQLPPGVNPDQASVSRAFRRLALLLGPRNPHHGAEMALRLVNDAYAFLSDPSRRPPPPANPATGTPSSSHYAAAPAPDPREFWTACPFCCYVHQYPRDLVGRALKCPNEGCRRGFVASEIPTPPTVVPGTDMYHCAWGFFPLGFPNAADLGANWKPFYKAFPWNTAPSGQGADGRSHGNRGGRQAQNDSARGGSSRGRIKKTTARKKVGAGLRRRSAWWWCGEWH

SEQ ID NO: 36568 - protein, 319 aa, Zea mays subsp. mays
DLPLPKTKPASAPTISSPKPPWTSPPEGVGAAEEAEAPATAGRRRSAGWRSPRSSSRRATSSAASASRSGRWRRTRSSLAPTRSSPSPTSSSPPSPWAPRATRTRSPSSSCRLGSTPTRPPSPAHSAASRYSSGPATRTMAPRWRSASSTTPTPSSPIRLAAPLRPPIPPLVPLPPPTMRPLPPPIPGSSGRRAPSAATCTSTRVTWSGAPSSAPTRAAAADSWLLRSRPHPPLCQALICTTAPGGSSPSDFPTRPTWAPTGSHSTRRSLGTRLPVVKVLMVGAMATVVAGRHRMTVLVVAPLEVGSRRLPPARRSGQG

SEQ ID NO: 36569 - protein, 312 aa, Zea mays subsp. mays
MDFSAGGSGSGGGGGGAGDGRAQAERWLEIAEKLLAASDLVGCKRFAERALEADPLLPGADEILAVADVLLASQSMGPSGHQDPLAILQLPPGVNPDQASVSRAFRRLALLLGPRNPHHGAEMALRLVNDAYAFLSDPSRRPPPPANPATGTPSSSHYAAAPAPDPREFWTACPFCCYVHQYPRDLVGRALKCPNEGCRRGFVASEIPTPPTVVPGTDMYHCAWGFFPLGFPNAADLGANWKPFYKAFPWNTAPSGQGADGRSHGNRGGRQAQNDSARGGSSRGRIKKTTARKKVGAGLRRRSAWWWCGEWH

SEQ ID NO: 36570 - DNA, 1038 bp, Zea mays subsp. mays
acaccgcgcaggaacaaccaccaggcacagccaacaagcttgctagtgtgtggtttctctcatcaggtcaggaggagcatggccgaccataaggaggagcagtctgtgatggacaagatctccgagaagttccacggcggggactcctcgtcgtcgtctgactcggacgacgagaagaagaaggggtcttcttcggcgtcggcgacggaggccatgaaagccaagatctaccgtctcttcggccgcgagaggcccgtccactctgtcctcggcggcggcaagcccgccgatcttgtcctatggaggaacaagaagatctcaggcggggtactcgctggtgccacggccatctggctcctgttcgaggttatggagtaccatctcctcaccttggtgtgccactgtctcatcgtctcgctggccatcctgttcctgtggtccaacgcctccagtttcatcaacaagtccccaccaaacattcctgaggtgaaaatccctgaggatgtgtctgttaatgttgcactgacactgagatacgagatcaacaggggctttgctaccttgagggagattggacatggacacgatctaaagaaattcctaattgttatcgcaggtctctggctcttttcagttcttgggagctgttgcaacttcctgacactgttctatattgtctttgtggcactgtacactatacctgttctgtatgagaaatatgaggacaaggttgatgcttttggtgagaaggctatgatcgaactgaagaagtattatgccatcttcgatgagaagtgcctatcgaagattccaaagggcctcaaggataagaagcactagattggtagtaaggtacttgatatgaatcaacacccacgttaagtcacaccttccttgaaggatggtgcttggtcctggtctctagttgatagtatataatctgtatgggcaactctggtgtgactgacactttgatctgctgaaaattgttgatcttgtttttggtttcaactttcagcatacttgcctggaagcttg

SEQ ID NO: 36571 - protein, 279 aa, Zea mays subsp. mays
TPRRNNHQAQPTSLLVCGFSHQVRRSMADHKEEQSVMDKISEKFHGGDSSSSSDSDDEKKKGSSSASATEAMKAKIYRLFGRERPVHSVLGGGKPADLVLWRNKKISGGVLAGATAIWLLFEVMEYHLLTLVCHCLIVSLAILFLWSNASSFINKSPPNIPEVKIPEDVSVNVALTLRYEINRGFATLREIGHGHDLKKFLIVIAGLWLFSVLGSCCNFLTLFYIVFVALYTIPVLYEKYEDKVDAFGEKAMIELKKYYAIFDEKCLSKIPKGLKDKKH

SEQ ID NO: 36572 - protein, 253 aa, Zea mays subsp. mays
MADHKEEQSVMDKISEKFHGGDSSSSSDSDDEKKKGSSSASATEAMKAKIYRLFGRERPVHSVLGGGKPADLVLWRNKKISGGVLAGATAIWLLFEVMEYHLLTLVCHCLIVSLAILFLWSNASSFINKSPPNIPEVKIPEDVSVNVALTLRYEINRGFATLREIGHGHDLKKFLIVIAGLWLFSVLGSCCNFLTLFYIVFVALYTIPVLYEKYEDKVDAFGEKAMIELKKYYAIFDEKCLSKIPKGLKDKKH

SEQ ID NO: 36573 - protein, 243 aa, Zea mays subsp. mays
MDKISEKFHGGDSSSSSDSDDEKKKGSSSASATEAMKAKIYRLFGRERPVHSVLGGGKPADLVLWRNKKISGGVLAGATAIWLLFEVMEYHLLTLVCHCLIVSLAILFLWSNASSFINKSPPNIPEVKIPEDVSVNVALTLRYEINRGFATLREIGHGHDLKKFLIVIAGLWLFSVLGSCCNFLTLFYIVFVALYTIPVLYEKYEDKVDAFGEKAMIELKKYYAIFDEKCLSKIPKGLKDKKH

SEQ ID NO: 36574 - DNA, 643 bp, Zea mays subsp. mays
aatttgaatttagaaaatccagaggacaccgcggacgtgggtcgtctggtagggtcacagaaggagagatgtgaagtgaaggtggcgttgtccaactcattcggattcggtgggcacaactcatcgattctctttgccccctttaagtgaacatgaccgaggcgaagaaccgacatcttcatcatcgcgcaaatggcttcatatatctggaactccacatagaaatctggtggattctgcaacttcctccgtgccacacatactgcatatggaggtccaaagtgagggtacaatactatgccacacacatttgagcgaacaaaacatcagcccccctacatgtttcatctactatcacaaagttgcaaaatatatatggtaactatcaaagaacttaccgtacctgggccagtgttttcgccttcaccatacctgcccattgtcagtactatttcctacatttggtgtagtcccgtagcttaatcctcttccctgcggaggtgatgggatcttatgttgtattgatgttgccaacagtatcgttattagccatgaattgctggttcccactgtaagcatcactggacgttttcgctttggttgtttctgtttcctgctgttcataaccgagttaaagatatgt

SEQ ID NO: 36575 - protein, 61 aa, Zea mays subsp. mays
MPHTFERTKHQPPYMFHLLSQSCKIYMVTIKELTVPGPVFSPSPYLPIVSTISYIWCSPVA

SEQ ID NO: 36576 - protein, 53 aa, Zea mays subsp. mays
MTEAKNRHLHHRANGFIYLELHIEIWWILQLPPCHTYCIWRSKVRVQYYATHI

SEQ ID NO: 36577 - protein, 49 aa, Zea mays subsp. mays
NLNLENPEDTADVGRLVGSQKERCEVKVALSNSFGFGGHNSSILFAPFK

SEQ ID NO: 36578 - DNA, 1029 bp, Zea mays subsp. mays
cagctacgtaggccccccccccccgtccaggacacggccagccggaacaccccgacaacccaggaccagaacagccgcgtcgaggcggccctcgagacccccggccccgacccatcccaccaccacccccacccccacccccacctcgcctcccggatccgcacccgatgggcagcctcggcggcgacgcggagccgcagggcgcgaggcggcggccgcggttcctgtgcctgcacgggttccgcaccagcggcgagatcatgcgcaagcaggtgctcgggaagtggcccgccgacgtcacggcgcgcctcgacctcgtcttcgccgacgcgccgttccccgccgagggcaagtccgacgtcgacggcatcttcgacccgccctactacgagtggttccagttcgacaagagttttatggagtacaggaatttcgacaagtgcctggcctacatcgaagagctgatgataaaagacggccccttcgacggactgatgggtttctcccagggttccattctgtcggcggcgcttccggggctccaagaacaagggctggccctgactagagtcccgaaggtcaagtacctcatcatcatcggtggcgccaagttccagtcaccgacggtggccagcaaggcgtacgccaacaagatcgcatgcccctcgcttcacttcatcggtgaaaacgacttcctgaaagtccatggtgaaaagctgatagaatcatgcgtggacccattcgtaatccgtcacccaaagggccacacagttccgaggctcgatgacgagagtctagtggtcatgcaccgtttccttgagaagattgagggggaggtacttgagtattcgtccaaagatgtcaacgaaaccgaagtgggcatgtgataaagactttagaccattagtacttgatgttggcgaaaaggctatacttgtactatttatttacagaatgaacatgtgatgtaacctcgattttcatgaggcatgattatgaaaaatacagaataatcgttttatattctat

SEQ ID NO: 36579 - protein, 239 aa, Zea mays subsp. mays
MGSLGGDAEPQGARRRPRFLCLHGFRTSGEIMRKQVLGKWPADVTARLDLVFADAPFPAEGKSDVDGIFDPPYYEWFQFDKSFMEYRNFDKCLAYIEELMIKDGPFDGLMGFSQGSILSAALPGLQEQGLALTRVPKVKYLIIIGGAKFQSPTVASKAYANKIACPSLHFIGENDFLKVHGEKLIESCVDPFVIRHPKGHTVPRLDDESLVVMHRFLEKIEGEVLEYSSKDVNETEVGM

SEQ ID NO: 36580 - protein, 208 aa, Zea mays subsp. mays
MRKQVLGKWPADVTARLDLVFADAPFPAEGKSDVDGIFDPPYYEWFQFDKSFMEYRNFDKCLAYIEELMIKDGPFDGLMGFSQGSILSAALPGLQEQGLALTRVPKVKYLIIIGGAKFQSPTVASKAYANKIACPSLHFIGENDFLKVHGEKLIESCVDPFVIRHPKGHTVPRLDDESLVVMHRFLEKIEGEVLEYSSKDVNETEVGM

SEQ ID NO: 36581 - protein, 188 aa, Zea mays subsp. mays
SYVGPPPPSRTRPAGTPRQPRTRTAASRRPSRPPAPTHPTTTPTPTPTSPPGSAPDGQPRRRRGAAGREAAAAVPVPARVPHQRRDHAQAGAREVARRRHGAPRPRLRRRAVPRRGQVRRRRHLRPALLRVVPVRQEFYGVQEFRQVPGLHRRADDKRRPLRRTDGFLPGFHSVGGASGAPRTRAGPD

SEQ ID NO: 36582 - DNA, 998 bp, Zea mays subsp. mays
gccagttcgccacctcctttgctctcgcctcgcgcgcgctcccccccgcgcatcgtgccgttcgccaccgcaccgcgccgatggaggtcgccgccgtgcccagatccgccgcggcctgccgtgcggcgcccctgctcccggccgtccgagccgctgcgtgccacctggccctgccccggcgcgcgttctccgcatccgtcgcggcggcaccggcgccgcgccgcctcgccgctcgtcgcgctgcggatggtgacagcgtggagacggcgccggaggcggtccccattgagaaaaggttccctcccttcccgagcgtcatggacatcaaccagatccgcgagatcctcccccacaggttcccattccttttggttgatagagtaattaaatacaaggctggagaatatgcagtggggatcaagaatgttacaataaatgataatttcttcccaggacattttcctgaacgccccataatgcccggctgtcctcatggtcgaggctatggcccaggttgggggtctggtgatgctgcaacctgaagttggtggatctcgagacaacttctttttcgccgggattgacaaagttaggttcaggaagccagtgattgctggcgatacactgatcatgaggatgacactgactaagtatcagaagaggtttggactcgccaagatggaaggaaaagcttatgttggtggtgacctagtttgtgaaggggagttcctcctagtcagcgcaaccgagtagtgcaaagacacttcatgattctctgggaagaatcattggttggaatcagatctggttggatgtttgaaagaaccgagttttgaactaattatacaatcggcagttgaggcgatcctttacctgttcttaagcatgttgttgagtccatgtggtgatttctatcggttaccaagggcccaaggctgaatccacgccatgttatgttgcaattgaggattacaatatattgggtaattgtttgatgg

SEQ ID NO: 36583 - protein, 179 aa, Zea mays subsp. mays
QFATSFALASRALPPAHRAVRHRTAPMEVAAVPRSAAACRAAPLLPAVRAAACHLALPRRAFSASVAAAPAPRRLAARRAADGDSVETAPEAVPIEKRFPPFPSVMDINQIREILPHRFPFLLVDRVIKYKAGEYAVGIKNVTINDNFFPGHFPERPIMPGCPHGRGYGPGWGSGDAAT

SEQ ID NO: 36584 - protein, 153 aa, Zea mays subsp. mays
MEVAAVPRSAAACRAAPLLPAVRAAACHLALPRRAFSASVAAAPAPRRLAARRAADGDSVETAPEAVPIEKRFPPFPSVMDINQIREILPHRFPFLLVDRVIKYKAGEYAVGIKNVTINDNFFPGHFPERPIMPGCPHGRGYGPGWGSGDAAT

SEQ ID NO: 36585 - protein, 127 aa, Zea mays subsp. mays
ASSPPPLLSPRARSPPRIVPFATAPRRWRSPPCPDPPRPAVRRPCSRPSEPLRATWPCPGARSPHPSRRHRRRAASPLVALRMVTAWRRRRRRSPLRKGSLPSRASWTSTRSARSSPTGSHSFWLIE

SEQ ID NO: 36586 - DNA, 1245 bp, Zea mays subsp. mays
cccccccccccatctcattcctctcctctctcctccccccctctcgctcgagctctgttggaggcaggagggcaggccagggcgccaggccaggcgaggtggttcggttgacgagttcttcctcttcctcgacatcgccgatcccgccacgcgctgcccgcagcggagacacaataatcttaggtgaggagcatagttcaaaagtcaagatagaaagggcattggacactggaggaacgttgtgttggtggtaactgaggtttgtgcttgtttgtagatggagaggttaagcaccaaccagctctacagttctggtgttcctgtaaccgtaccaacatctctgccttgtataccagtctctctggatgagagcttcccgaggcttcccgatgcacagagtgttttgatggagagagaattgaggagcactccactaccacctcaccagacaactgttgctcctatccgtggtctgtttcactccaatactggatctgttggtcctttgtgctcacctccgtctgtaaggttctcttcgcattcaaatcctgagcaataccccaaccacaattcatacaattctcaagtaccaagcactgcaagttcctcaacgctgaattatgggtcacaatatggaggctttgaaccatccataaccgatttcccaagagacattgaaccgacttggtgccccgatccagttgagagcattcttggatactctggtgatgtccctgctgggaataatttgactgggaccacttctattggagcttcagatgatcttactaagcaaactgaatggtggacagagtttatgaatgaggattggaaggacatggttgataacccgacttccacagaaactcaaccggttgggcaacctgtgcaatcatccaactcagttcaccaatcagctacccaacaaacagtttcatctcaatctgttgaaccgttggcagttgtggcaccctcacccactgctggctccaatactggcaaggcacgcatgagatggactcctgagcttcacgagcgctttgtggatgctgtcaatatacttggtggcagtgaaaaagcaactcctaagggtgtcctgaagctaatgaaggcagacaatttgaccatttatcatgtaaaaagtcatcttcagaaatacagaacagctagatacagaccagagttatctgaaggctcttctgaaaagaaagtggcatcaaaagaagatataccatctattgactt

SEQ ID NO: 36587 - protein, 322 aa, Zea mays subsp. mays
MERLSTNQLYSSGVPVTVPTSLPCIPVSLDESFPRLPDAQSVLMERELRSTPLPPHQTTVAPIRGLFHSNTGSVGPLCSPPSVRFSSHSNPEQYPNHNSYNSQVPSTASSSTLNYGSQYGGFEPSITDFPRDIEPTWCPDPVESILGYSGDVPAGNNLTGTTSIGASDDLTKQTEWWTEFMNEDWKDMVDNPTSTETQPVGQPVQSSNSVHQSATQQTVSSQSVEPLAVVAPSPTAGSNTGKARMRWTPELHERFVDAVNILGGSEKATPKGVLKLMKADNLTIYHVKSHLQKYRTARYRPELSEGSSEKKVASKEDIPSID

SEQ ID NO: 36588 - protein, 279 aa, Zea mays subsp. mays
MERELRSTPLPPHQTTVAPIRGLFHSNTGSVGPLCSPPSVRFSSHSNPEQYPNHNSYNSQVPSTASSSTLNYGSQYGGFEPSITDFPRDIEPTWCPDPVESILGYSGDVPAGNNLTGTTSIGASDDLTKQTEWWTEFMNEDWKDMVDNPTSTETQPVGQPVQSSNSVHQSATQQTVSSQSVEPLAVVAPSPTAGSNTGKARMRWTPELHERFVDAVNILGGSEKATPKGVLKLMKADNLTIYHVKSHLQKYRTARYRPELSEGSSEKKVASKEDIPSID

SEQ ID NO: 36589 - DNA, 1129 bp, Zea mays subsp. mays
ttctcgccgaacggaaaaccctgcccggaccttcgttgcagcgctacgagcttcgacgggccgctcgatctccacctctgaagtggctgcttgtgatctagatctgaaagctgcagtggttgacagctgagtgtgaaactgtgaatcgaagatgagcgtggtgggcttcgacctcggcaatgagagctgcatcgtggcggtcgcgcggcagcgcggcatcgacgtggtcctcaacgaggagtccaagcgcgagacacccgccatcgtctgcttcggggacaagcagcggttcatcggcaccgccggcgccgcgtcctctaccatgaaccccaagaactccatttctcagatcaagcgcttgctaggccgcaagtactccgaccccgagctacagagagatctcgcctccttcccgttccgtgtcacggagggccccgatggttttcccctggtccatgtacgatacctgggcgaggaacggacgttcacctctaccaagctgcttgccatggtgctgtccaatttgaagggcattgctgagggtaacctgaatgctgcagttgttgattgttgcattggtattccagtctactttacggatctgcagcgcagggctgttcttgatgctgctactattgcgggtctccagccattgcgattgttccatgagacaacagccactgcactggcatatggtatttataagactgatctcccggagaatgaccagttgaacgttgcatttgttgatgtcggtcatgcaagcatgcaggtcagtgttgtcggttacaagaagggacagctcaagatgttgtcgcatacgtatgaccagtctcttggcgggagggactttgatgaggccctgtttaagcactttgcagctaaattcaaagaggaatataagattgatgtgtaccagaatgcgcgtgcatgcattaggttgcgtgtggcatgtgagaaacttaagaaggtactgagcgccaacccagaggccccactgaacattgagtgtttgatggatgagaaggatgtgcggggttttattaaaagggaggagttcgaacagatcagtgcctcggtgctggaacgcgtgaaaggaccactggaaaaggccttggctgaagctggg

SEQ ID NO: 36590 - protein, 326 aa, Zea mays subsp. mays
MSVVGFDLGNESCIVAVARQRGIDVVLNEESKRETPAIVCFGDKQRFIGTAGAASSTMNPKNSISQIKRLLGRKYSDPELQRDLASFPFRVTEGPDGFPLVHVRYLGEERTFTSTKLLAMVLSNLKGIAEGNLNAAVVDCCIGIPVYFTDLQRRAVLDAATIAGLQPLRLFHETTATALAYGIYKTDLPENDQLNVAFVDVGHASMQVSVVGYKKGQLKMLSHTYDQSLGGRDFDEALFKHFAAKFKEEYKIDVYQNARACIRLRVACEKLKKVLSANPEAPLNIECLMDEKDVRGFIKREEFEQISASVLERVKGPLEKALAEAG

SEQ ID NO: 36591 - protein, 269 aa, Zea mays subsp. mays
MNPKNSISQIKRLLGRKYSDPELQRDLASFPFRVTEGPDGFPLVHVRYLGEERTFTSTKLLAMVLSNLKGIAEGNLNAAVVDCCIGIPVYFTDLQRRAVLDAATIAGLQPLRLFHETTATALAYGIYKTDLPENDQLNVAFVDVGHASMQVSVVGYKKGQLKMLSHTYDQSLGGRDFDEALFKHFAAKFKEEYKIDVYQNARACIRLRVACEKLKKVLSANPEAPLNIECLMDEKDVRGFIKREEFEQISASVLERVKGPLEKALAEAG

SEQ ID NO: 36592 - protein, 207 aa, Zea mays subsp. mays
MVLSNLKGIAEGNLNAAVVDCCIGIPVYFTDLQRRAVLDAATIAGLQPLRLFHETTATALAYGIYKTDLPENDQLNVAFVDVGHASMQVSVVGYKKGQLKMLSHTYDQSLGGRDFDEALFKHFAAKFKEEYKIDVYQNARACIRLRVACEKLKKVLSANPEAPLNIECLMDEKDVRGFIKREEFEQISASVLERVKGPLEKALAEAG

SEQ ID NO: 36593 - DNA, 548 bp, Zea mays subsp. mays
gggcagttgctttggagctgtgccgagaatttgaggacaagtttcttgctcacataacatctggtgagggatctggttggaaaatagttgcaagttttgaaggcaagtttccagacagaatcaaacagctaccgttggaccgacatttcgatctcaacaatgtcaaaaggattgtcttggaagccgatggttatcaaccatatttgatatctccagagaaagggttgaaatccttaataaagttagtactggaaatggcaaaggagccatcacgactatgtgttgaggaggttcatcgtgtattgttagacatagtcaatgcctccgcaaatgccacaccaggactcggaaggtatcctccattcaagcgtgaggttgttgcaatagcatcaaatgcattggataccttcaaaaatgatgccaaaaagatggtcgtcgcgcttgttgatatggaacgtgcctttgttcctccccaacatttcatccgcttggtgcaaagaagaatggaaaggcagcgtcgagaggatgagttaagaaaccgatcttct

SEQ ID NO: 36594 - protein, 182 aa, Zea mays subsp. mays
AVALELCREFEDKFLAHITSGEGSGWKIVASFEGKFPDRIKQLPLDRHFDLNNVKRIVLEADGYQPYLISPEKGLKSLIKLVLEMAKEPSRLCVEEVHRVLLDIVNASANATPGLGRYPPFKREVVAIASNALDTFKNDAKKMVVALVDMERAFVPPQHFIRLVQRRMERQRREDELRNRSS

SEQ ID NO: 36595 - protein, 98 aa, Zea mays subsp. mays
MAKEPSRLCVEEVHRVLLDIVNASANATPGLGRYPPFKREVVAIASNALDTFKNDAKKMVVALVDMERAFVPPQHFIRLVQRRMERQRREDELRNRSS

SEQ ID NO: 36596 - DNA, 466 bp, Zea mays subsp. mays
aacggatcgaaaacgaattaccctcggtgccctccctctcggcggcggcggcgcaagtccccttcatctccggcgcggcaaatggcaggcggcagggttgcacatgctaccctcaagggccccagcgtggtgaaggagatcttcattggactgaccctgggtctgatcgctggaggtatgtggaagatgcaccactggaacgagcagaggaaaactagatccttctacgacatgcttgacaagggccagatcgtcgtcgtcgaggagtagttcccacgtgtcacctcagaagtttttttttccagttgtttttgaaaactcactctggagagcacgacaaagtgaatgctgtggagatttggcttgaaaataagcataaccatttgagaacaccagcttctgttgaattgtcttttcttgtcatgactatttgagcatgtccgtgtcgtaaccaaacatctgatcc

SEQ ID NO: 36597 - protein, 89 aa, Zea mays subsp. mays
NGSKTNYPRCPPSRRRRRKSPSSPARQMAGGRVAHATLKGPSVVKEIFIGLTLGLIAGGMWKMHHWNEQRKTRSFYDMLDKGQIVVVEE

SEQ ID NO: 36598 - protein, 71 aa, Zea mays subsp. mays
RIENELPSVPSLSAAAAQVPFISGAANGRRQGCTCYPQGPQRGEGDLHWTDPGSDRWRYVEDAPLERAEEN

SEQ ID NO: 36599 - protein, 62 aa, Zea mays subsp. mays
MAGGRVAHATLKGPSVVKEIFIGLTLGLIAGGMWKMHHWNEQRKTRSFYDMLDKGQIVVVEE

SEQ ID NO: 36600 - DNA, 425 bp, Zea mays subsp. mays
ctcagtgttctcgactcgaccgccgccgtcccagttcgcttcgcgtcacccagagctcgtcggcctccgtccccgcgagaagcgagagcatggacacccaggtgaagcttgctgttgtggtgaaggtgatgggcaggaccggctccaggggtcaggtgacccaggtcagagtgaagttcttggatgaccagaaccgtctcatcatgaggaacgtcaagggccctgttcgtgataaggaggacaggcaaggtgaggatgatgagaaggaaggattttttcgcaggatgttcaaggataagaacgaggagaggagagatagtaatcatgcaagacatgggaatgaggaaagactgggcaagagtgtggaagatgatgacagagaaggtttcttccgcaaaattttcaaagataaacctggatgatct

SEQ ID NO: 36601 - protein, 139 aa, Zea mays subsp. mays
QCSRLDRRRPSSLRVTQSSSASVPARSESMDTQVKLAVVVKVMGRTGSRGQVTQVRVKFLDDQNRLIMRNVKGPVRDKEDRQGEDDEKEGFFRRMFKDKNEERRDSNHARHGNEERLGKSVEDDDREGFFRKIFKDKPG

SEQ ID NO: 36602 - protein, 110 aa, Zea mays subsp. mays
MDTQVKLAVVVKVMGRTGSRGQVTQVRVKFLDDQNRLIMRNVKGPVRDKEDRQGEDDEKEGFFRRMFKDKNEERRDSNHARHGNEERLGKSVEDDDREGFFRKIFKDKPG

SEQ ID NO: 36603 - protein, 97 aa, Zea mays subsp. mays
MGRTGSRGQVTQVRVKFLDDQNRLIMRNVKGPVRDKEDRQGEDDEKEGFFRRMFKDKNEERRDSNHARHGNEERLGKSVEDDDREGFFRKIFKDKPG

SEQ ID NO: 36604 - DNA, 1834 bp, Zea mays subsp. mays
ctaatcgaaaaccacttgatcccatgttcaacagacctttgttccctagaactttgggcaacccttttgcccttttggatccaggttttgctgacataactgctggtgatatatttggacgtggaccccgagttacacaacctagggacgtgaggcagatacctattgaagttaaggacagcaatactcaaacaggcagttctggtcagggtcccattattgaggatgttactggacgtgaatctttctatggtccagaggtccatgggaccgttatagttgacgaagatgatgaagacttgccattaacactatctgctcaggatcctaagatcccaagcagtgctttgcacccaaaccatttcatgcctagtgcgcctccagtggttgatgttagtgaccataacaatgatatagaagaggagatgattaaggcagcaattgaagcttcaaaaagggaagctgacgggatgaaaaatgttctaagtagtggtcaatctgaaaacatgtcacgtggcagaggtgatcatgagcttgctcgggcggtttctttgtccttggagacagcagagcgagagagagctctgcgccaagagggaatgtatgtagcagatcactctcctgacttatctgataaagaaggcggtcaaggaggaagtgggataagcgaaaggcgaggactaactacaggagaagtgggaacttctgagcaaacagtagatgaagagaacttccaagaggacaatgaagatggtgaagaacaacctttagttaggactcgttctaggcgacttcgaggcagaactattgagccagcagaaactgttcaaagggctgacagcccgccctcaagtccccaacctcatgttcaaattggtcatcagcgtaatgtggggtttccttcagtagagtggggtggtatttcttctgaagagcgtgatgaagctcttatgcttgaggctgcaatgtttggtgggattcctgaaggagcaccatatccattttccttcccagcccatggcaggtcgactcactatcccctagtagcacgtcctccatcaccatcattaacggcacagcggttgttaagggagcagcaggatgatgagtatcttgctgctctccaagctgatcgagaaaaagagttgaaggctgtgcaggaggctgaacttcgcagggtagaggaagctgcagcaagagaggctgctcttgaacgtcaaaagaaagaagaggaggagaagctaaagaaacaacgtgaggaagaggagttggaatccaagcttgcagccaaacaagcatcactacctaaggagccactacaaaatgacgagggggctgtcacagtggtagtccgcatgcctgatggtagtcgtcgaggacggcgctttctcaaatctgacaggcttcagtatctttttgatttcatagacatcagccggactttcaaaccaggaacttatagactggcgaggtcttatcccaggcgtgccttcactgaattggagagccagatgtcactgagcgatctcggtctcactagcaagcaggaagctctgttcctagaaaaactgtctgcgtagagtacaaggttctggagttatggtcgagtagtatatgcacttataaaatcggtcatttagatcgtgcctggcgtgtgttcatgaaaatactgcagcggttgaatgattactgatctctagagatcccgtcgccatcttctgtgctctgaaacggaggtgtttcgatctgactgtgcagatgggcagttctacattcagatttcagaacaactgtagctcttgcggttttaagacttgagtatggtttactttgg

SEQ ID NO: 36605 - protein, 525 aa, Zea mays subsp. mays
NRKPLDPMFNRPLFPRTLGNPFALLDPGFADITAGDIFGRGPRVTQPRDVRQIPIEVKDSNTQTGSSGQGPIIEDVTGRESFYGPEVHGTVIVDEDDEDLPLTLSAQDPKIPSSALHPNHFMPSAPPVVDVSDHNNDIEEEMIKAAIEASKREADGMKNVLSSGQSENMSRGRGDHELARAVSLSLETAERERALRQEGMYVADHSPDLSDKEGGQGGSGISERRGLTTGEVGTSEQTVDEENFQEDNEDGEEQPLVRTRSRRLRGRTIEPAETVQRADSPPSSPQPHVQIGHQRNVGFPSVEWGGISSEERDEALMLEAAMFGGIPEGAPYPFSFPAHGRSTHYPLVARPPSPSLTAQRLLREQQDDEYLAALQADREKELKAVQEAELRRVEEAAAREAALERQKKEEEEKLKKQREEEELESKLAAKQASLPKEPLQNDEGAVTVVVRMPDGSRRGRRFLKSDRLQYLFDFIDISRTFKPGTYRLARSYPRRAFTELESQMSLSDLGLTSKQEALFLEKLSA

SEQ ID NO: 36606 - protein, 518 aa, Zea mays subsp. mays
MFNRPLFPRTLGNPFALLDPGFADITAGDIFGRGPRVTQPRDVRQIPIEVKDSNTQTGSSGQGPIIEDVTGRESFYGPEVHGTVIVDEDDEDLPLTLSAQDPKIPSSALHPNHFMPSAPPVVDVSDHNNDIEEEMIKAAIEASKREADGMKNVLSSGQSENMSRGRGDHELARAVSLSLETAERERALRQEGMYVADHSPDLSDKEGGQGGSGISERRGLTTGEVGTSEQTVDEENFQEDNEDGEEQPLVRTRSRRLRGRTIEPAETVQRADSPPSSPQPHVQIGHQRNVGFPSVEWGGISSEERDEALMLEAAMFGGIPEGAPYPFSFPAHGRSTHYPLVARPPSPSLTAQRLLREQQDDEYLAALQADREKELKAVQEAELRRVEEAAAREAALERQKKEEEEKLKKQREEEELESKLAAKQASLPKEPLQNDEGAVTVVVRMPDGSRRGRRFLKSDRLQYLFDFIDISRTFKPGTYRLARSYPRRAFTELESQMSLSDLGLTSKQEALFLEKLSA

SEQ ID NO: 36607 - protein, 404 aa, Zea mays subsp. mays
MPSAPPVVDVSDHNNDIEEEMIKAAIEASKREADGMKNVLSSGQSENMSRGRGDHELARAVSLSLETAERERALRQEGMYVADHSPDLSDKEGGQGGSGISERRGLTTGEVGTSEQTVDEENFQEDNEDGEEQPLVRTRSRRLRGRTIEPAETVQRADSPPSSPQPHVQIGHQRNVGFPSVEWGGISSEERDEALMLEAAMFGGIPEGAPYPFSFPAHGRSTHYPLVARPPSPSLTAQRLLREQQDDEYLAALQADREKELKAVQEAELRRVEEAAAREAALERQKKEEEEKLKKQREEEELESKLAAKQASLPKEPLQNDEGAVTVVVRMPDGSRRGRRFLKSDRLQYLFDFIDISRTFKPGTYRLARSYPRRAFTELESQMSLSDLGLTSKQEALFLEKLSA

SEQ ID NO: 36608 - DNA, 742 bp, Zea mays subsp. mays
cattcagatttccaatgcaaatgatgatgtcgttcatcactgtggttcaagaaaactacccgaatcgtcttggggtattgtttgtcatccgtcttcctccagttgtcagagttattgcacagacatttcttcaagtcttgaaaccagctacaaagcagaagttgcgttttgagggagattcgtacaagaaggcattggcggagttcctgcaggctgtgccagcgtttctgggcggtaaatgcagctgcccgcgatgtgagagtcctcgtgatgattcagtgatacaggcaggggaagggagcaagaagcagccccgcttggtcagcgttgatgacgggttacctgtcacagacttggacttcgacttggatgaagagatcccatcaccttatagctgcgagaacgccatcagggctgcgataatcggcctgctgatggtgtgcatcttcgtcgcgtttctggctgggatgatcgaccctgcatccgttccagccagtgcctgagagcttgtggaatagagcatgcacgtacatgtgttgctaattaggatgcagggtgctgtatttcttggcaggcttcttgtatgttgtcgtcagaccgccatagagcgctttctcccagtgtgagcgagcgcatgaataatatatatcctctgtgtcaaatgttggttagcagttcaattcgggcctactagatttcactattttcttttttatcttgatcgggcctactgaatttttgc

SEQ ID NO: 36609 - protein, 166 aa, Zea mays subsp. mays
FRFPMQMMMSFITVVQENYPNRLGVLFVIRLPPVVRVIAQTFLQVLKPATKQKLRFEGDSYKKALAEFLQAVPAFLGGKCSCPRCESPRDDSVIQAGEGSKKQPRLVSVDDGLPVTDLDFDLDEEIPSPYSCENAIRAAIIGLLMVCIFVAFLAGMIDPASVPASA

SEQ ID NO: 36610 - protein, 162 aa, Zea mays subsp. mays
MQMMMSFITVVQENYPNRLGVLFVIRLPPVVRVIAQTFLQVLKPATKQKLRFEGDSYKKALAEFLQAVPAFLGGKCSCPRCESPRDDSVIQAGEGSKKQPRLVSVDDGLPVTDLDFDLDEEIPSPYSCENAIRAAIIGLLMVCIFVAFLAGMIDPASVPASA

SEQ ID NO: 36611 - protein, 160 aa, Zea mays subsp. mays
MMMSFITVVQENYPNRLGVLFVIRLPPVVRVIAQTFLQVLKPATKQKLRFEGDSYKKALAEFLQAVPAFLGGKCSCPRCESPRDDSVIQAGEGSKKQPRLVSVDDGLPVTDLDFDLDEEIPSPYSCENAIRAAIIGLLMVCIFVAFLAGMIDPASVPASA

SEQ ID NO: 36612 - DNA, 679 bp, Zea mays subsp. mays
aaaaaaataaaacgggagcaaggccgcaggtcgtctgtccactgcggctgtgcgcttcgttcagttcagttcatccgtgttcttgtttgcgaggtcgagagagactgagagaggatgtcgtgctgcggaggcaactgcgggtgcggctccggctgcaagtgcggcaacggctgcggagggtgcagcaagatgtacccggacatggccgagcaggtgaccaccaccaccacccaggctctcatcatgggtgtcgcaccatccaaggggcacgccgagggcgggttcgaggcggccgccggagctgagaacggcgggtgcaagtgcggcggcaactgccagtgcgacccctgcaactgcggcaagtgagctaggtgctccaccctgcaggccggccggaggaagctagctaattataaagcttaataaagtatagcggcgtcgctgtgtgtgtttcgagtcagtcagtcagtcagttgcgtgccatggcatgctccgagtctgagatgatgatgatgcctgatggcggcgtcgtgtcctcccctggccccctggggcgcttctggcgagcagtgtgttgtgttgtgttgtgtgggtgccgcacgctagcaggctagccatgtgccctgctgtgttgtgtcaccatccatctataatcttatctataccccaccttttgtgt

SEQ ID NO: 36613 - protein, 100 aa, Zea mays subsp. mays
KNKTGARPQVVCPLRLCASFSSVHPCSCLRGRERLREDVVLRRQLRVRLRLQVRQRLRRVQQDVPGHGRAGDHHHHPGSHHGCRTIQGARRGRVRGGRRS

SEQ ID NO: 36614 - protein, 83 aa, Zea mays subsp. mays
MSCCGGNCGCGSGCKCGNGCGGCSKMYPDMAEQVTTTTTQALIMGVAPSKGHAEGGFEAAAGAENGGCKCGGNCQCDPCNCGK

SEQ ID NO: 36615 - protein, 58 aa, Zea mays subsp. mays
MYPDMAEQVTTTTTQALIMGVAPSKGHAEGGFEAAAGAENGGCKCGGNCQCDPCNCGK

SEQ ID NO: 36616 - DNA, 849 bp, Zea mays subsp. mays
ctagaacatcctaatcaaaaagtttatatgtgagcgttcctcgcaattaatagagagatctatctatctatcgatcgagctttcgttatcctcctcgatcttaattacaggtcatagctaagcaggtctgacaggatgtcgtggcagacatacgtcgatgagcacctcatgtgcgagatcgagggccaccacctgacctccgctgccatagtcggccacgacggcgccgtttgggcccagagcaccgcattcccacagttcaagacagaggagatgaccaacatcatgaaggacttcgacgagcccgggttcctggccccgaccggcctcttcctcggccccaccaagtacatggtcatccaaggcgagcccggcgctgtcatccgcgggaagaagggatctggaggcataactgtgaagaagacagggcaagcgatggtggtcggcatctacgacgagcccatgacccccggccagtgcaacatggtggtcgagaggctcggcgactacctcgtagagcaaggcctgtgaatggattcatttaatctgcgagcatccagcagcagcaacgataccaacaccagcattatttaattggtagcctcctctagctacgcacgcatttttagtcccctacacgtccttggattctgcgtggctctgttaatcatctctcatccttcgtctgccatttctcccctgcccgtcgccgatcaccagagatttttgttccttgttggtaccatgcattttggcaaataattttgtgattccatccccaaattaaagtttggttgtcgtatggtttgtaaacccagaacaatatatatatatgtgtgtgtgtgatcg

SEQ ID NO: 36617 - protein, 131 aa, Zea mays subsp. mays
MSWQTYVDEHLMCEIEGHHLTSAAIVGHDGAVWAQSTAFPQFKTEEMTNIMKDFDEPGFLAPTGLFLGPTKYMVIQGEPGAVIRGKKGSGGITVKKTGQAMVVGIYDEPMTPGQCNMVVERLGDYLVEQGL

SEQ ID NO: 36618 - protein, 120 aa, Zea mays subsp. mays
MCEIEGHHLTSAAIVGHDGAVWAQSTAFPQFKTEEMTNIMKDFDEPGFLAPTGLFLGPTKYMVIQGEPGAVIRGKKGSGGITVKKTGQAMVVGIYDEPMTPGQCNMVVERLGDYLVEQGL

SEQ ID NO: 36619 - protein, 85 aa, Zea mays subsp. mays
MTNIMKDFDEPGFLAPTGLFLGPTKYMVIQGEPGAVIRGKKGSGGITVKKTGQAMVVGIYDEPMTPGQCNMVVERLGDYLVEQGL

SEQ ID NO: 36620 - DNA, 582 bp, Zea mays subsp. mays
gcaattggaaaggatgttcaggccatgaaggcagtcgttggagaggaggcactctcgtctgaggatctgctttacttagagttccttgacaagtttgagaggaagtttgtgacacaaggagcatacgacacacggaacatcttccagtcactagatcttgcatggacattgcttcggatcttccctcgcgaacttctccaccgtatcccggcgaagaccttggaccagtactatagcagagatgcctcccactgaatcactgatcgttgatcagtgttccaatagtttggcaagtgttgaataaattgaacagattggcttcatggccttttccctgtatttatgtgtagtcaggtccaattcttttctgttgatgagcgcaagtttttcgtagatgactcgcggtcacggcaatatttgtgatattgtgtcatctgtggactatggttaaatttcagttatttgttttctttcaccttccagaactgttagcaagagcattctggaccaggatgctcgaacacaactggctgtatgtacatttgtgaatggtgaataaagaaggggcaataaactgctgcc

SEQ ID NO: 36621 - protein, 84 aa, Zea mays subsp. mays
AIGKDVQAMKAVVGEEALSSEDLLYLEFLDKFERKFVTQGAYDTRNIFQSLDLAWTLLRIFPRELLHRIPAKTLDQYYSRDASH

SEQ ID NO: 36622 - protein, 76 aa, Zea mays subsp. mays
MKAVVGEEALSSEDLLYLEFLDKFERKFVTQGAYDTRNIFQSLDLAWTLLRIFPRELLHRIPAKTLDQYYSRDASH

SEQ ID NO: 36623 - DNA, 1293 bp, Zea mays subsp. mays
ctagaacatcctaatcgaaaaagtcatcttctcccgttcacgtaacgtgcactagggtttatggtttagggcgaccgccgccgtcctacgtccagcggccaggttttcttctggccctctgcgctgactacaacccaccacctccgggttaggttttggatttggagacatggcggaagtggtggacaagctcaaggactacgatatcaagaaggagggagaagcagagatcctcctgcacaagaagaactccgtcttctttaatcccgtgcaggttcacaacagagacatgtccattgctgttttaaggacctttgttgccaagcgtaaggaagaacatgaagcgctggtggacaagaggaatacatcacataaaaaaaataaacaaagtgaaacatccagtcaaaatggagaggatgcgtcaactggccagcaagatgaaatggatgttgtttgtgaaaaggagctgaataaagctgaagatcaaattgatgatctgtcgaaagaagcaacagaaccttcttggaaagtaaccagagagcttaagccaccacttgttcttgaggctttggctgctactgggttgcggtctctccggtatgcccgtgaagttgagggcttaggaaaggtagttgctctggacaatgataaagcttctattgaagattgcaaacgaaacataaagttcaatggtgcttccgctactagtaaggtggaagcttacttggttgatgctcgaattcacatgctgacgcatccaaaagaatttgatgtggttgatcttgacccttatggatcaccatctatatttctcgactcagctgtacaggctgttgctgatggtggtctattgatgtgcactgccactgatttggcagttctttgtggtaccaatggagaagtttgttacgcgaagtatggttcattcccaaccaagggcaagtattgccatgaaatggctttgagaattcgatgacaagaccaacgtcaaggccgcctggggtaaggtcggcgcgcacgctggcgagtatggtgcggaggccctggagaggatgttcctgtccttccccaccaccaagacctacttcccgcacttcgacctgagccacggctctgcccaggttaagggccacggcaagaaggtggccgacgcgctgaccaacgccgtggcgcacgtggacgacatgcccaacgcgctgtccgccctgagcgacctgcacgcgcacaagcttcgggtggacccggtcaacttcaagctcctaagccactgcctgctggtgagcccatcaagct

SEQ ID NO: 36624 - protein, 268 aa, Zea mays subsp. mays
MAEVVDKLKDYDIKKEGEAEILLHKKNSVFFNPVQVHNRDMSIAVLRTFVAKRKEEHEALVDKRNTSHKKNKQSETSSQNGEDASTGQQDEMDVVCEKELNKAEDQIDDLSKEATEPSWKVTRELKPPLVLEALAATGLRSLRYAREVEGLGKVVALDNDKASIEDCKRNIKFNGASATSKVEAYLVDARIHMLTHPKEFDVVDLDPYGSPSIFLDSAVQAVADGGLLMCTATDLAVLCGTNGEVCYAKYGSFPTKGKYCHEMALRIR

SEQ ID NO: 36625 - protein, 228 aa, Zea mays subsp. mays
MSIAVLRTFVAKRKEEHEALVDKRNTSHKKNKQSETSSQNGEDASTGQQDEMDVVCEKELNKAEDQIDDLSKEATEPSWKVTRELKPPLVLEALAATGLRSLRYAREVEGLGKVVALDNDKASIEDCKRNIKFNGASATSKVEAYLVDARIHMLTHPKEFDVVDLDPYGSPSIFLDSAVQAVADGGLLMCTATDLAVLCGTNGEVCYAKYGSFPTKGKYCHEMALRIR

SEQ ID NO: 36626 - protein, 177 aa, Zea mays subsp. mays
MDVVCEKELNKAEDQIDDLSKEATEPSWKVTRELKPPLVLEALAATGLRSLRYAREVEGLGKVVALDNDKASIEDCKRNIKFNGASATSKVEAYLVDARIHMLTHPKEFDVVDLDPYGSPSIFLDSAVQAVADGGLLMCTATDLAVLCGTNGEVCYAKYGSFPTKGKYCHEMALRIR

SEQ ID NO: 36627 - DNA, 1203 bp, Zea mays subsp. mays
cagaaaagctcgtccatttgcctcattgctattttgtcaatgactacaagcagaaaaatcgagactgtctcactccagtatgtccacacaaaagatctgattatggattacctgaggataaatttatttttgcttgcttcaatcagctttacaaaatggaccctgagatatttgacacatggtgcaatattctcaaacgtgttcccaacagcgcattatggcttttaagattcccggcagctggtgaaactagagtgagagcatatgctgctgccagaggagtaagatcagatcaaattgtattcacagacgttgccatgaaaaatgagcatatacgacgcagtgccctggcagaccttttcctggacactcccctctgcaatgcacacacaacaggcactgacatactgtgggctggtctgccaatgatcacccttccactagagaaaatggcaaccagagtagctggttccctctgcgtagctactgggcttggggaggagatgattgttagcagcatgaagaagtatgaagatagagcagtagaactagcgctgaatccggtgaagcttcaagcgctgactaacaagctcaaggaagttcgtatgacctgcccgttgtttgatacagctcgatgggtgcgcaaccttgaaagggcatactacaagatgtggaacctttactgctccagtcgccacccggagccattcaaggtggtagaggatgacaatgagttcccatttgaccgctaacgagatctcatcagcagcccggctctgtaaataaggcgagagttgtagaatatttagcatcgtgaccgctgttgctccaggtgcttgtttgccgccccctttcctgtcgtgcacatcacctctgtggaggctaacttcgtagtatgtatgtactacactgcaaaagaagtcctagggttagcctattgttatcactatttagtttgctatattgtatcgcggtcgtggtttctaaaataaactgcaacctttaggagtgttgatgtgaaaaaaaaaaaaaaaaaaaaaaaaaaaaaaaaaaaaaaaaaaaaaaaaaaaaaaaaaaaaaaaaaaaaaaaaaaaccccaaaaaaaaaaaaaaagttttttcccacccccccccccccaagggggcccccaacccccaacccccccaaaaaaaaaccaaaaacccccccccccccccccccctt

SEQ ID NO: 36628 - protein, 249 aa, Zea mays subsp. mays
EKLVHLPHCYFVNDYKQKNRDCLTPVCPHKRSDYGLPEDKFIFACFNQLYKMDPEIFDTWCNILKRVPNSALWLLRFPAAGETRVRAYAAARGVRSDQIVFTDVAMKNEHIRRSALADLFLDTPLCNAHTTGTDILWAGLPMITLPLEKMATRVAGSLCVATGLGEEMIVSSMKKYEDRAVELALNPVKLQALTNKLKEVRMTCPLFDTARWVRNLERAYYKMWNLYCSSRHPEPFKVVEDDNEFPFDR

SEQ ID NO: 36629 - protein, 198 aa, Zea mays subsp. mays
MDPEIFDTWCNILKRVPNSALWLLRFPAAGETRVRAYAAARGVRSDQIVFTDVAMKNEHIRRSALADLFLDTPLCNAHTTGTDILWAGLPMITLPLEKMATRVAGSLCVATGLGEEMIVSSMKKYEDRAVELALNPVKLQALTNKLKEVRMTCPLFDTARWVRNLERAYYKMWNLYCSSRHPEPFKVVEDDNEFPFDR

SEQ ID NO: 36630 - protein, 144 aa, Zea mays subsp. mays
MKNEHIRRSALADLFLDTPLCNAHTTGTDILWAGLPMITLPLEKMATRVAGSLCVATGLGEEMIVSSMKKYEDRAVELALNPVKLQALTNKLKEVRMTCPLFDTARWVRNLERAYYKMWNLYCSSRHPEPFKVVEDDNEFPFDR

SEQ ID NO: 36631 - DNA, 946 bp, Zea mays subsp. mays
agcgaccagccagtgatcgaccgaggcagagactgactactaggagcagagagcagcggagatggtgaagattccgagccccaggaggctgttcaggagccggtccaggagcaccaccatcatcggcggcggcggcgcggacatctgcgccatggtcgccgagcacgagaggatcgagtgggaggtgcggcccggcgggatgctggtgcagaagcggcgctcgacggaggacgacgcggcggcggccgtggagtacatcctggtgagagtctccaccaccgggtggcagtggcacgacgtctccatcgacgccaccgcaaccttcggcgacctgaaggtgatgctgtcgctggcgaccgggctgtggcccagggagcagaggctgctgtacaggggcaaggagagggacgactgcgagcacctgcacatggtgggggtccaggacaaggacaaggtgctgctcctggaggacccggccgtcaaggagaggaagctcaggtcaaccaccttggcgcagctcatgggcgtgccctgccactccttcatccaagtgtagagagaaacccccggggaatttcttgccatttttctcccgtctctcgtcgtcgttctccagcttgcctgcgtgagcgaagggtttcagtccagtctaaccgcgtttgttcagagcctgctgagttccatctcagggcttgaattcggccaatcgaatcaagacagtcgcaaacgataggatataaagatgatgaatacatggcgtaaattactgtgaacgggtacgtaatgtcatcccagtgccagtgtgtgtgagccagtagttctttggttccttgctctgtatatattctctttttttccttcctgagatcagcaaaacagttcggaattccatagatgctgctgtaaatcccttgtcttttttccacggaatgcagcccccttttct

SEQ ID NO: 36632 - protein, 164 aa, Zea mays subsp. mays
MVKIPSPRRLFRSRSRSTTIIGGGGADICAMVAEHERIEWEVRPGGMLVQKRRSTEDDAAAAVEYILVRVSTTGWQWHDVSIDATATFGDLKVMLSLATGLWPREQRLLYRGKERDDCEHLHMVGVQDKDKVLLLEDPAVKERKLRSTTLAQLMGVPCHSFIQV

SEQ ID NO: 36633 - protein, 134 aa, Zea mays subsp. mays
MVAEHERIEWEVRPGGMLVQKRRSTEDDAAAAVEYILVRVSTTGWQWHDVSIDATATFGDLKVMLSLATGLWPREQRLLYRGKERDDCEHLHMVGVQDKDKVLLLEDPAVKERKLRSTTLAQLMGVPCHSFIQV

SEQ ID NO: 36634 - protein, 118 aa, Zea mays subsp. mays
MLVQKRRSTEDDAAAAVEYILVRVSTTGWQWHDVSIDATATFGDLKVMLSLATGLWPREQRLLYRGKERDDCEHLHMVGVQDKDKVLLLEDPAVKERKLRSTTLAQLMGVPCHSFIQV

SEQ ID NO: 36635 - DNA, 752 bp, Zea mays subsp. mays
agagcacccagcaggccagggccagccggccaaaacacagaaaagctaaacccgacctccgctcgccgccgcccggcaggatggcttcgtcggcggcgtaccctgatgcggacgagaacctggaggccatcatcacccgcatagagcagaagtcccgaaagatcgagacccttctcaagcagtcgaagccggtggaggccctaaagacggcgctcgaggggtcaccgctcaagacccgcgacgagcgatgcaagtcggcgaactggatcgtggtgcaccgcgcgttgatggcgattagggacgtagacggcatgttcaactccctggatcccgagtactacgacatcctcatgaagtacctttatatgtttatctacaggggataggccaacatgtgaccagtgcctcaaaattcatgaaaaactgactgagaaggcaggcctaggctgtatattgcgatcccttgctgatactgtaaacactgtatgaactttgtctctgctgctgatggtggatattgcaaagttctctcctgctctttacaatcacatcaggcaaactacctgtagttgttaactagttttgcattgtgtctttctttgccattaggcaattttagttagcgtatcattgtaccttactagaatggccgaacaaaatgtgtattatgttgattttcaagtctttgtattaagggtgacaccggactctaaattttactctataaaatttaaggatgggattatgggctc

SEQ ID NO: 36636 - protein, 127 aa, Zea mays subsp. mays
STQQARASRPKHRKAKPDLRSPPPGRMASSAAYPDADENLEAIITRIEQKSRKIETLLKQSKPVEALKTALEGSPLKTRDERCKSANWIVVHRALMAIRDVDGMFNSLDPEYYDILMKYLYMFIYRG

SEQ ID NO: 36637 - protein, 101 aa, Zea mays subsp. mays
MASSAAYPDADENLEAIITRIEQKSRKIETLLKQSKPVEALKTALEGSPLKTRDERCKSANWIVVHRALMAIRDVDGMFNSLDPEYYDILMKYLYMFIYRG

SEQ ID NO: 36638 - DNA, 1026 bp, Zea mays subsp. mays
ttacctagaacatcctaatcgaaaaactctctgtagtctgtactcacatctttccctcccgtcggccagcagccttccggttcaggccccgtcgcatctctcctcgtcggccagctgcagggcacctagcgcgtggtcggcgagcgcgcgggcgggcggcagggggcgccgcggcggcgagcgcgcaggcccccactcacagacgactgggtcggccttcactgctacttcggccccttcgtcgccgacgagaaccaccgcgtgctggttggaatggcaagtacagcatgctttgtgattgtcagtaagaatgacatcccaatctatgaggcagaagttggatctgcacccaaaaaagaagatttgtcttatcaccatcagtttattctgcatgctgcattagatgttgttcaggatctagcatggacaacaaatgcaatgtgagtattttattagttttgtgttttgttcaggacctagcatggagctagttagttttgcattgggctgcgggcgaagaatgaaatcatatccaaaagttattcttctagcattttatgtaccgtttacctcacctagaaacttttgtttgtttacattttcttttcctccccaggttcctgaagtcagttgatagattcaatgaccttgtggtgtctgtttatgtaactgctggtcataccagattcatgctacttcatgactcgcgtagcgaggatggaataaaaagcttttttcaagaggtccatgaactttacatcaagatattcctcaacccgctttacctgcccggctctcgcatcacatcctctcatttcgataccaaggtgagggcgctcgcgaggaggtacctgtaatatgggcatatgctggggtttcatcgtaaagcagacacgccgatttttttgtgccatcatcatctgataacacatacgtctaattttcttggcgttggctttgttatgaccgacctatggatcattttttttcgagaacaaaatgacttggcgataattttcaaacttt

SEQ ID NO: 36639 - protein, 99 aa, Zea mays subsp. mays
MYRLPHLETFVCLHFLFLPRFLKSVDRFNDLVVSVYVTAGHTRFMLLHDSRSEDGIKSFFQEVHELYIKIFLNPLYLPGSRITSSHFDTKVRALARRYL

SEQ ID NO: 36640 - protein, 98 aa, Zea mays subsp. mays
YLEHPNRKTLCSLYSHLSLPSASSLPVQAPSHLSSSASCRAPSAWSASARAGGRGRRGGERAGPHSQTTGSAFTATSAPSSPTRTTACWLEWQVQHAL

SEQ ID NO: 36641 - protein, 66 aa, Zea mays subsp. mays
MQCEYFISFVFCSGPSMELVSFALGCGRRMKSYPKVILLAFYVPFTSPRNFCLFTFSFPPQVPEVS

SEQ ID NO: 36642 - DNA, 1671 bp, Zea mays subsp. mays
aactacggtaactcgtctgctcgcatttcctcccaatccatcccgcctccaaacccgaactccaagtcgccccgcatcgatggcgcccaaggccgagaagaagcccgcggcgaagaagccggcggaggaggagtacgacgcggatgacggctttggcgacgagccaatcccaatcgcgaggccggtctcggacttcgacatcgttatagatgctcttccgccgggctcggtctctgatgttcaccagattgcccggcggatggtggacgctggctttggccgcgagtgcgccgaggcatacgcggccgcacgccgcggtttcatcgacgagagcgtcgctcgccttggcatccgttcccgtacggtcgacgaggtccactccttaccatgggaggagctcgagtttgacattgctcgctggatcccagccttcaagatggtgtttcgcatcctaatccccagcgagcgccgcctctgtgatcgtgtcttcgaaggccttgctccgtacggcgaccttgcctttgttgctgccgtgcgcacccaggcgcttcagcttatttcattcggagatgcagttgctgctgccagccgcgcgccagaacggctcttccgtgttattgacatgtatgaagcagtacgagacctcctttctgacctcgatcctgtcttctctgatccctactctgcagctctacgtgctgaggtatcagctgtatgcaacactcttggctcctcaatcaagggtatattcatggagctggaaaatctcatccgccgtgacccagcccgtgttgctgtgcctggtggtggtatacatcctatcactcggtatgtcatgaactatctccgtgctgcttgtggttcacggcaaacattggaagaggtgatggaaggtgacttgggtgctgttggcacagcggctattgctgtcgaccctgatcgccctacttcgtcgctagctgtgcacatagcttggatcatggatgtgcttcacaaaaatttggagaccaaatcaaagatatacagggatccaccacttgcttccatattcttgatgaataatgggaaatacattattcacaaggtcaatgacagtgagcttggggttttgcttggtgatgaatggatgaagcagataatgagcagggtgcgcaggtggagtgtggagtaccagcgtggggcctgggcaaaagtcatatcagtgctgcagaccggaggtcctggcgttggcagtatcactgcaaaatccatgcttcagaagatgcagatgttcaacagctacctggaggagatttgcgcggtgcagtcagattgggtgattgcagatgagcagctacgagcagatgttaagtcagcgatagtggattctgttatgcctgcatatagaggcttaattgggagattgagatcatctcctgaagctgcccgagacttgttcatcaaatacaccccagaggatgttcaggaacgcatccaacatctatttgaaggggtggccaagtgattagtctagctattttagtggatatcacaaccttagttatggtgacattttggactcaatgatgtgttgcaaaaaggctggactttgtctcagatgaggaaatgctattgtctccagctgtgtaaaatctgtaggtgtttctgtatcaagtatcaactggtaatttt

SEQ ID NO: 36643 - protein, 500 aa, Zea mays subsp. mays
TTVTRLLAFPPNPSRLQTRTPSRPASMAPKAEKKPAAKKPAEEEYDADDGFGDEPIPIARPVSDFDIVIDALPPGSVSDVHQIARRMVDAGFGRECAEAYAAARRGFIDESVARLGIRSRTVDEVHSLPWEELEFDIARWIPAFKMVFRILIPSERRLCDRVFEGLAPYGDLAFVAAVRTQALQLISFGDAVAAASRAPERLFRVIDMYEAVRDLLSDLDPVFSDPYSAALRAEVSAVCNTLGSSIKGIFMELENLIRRDPARVAVPGGGIHPITRYVMNYLRAACGSRQTLEEVMEGDLGAVGTAAIAVDPDRPTSSLAVHIAWIMDVLHKNLETKSKIYRDPPLASIFLMNNGKYIIHKVNDSELGVLLGDEWMKQIMSRVRRWSVEYQRGAWAKVISVLQTGGPGVGSITAKSMLQKMQMFNSYLEEICAVQSDWVIADEQLRADVKSAIVDSVMPAYRGLIGRLRSSPEAARDLFIKYTPEDVQERIQHLFEGVAK

SEQ ID NO: 36644 - protein, 474 aa, Zea mays subsp. mays
MAPKAEKKPAAKKPAEEEYDADDGFGDEPIPIARPVSDFDIVIDALPPGSVSDVHQIARRMVDAGFGRECAEAYAAARRGFIDESVARLGIRSRTVDEVHSLPWEELEFDIARWIPAFKMVFRILIPSERRLCDRVFEGLAPYGDLAFVAAVRTQALQLISFGDAVAAASRAPERLFRVIDMYEAVRDLLSDLDPVFSDPYSAALRAEVSAVCNTLGSSIKGIFMELENLIRRDPARVAVPGGGIHPITRYVMNYLRAACGSRQTLEEVMEGDLGAVGTAAIAVDPDRPTSSLAVHIAWIMDVLHKNLETKSKIYRDPPLASIFLMNNGKYIIHKVNDSELGVLLGDEWMKQIMSRVRRWSVEYQRGAWAKVISVLQTGGPGVGSITAKSMLQKMQMFNSYLEEICAVQSDWVIADEQLRADVKSAIVDSVMPAYRGLIGRLRSSPEAARDLFIKYTPEDVQERIQHLFEGVAK

SEQ ID NO: 36645 - protein, 414 aa, Zea mays subsp. mays
MVDAGFGRECAEAYAAARRGFIDESVARLGIRSRTVDEVHSLPWEELEFDIARWIPAFKMVFRILIPSERRLCDRVFEGLAPYGDLAFVAAVRTQALQLISFGDAVAAASRAPERLFRVIDMYEAVRDLLSDLDPVFSDPYSAALRAEVSAVCNTLGSSIKGIFMELENLIRRDPARVAVPGGGIHPITRYVMNYLRAACGSRQTLEEVMEGDLGAVGTAAIAVDPDRPTSSLAVHIAWIMDVLHKNLETKSKIYRDPPLASIFLMNNGKYIIHKVNDSELGVLLGDEWMKQIMSRVRRWSVEYQRGAWAKVISVLQTGGPGVGSITAKSMLQKMQMFNSYLEEICAVQSDWVIADEQLRADVKSAIVDSVMPAYRGLIGRLRSSPEAARDLFIKYTPEDVQERIQHLFEGVAK

SEQ ID NO: 36646 - DNA, 1128 bp, Zea mays subsp. mays
cgcgagtaaaggagcatttagtcatccggcagcgacgatcctacagggggcaaacacgatctctgcccctccttccccaaaatcatctctctcccgatcttggcctccccagattcaccacctgctctcctctccggctacgaccttggctcatcctgattcggacacgcaacatggtttaccactctagtttcgctgatgattatgggatcacaaaagcttgcagctgtcctttgcttccactgaaaactcatatcaagggcccggcaccagcctctgaccctgataaagcggacattgttgatgaagccataactttctttcgagccaatgttttcttcaaaaatttccatgtgaaaagctcagcagacaagttattgatctatctgacgttttatatcaatattgccttaaaaagactagacggttgccggacactagctgttgggactaaagcaatcattaatctgggattggagaaagttcctgtacctggggaaccagggtttcctttccctggacttttcactcttccccagtcccaggaggaagcagaattgttgaggaattatttgaagcagataagggaggaaacaacttgccaagatggggtctcaagtgcttgtcccattcagaggttgtgaggattctcctcgccacctgaagattatgggtgacttgggtcagattgtgcccatgaaataccatccgagagatgttgattcaattaaggctgttatggccaagtcaaatgtggttattaacctcataggacgagagtatgaaacaaggaactacagcttcgaagaagtaaaccaccatatgcctgaacagcttgcaacaattgctaaggagcatgggggtatcataagatttatccaggtttcttgcctaggggcgtcaccgtcttctgaatctagaatgttgaggacaaaagctgcaggagagcaatcagtcttcaaagaattccctgaggctacaatcatgaggcctgctaccatgattggcacagaagatcgaatcctgaacagatgggcacaatttgcaaagaattggggtttcctcccgcttgttggtggtggatctactaagattcagcctgtgtatgtaatcgatgttgctgctgct

SEQ ID NO: 36647 - protein, 213 aa, Zea mays subsp. mays
RVKEHLVIRQRRSYRGQTRSLPLLPQNHLSPDLGLPRFTTCSPLRLRPWLILIRTRNMVYHSSFADDYGITKACSCPLLPLKTHIKGPAPASDPDKADIVDEAITFFRANVFFKNFHVKSSADKLLIYLTFYINIALKRLDGCRTLAVGTKAIINLGLEKVPVPGEPGFPFPGLFTLPQSQEEAELLRNYLKQIREETTCQDGVSSACPIQRL

SEQ ID NO: 36648 - protein, 174 aa, Zea mays subsp. mays
MGSQVLVPFRGCEDSPRHLKIMGDLGQIVPMKYHPRDVDSIKAVMAKSNVVINLIGREYETRNYSFEEVNHHMPEQLATIAKEHGGIIRFIQVSCLGASPSSESRMLRTKAAGEQSVFKEFPEATIMRPATMIGTEDRILNRWAQFAKNWGFLPLVGGGSTKIQPVYVIDVAAA

SEQ ID NO: 36649 - protein, 156 aa, Zea mays subsp. mays
MVYHSSFADDYGITKACSCPLLPLKTHIKGPAPASDPDKADIVDEAITFFRANVFFKNFHVKSSADKLLIYLTFYINIALKRLDGCRTLAVGTKAIINLGLEKVPVPGEPGFPFPGLFTLPQSQEEAELLRNYLKQIREETTCQDGVSSACPIQRL

SEQ ID NO: 36650 - DNA, 558 bp, Zea mays subsp. mays
  misc_feature (515)..(517): n is a, c, g, or t
gtggatgcgcggagaggccggcagcggtggcagcggcagcggaggaggaagctgagcagggcggcggcggcggtggaacctgcggggctggggcgcgcgccatgggccgcctgcactgcactgaggacccggtgccggaggccgtgggcggcgacatgcagcagctgaaccagctgggcgcgcagcagttctcagccctgacagaggtgcttttctacttcctaactgagccaaaagaggtggaaagatttctggctcagctctctgaatttgccaccaccaatcagatcagtcttggctccctcagaagcatcgtgaaaagcctccttctggttccaaatggtgctttgaagaagagtctcacagccaagcaggtccaggcggatttcataactctgggtcttagtgaggagaaagccacttacttttctgaaaagtggaagcagaatgctcccacccttgctcgatgggccataggtcagactctgatgattaaccagctcatagatatggannngaaatttggagtgacatctgggagcagcgaattggagaaaa

SEQ ID NO: 36651 - protein, 185 aa, Zea mays subsp. mays
  misc_feature (171)..(172): Xaa can be any naturally occurring amino acid
GCAERPAAVAAAAEEEAEQGGGGGGTCGAGARAMGRLHCTEDPVPEAVGGDMQQLNQLGAQQFSALTEVLFYFLTEPKEVERFLAQLSEFATTNQISLGSLRSIVKSLLLVPNGALKKSLTAKQVQADFITLGLSEEKATYFSEKWKQNAPTLARWAIGQTLMINQLIDMXXKFGVTSGSSELEK

SEQ ID NO: 36652 - protein, 152 aa, Zea mays subsp. mays
  misc_feature (138)..(139): Xaa can be any naturally occurring amino acid
MGRLHCTEDPVPEAVGGDMQQLNQLGAQQFSALTEVLFYFLTEPKEVERFLAQLSEFATTNQISLGSLRSIVKSLLLVPNGALKKSLTAKQVQADFITLGLSEEKATYFSEKWKQNAPTLARWAIGQTLMINQLIDMXXKFGVTSGSSELEK

SEQ ID NO: 36653 - protein, 134 aa, Zea mays subsp. mays
  misc_feature (120)..(121): Xaa can be any naturally occurring amino acid
MQQLNQLGAQQFSALTEVLFYFLTEPKEVERFLAQLSEFATTNQISLGSLRSIVKSLLLVPNGALKKSLTAKQVQADFITLGLSEEKATYFSEKWKQNAPTLARWAIGQTLMINQLIDMXXKFGVTSGSSELEK

SEQ ID NO: 36654 - DNA, 1433 bp, Zea mays subsp. mays
agaacatcctaatcgaaaacagaacagagtctacggcgccgccgtcgcacgacaggagagggagagggagagagacgcgggctttgacttgccgccggtgcgtccgtgcgtgcctggtgggaggagtgggagacgccggtacagtacaggagccatggcgccgagctgctacgacgcggcagcgtccatgctcctctgcgccgaggagcacagcagcatcctgtggtacgacgaggaggaggaggagctggaggcggtcgggagaaggagaggccagtcgccgggctacggggacgacttcggcgcggacttgttcccgccgcagtcggaggaatgcgtggccggtctggtggagcgggaacgggaccacatgccggggccgtgctacggcgacaggctgcgcggcggcggcggctgtctctgcgtccgccgggaggccgtcgactggatttggaaggcttacacgcaccacaggttccgccctctcactgcctacttggcagtgaactacctcgatcgcttcctctcgctgtctgaggtgccggactgcaaggactggatgacgcagctcctcgcggtggcgtgcgtttctctggccgccaagatggaggaaaccgccgtcccgcagtgcctggaccttcaggaggtcggagacgcgcggtacgtgttcgaggcgaagacggtccagaggatggagctcctggttctaacaaccctcaactggaggatgcatgccgtgacgccgttctcctacgtggattacttcctgaacaagctcaacaacggcggcagcacggcgccgaggagctgctggctcttgcagtccgcggagcttatcttgcgtgcggccagaggaaccggctgcgtcgggttcaggccgtccgagatcgccgccgcggttgcagccgccgtggccggagacgtggacgacgcggacggcgtcgagaacgcctgctgcgctcacgtagataaggagcgggtgttgcggtgccaggaagcgatcgggtccatggcgtcctcggcggccattgacgacgctaccgtgccaccgaaatctgcgagacgcaggagctcccccgtgcccgtgccgcagagccctgtgggggggaacaccaccttgcacggagagccgaaacctcctccatgcagggatctggatgcctgctaggtttgcttcggagcattacgagcacgcgcataacttggctcgtactgtaaggtgtgcaaactgcacacagcggaggctgtgttatttgtattctgaagctttcttgtgtttcgtcaagaaagcttctctaacttttatcctgcactatcagataaacggtaaattgatagagaataagatgttttcgagctcatgtttagtggcaaacgctttatatttttggcaagctgtgaaggagctgaaccagtgacaactcgaagaatcc

SEQ ID NO: 36655 - protein, 388 aa, Zea mays subsp. mays
EHPNRKQNRVYGAAVARQERERERDAGFDLPPVRPCVPGGRSGRRRYSTGAMAPSCYDAAASMLLCAEEHSSILWYDEEEEELEAVGRRRGQSPGYGDDFGADLFPPQSEECVAGLVERERDHMPGPCYGDRLRGGGGCLCVRREAVDWIWKAYTHHRFRPLTAYLAVNYLDRFLSLSEVPDCKDWMTQLLAVACVSLAAKMEETAVPQCLDLQEVGDARYVFEAKTVQRMELLVLTTLNWRMHAVTPFSYVDYFLNKLNNGGSTAPRSCWLLQSAELILRAARGTGCVGFRPSEIAAAVAAAVAGDVDDADGVENACCAHVDKERVLRCQEAIGSMASSAAIDDATVPPKSARRRSSPVPVPQSPVGGNTTLHGEPKPPPCRDLDAC

SEQ ID NO: 36656 - protein, 337 aa, Zea mays subsp. mays
MAPSCYDAAASMLLCAEEHSSILWYDEEEEELEAVGRRRGQSPGYGDDFGADLFPPQSEECVAGLVERERDHMPGPCYGDRLRGGGGCLCVRREAVDWIWKAYTHHRFRPLTAYLAVNYLDRFLSLSEVPDCKDWMTQLLAVACVSLAAKMEETAVPQCLDLQEVGDARYVFEAKTVQRMELLVLTTLNWRMHAVTPFSYVDYFLNKLNNGGSTAPRSCWLLQSAELILRAARGTGCVGFRPSEIAAAVAAAVAGDVDDADGVENACCAHVDKERVLRCQEAIGSMASSAAIDDATVPPKSARRRSSPVPVPQSPVGGNTTLHGEPKPPPCRDLDAC

SEQ ID NO: 36657 - protein, 326 aa, Zea mays subsp. mays
MLLCAEEHSSILWYDEEEEELEAVGRRRGQSPGYGDDFGADLFPPQSEECVAGLVERERDHMPGPCYGDRLRGGGGCLCVRREAVDWIWKAYTHHRFRPLTAYLAVNYLDRFLSLSEVPDCKDWMTQLLAVACVSLAAKMEETAVPQCLDLQEVGDARYVFEAKTVQRMELLVLTTLNWRMHAVTPFSYVDYFLNKLNNGGSTAPRSCWLLQSAELILRAARGTGCVGFRPSEIAAAVAAAVAGDVDDADGVENACCAHVDKERVLRCQEAIGSMASSAAIDDATVPPKSARRRSSPVPVPQSPVGGNTTLHGEPKPPPCRDLDAC

SEQ ID NO: 36658 - DNA, 1315 bp, Zea mays subsp. mays
cacctggagttctctccgaggaaacaatcgagaagatggaatttgaggtcgagaggttaacaagactaaagaccagcagactgaaggaaatcgtcatgaaaaggagggcagagttagaagcgatctgccagaatgcacacatagaacctgatgtcagcacggcccctgaacagactgattctttgatcgattctggcctcatcgacccttctgagctcctggcgaatattgagtcacaaatattaaaagcgaaagaagagtctcttagtcggaaagatataatggacaggataaatagatggattgctgcttgcgatgaagaggcttggcttgaagaatataaccaggacccaaagaggtacagtgctggaaggggtgctcatataaaccttaaacgggcagaaaaggcacggattttggttagaaaaatcccaagtatggtggacgacttgataaaccgaacctttgcttgggaaaacgcaagaaataaaccctttctctatgatgggggacgcctaatatctgtactagaagagtacaggcttagccggcatcagaaagaagaggaaaatcgacggtaccgggaccagaagaagctggagagcatcctacttgcagagaaagaagcgatcttcggatctagaccaagcccaaggaagacgagcagcttaagtaggaaggcaaatgggtaccggccaaatgggaacaccaacggactcaagactccaactcctcgccgattgtctctcggcagtgctactcctgagcttttgacgcccagatcgtactctggccataatagatactttggcgatgtgaggcgtctatcgacttcccatctgaacttcggtgatgattcgctgtcaacgtttacatccatcagtggctctgaaccagaatccccctctattggatgaacaccgtactgctggatgactggatggtcagtattgcgtattgtaaatgggcaccatgttaccaagttcttgcactagcatgtacattcctgatgtcatatatttagctcatattggagtactaagtattggacgggttgacttggtttgggttgggtgtggagttgaattgtttcaagttgatggctttgtagattgacaattaggcggaaagatgtaggggagcgatctggatttgggcagtcagctgtaacatatcataacttatgtgtttggtttgtgtgtgcaaaaaaaaaaaaaaaaaaaaaaaaaaaaaaaaaaaaaaaaaaaaaaaaaaaaaaaaaaaaataaaaaaaaaaaaaaaaaatatcgataccgtcgacctcgagggggggccc

SEQ ID NO: 36659 - protein, 304 aa, Zea mays subsp. mays
PGVLSEETIEKMEFEVERLTRLKTSRLKEIVMKRRAELEAICQNAHIEPDVSTAPEQTDSLIDSGLIDPSELLANIESQILKAKEESLSRKDIMDRINRWIAACDEEAWLEEYNQDPKRYSAGRGAHINLKRAEKARILVRKIPSMVDDLINRTFAWENARNKPFLYDGGRLISVLEEYRLSRHQKEEENRRYRDQKKLESILLAEKEAIFGSRPSPRKTSSLSRKANGYRPNGNTNGLKTPTPRRLSLGSATPELLTPRSYSGHNRYFGDVRRLSTSHLNFGDDSLSTFTSISGSEPESPSIG

SEQ ID NO: 36660 - protein, 293 aa, Zea mays subsp. mays
MEFEVERLTRLKTSRLKEIVMKRRAELEAICQNAHIEPDVSTAPEQTDSLIDSGLIDPSELLANIESQILKAKEESLSRKDIMDRINRWIAACDEEAWLEEYNQDPKRYSAGRGAHINLKRAEKARILVRKIPSMVDDLINRTFAWENARNKPFLYDGGRLISVLEEYRLSRHQKEEENRRYRDQKKLESILLAEKEAIFGSRPSPRKTSSLSRKANGYRPNGNTNGLKTPTPRRLSLGSATPELLTPRSYSGHNRYFGDVRRLSTSHLNFGDDSLSTFTSISGSEPESPSIG

SEQ ID NO: 36661 - protein, 273 aa, Zea mays subsp. mays
MKRRAELEAICQNAHIEPDVSTAPEQTDSLIDSGLIDPSELLANIESQILKAKEESLSRKDIMDRINRWIAACDEEAWLEEYNQDPKRYSAGRGAHINLKRAEKARILVRKIPSMVDDLINRTFAWENARNKPFLYDGGRLISVLEEYRLSRHQKEEENRRYRDQKKLESILLAEKEAIFGSRPSPRKTSSLSRKANGYRPNGNTNGLKTPTPRRLSLGSATPELLTPRSYSGHNRYFGDVRRLSTSHLNFGDDSLSTFTSISGSEPESPSIG

SEQ ID NO: 36662 - DNA, 830 bp, Zea mays subsp. mays
ggatttaatgaaagacccagttattgttgccactggacttatgagcgaggtaaaagggatgcaacaacagcactgtttaacttgtgtatttaccaatgcaacaaggggaagactgttagagctggatactaccagaactgctcatggagactgaaagtgggatggtagatgaggcccttgcaatattgacaatcctctcaggccatcctgaggggaaggcagcaattggcgctgcttctgcagtgcctgtacttgttggagttgtcagaaatggatctccaaggaacaaggaaaatgctgctgctgttatggtccatctatgaaatggggtgagcagcagcaacaacatcttgccgaagcacaggagcagggcatcgtgtctttgctggaggagctagcagacgaaagtggcacagagagaagaaagaggaaagctgtgcagctgctcgaacgaatgaatcagttcctaaagcaacagagtcaagcccaagccaaggccatggcacaggctcatgcgcaagcacaggcacaagatcatgctcaagcacatgcacaagcacaggcacaagcgcagtctcagctccttggttcaagctcaagcacacgcagatatgcaagctgaggaatcactacttctcatttcatcggatatatgctgctgctaaatgaactgttacttacaaaataattttgtttccaatattgactcatttacatgtactgctagttggattaggtaagccatgttttattttgcatcgactgatactgagcataagaaaatagaatttggaagctaaatgttaaacacaataaagttggaactggag

SEQ ID NO: 36663 - protein, 100 aa, Zea mays subsp. mays
MKWGEQQQQHLAEAQEQGIVSLLEELADESGTERRKRKAVQLLERMNQFLKQQSQAQAKAMAQAHAQAQAQDHAQAHAQAQAQAQSQLLGSSSSTRRYAS

SEQ ID NO: 36664 - protein, 59 aa, Zea mays subsp. mays
METESGMVDEALAILTILSGHPEGKAAIGAASAVPVLVGVVRNGSPRNKENAAAVMVHL

SEQ ID NO: 36665 - protein, 55 aa, Zea mays subsp. mays
GFNERPSYCCHWTYERGKRDATTALFNLCIYQCNKGKTVRAGYYQNCSWRLKVGW

SEQ ID NO: 36666 - DNA, 780 bp, Zea mays subsp. mays
atatctattgtcactaatgtttgttctgaggaatacctttgtaagtttgaacgagtctagccatcttttctattttaattatttgtgagatattggaggtcaccaaacttggaaatagaccggttcatataacaaccatcaaaatccaatatcttgattcgttatcttctttccttaccatgcaaacactaaatacatgtagacctacgacaaaggcccccacatttttctaggcaaccaaaatccgtgacatatacagggatacgaagtgtcttcggttatatacagtgataacttctatgctggctggttgagacggacacgcttgacacatggtgcttccactcatccacgactccatagtcactgtcaggtcgggatcgagccatctagacccatgagaagcaaggatgcgaaggactcttcaacaattatttaattggacttgctagatttagttacttatattcaatcccagttgctctctatattaatttggtaactcgataggcacttactaaatatggttgacgccgatttcttcaaaaaaaaaaaaaaaaaaaaaaaaaaaaaaaaaaaaaaaaaaaaaaaaaaaaaaaaaaaaaaaaaaaaaaaaaaaaaaggaaaaaaaaaaaaaaaaaggtttatcgatcccgccgaccccgagggggggcccggaacccaattccccctaaagggggtcgaattacgcgcgctcccgggccgccgttttacaacgccgggacgggaaaaacccgggggttacccaatttaatcgcc

SEQ ID NO: 36667 - protein, 83 aa, Zea mays subsp. mays
MVDADFFKKKKKKKKKKKKKKKKKKKKKKKKKKGKKKKKRFIDPADPEGGPGTQFPLKGVELRALPGRRFTTPGREKPGGYPI

SEQ ID NO: 36668 - DNA, 860 bp, Zea mays subsp. mays
acctagaacatcctaatcaaaaattgtaatcgagtatgttggtgaagtcattgatgatgcgacatgtgaacaaaggctttgggatataagacggcgtggtgacaaaaacttctacatgtgtgaaatcagcaaagattttacaatagatgcgacatttaaaggcaatgtgtcacgttttctaaatcacagttgtgagcccaactgtaaactcgaaaaatggcaggttgatggtgagacaagagttggtgtctttgcctctcgttccatcgaagttggagagcccttaacttatgattacaggtttgtgcattttggagagaaagtgaagtgccattgcgaagcagtgaactgccagggatacctgggcagccaaataaagaacccaattcaaagcattcttgccactgtagcaccgcaagtgcagttgcgagagtattcgcccatgcaccacgaagctccaagattgaagccaataaatcacttgttaccctggaccaactgtatagaggtctcttttaacctgagaagcaaaaggaaaattgaccggctatgctgggcccgcaagaagaagagaacatccctcgtgccatcttcaacaagcatgccagcatcgccgagtgaagttcctgccgcggatttctaactgcccttcgttgaagagcaagcctgccctgtataataatttcatggtacattctttacatgcattggttggaaacgattctttcacattgctcatcaatggtgttgtaacctgcaacattctttatttggtttcatagggcattcagtcagtttacgggtggtagtttgtcggaacatgtacccaatttttctgatgaaacaaatgtttgagcttc

SEQ ID NO: 36669 - protein, 175 aa, Zea mays subsp. mays
MCEISKDFTIDATFKGNVSRFLNHSCEPNCKLEKWQVDGETRVGVFASRSIEVGEPLTYDYRFVHFGEKVKCHCEAVNCQGYLGSQIKNPIQSILATVAPQVQLREYSPMHHEAPRLKPINHLLPWTNCIEVSFNLRSKRKIDRLCWARKKKRTSLVPSSTSMPASPSEVPAADF

SEQ ID NO: 36670 - DNA, 1237 bp, Zea mays subsp. mays
gtagccctgcagtcacccagagcagacccggatttcgctcttgcggtcgctggggttttagcattggctgatcagttcgatccgatccggctgcgaaggcgagatggcgttcgcggtttctggggcggtgctcggtggggccgtaagggctccccgactcaccggcggcggggagggtagtctagtcttccggcacaccggcctcttcttaactcggcgtgctcgagttggatgttcggggacgcacggggccatgcgcgcggcggccgcggccaggaaggcggtcatggttcctgagggcgagaatgatggcctcgcatcaagggctgactcggctcaattccagtcggatgaactggaggtaccagacatttctgaagagacaacgtgcggtgctggtgtggctgatgctcaagccttgaacagagttcgagtggtccccccaccaagcgatggacaaaaaatattccagattgaccccatgttgcaaggctataagtaccatcttgagtatcggtacagcctctatagaagaatccgttcagacattgatgaacatgaaggaggcttggaagccttctcccgtagttatgagaagtttggatttaatcgcagcgcggaaggtatcacatatcgagaatgggctcctggagcattttctgcagcattggtgggtgacttcaacaactgggatccaaatgcagatcgtatgagcaaaaatgagtttggtgtttgggaaatttttctgcctaacaatgcagatggtacatcacctattcctcatggatctcgtgtaaaggtgagaatggatactccatcagggataaaggattcaattccagcctggatcaagtactcagtgcaggccccaggagaaataccatatgatgggatttattatgatcctcctgaagaggtaaagtatgtgttcaggcatgcgcaacctaaacgaccaaaatcattgcggatatatgaaacacatgtcggaatgagtagcccggtatgtcaccttttccttttgattctttagacagtgctaggcatatgtaacacccggccacctgggggacgtcgtccccccagggcgagttttttttgactgctagccacctgcagttttagttaattataggcttcaacgatatttagatactagcatcttctcacattggtcttccttatctaagcgtatgtaatctaagtgtatatatttattttcattcaatttaaaaaaacc

SEQ ID NO: 36671 - protein, 308 aa, Zea mays subsp. mays
MAFAVSGAVLGGAVRAPRLTGGGEGSLVFRHTGLFLTRRARVGCSGTHGAMRAAAAARKAVMVPEGENDGLASRADSAQFQSDELEVPDISEETTCGAGVADAQALNRVRVVPPPSDGQKIFQIDPMLQGYKYHLEYRYSLYRRIRSDIDEHEGGLEAFSRSYEKFGFNRSAEGITYREWAPGAFSAALVGDFNNWDPNADRMSKNEFGVWEIFLPNNADGTSPIPHGSRVKVRMDTPSGIKDSIPAWIKYSVQAPGEIPYDGIYYDPPEEVKYVFRHAQPKRPKSLRIYETHVGMSSPVCHLFLLIL

SEQ ID NO: 36672 - protein, 258 aa, Zea mays subsp. mays
MRAAAAARKAVMVPEGENDGLASRADSAQFQSDELEVPDISEETTCGAGVADAQALNRVRVVPPPSDGQKIFQIDPMLQGYKYHLEYRYSLYRRIRSDIDEHEGGLEAFSRSYEKFGFNRSAEGITYREWAPGAFSAALVGDFNNWDPNADRMSKNEFGVWEIFLPNNADGTSPIPHGSRVKVRMDTPSGIKDSIPAWIKYSVQAPGEIPYDGIYYDPPEEVKYVFRHAQPKRPKSLRIYETHVGMSSPVCHLFLLIL

SEQ ID NO: 36673 - protein, 247 aa, Zea mays subsp. mays
MVPEGENDGLASRADSAQFQSDELEVPDISEETTCGAGVADAQALNRVRVVPPPSDGQKIFQIDPMLQGYKYHLEYRYSLYRRIRSDIDEHEGGLEAFSRSYEKFGFNRSAEGITYREWAPGAFSAALVGDFNNWDPNADRMSKNEFGVWEIFLPNNADGTSPIPHGSRVKVRMDTPSGIKDSIPAWIKYSVQAPGEIPYDGIYYDPPEEVKYVFRHAQPKRPKSLRIYETHVGMSSPVCHLFLLIL

SEQ ID NO: 36674 - DNA, 833 bp, Zea mays subsp. mays
  misc_feature (509)..(510): n is a, c, g, or t
acaaagaggaggaagccatgtcccccaacctgcatagcgccatcaagagtcaggtgtcggcgctgctcctgaggtgcctctttagggtgtccgggccgggcaaggccaagaagttccagcagatcctggtgctgatggggaggcggtgggtgttcatgcagacggaggcgagccgcgttctcggcatggacctggaccgcggggacaacacgcacaccttcatacgctcggactcgccgccactgctcacccggaacagcatcaaccagagtccgaagttgctccaccccgtgcctcagccctgtctccaaggacttcgagcacaaggactgcagcggcctggtagagatgctctgctgctccatcaggttgtgcctagaaaaagaggcaccaccaactagaaattgttctatgtggaagcagcaagttgttgtctcatggccacatgcccacatggtcactgctgttggtggccacaacggttatccagggggcaaggtgttcgtttnngcggaacagtctgttccaaatttggcagttaggtcatggagattactctgcctcacgcacaaaagtatttcgcatggtgaatactcttggagtcaacaatgaagccaagcaaacaatacaagtactgcaagctgaactaaatgaaacaaaagagaggctgcacacagttgaagaactgaaaggacaaactgcacattatttgtattgttcatgaccctatggatttctgttttaatttatttccatatgtagaaagttgtttactacttctgtttactgtaatctacaatgtatttgcgtcgctatggtaattccttgtagtt

SEQ ID NO: 36675 - protein, 132 aa, Zea mays subsp. mays
KEEEAMSPNLHSAIKSQVSALLLRCLFRVSGPGKAKKFQQILVLMGRRWVFMQTEASRVLGMDLDRGDNTHTFIRSDSPPLLTRNSINQSPKLLHPVPQPCLQGLRAQGLQRPGRDALLLHQVVPRKRGTTN

SEQ ID NO: 36676 - protein, 127 aa, Zea mays subsp. mays
MSPNLHSAIKSQVSALLLRCLFRVSGPGKAKKFQQILVLMGRRWVFMQTEASRVLGMDLDRGDNTHTFIRSDSPPLLTRNSINQSPKLLHPVPQPCLQGLRAQGLQRPGRDALLLHQVVPRKRGTTN

SEQ ID NO: 36677 - protein, 92 aa, Zea mays subsp. mays
  misc_feature (22)..(22): Xaa can be any naturally occurring amino acid
MPTWSLLLVATTVIQGARCSFXRNSLFQIWQLGHGDYSASRTKVFRMVNTLGVNNEAKQTIQVLQAELNETKERLHTVEELKGQTAHYLYCS

SEQ ID NO: 36678 - DNA, 1793 bp, Zea mays subsp. mays
acagatcctacccaaaccacaatctcgccgcggtctccaatgggagccgagccggtggacttctcgccgccgccgccgccggagccgacgctttcgccggagccggagatctccggcaaggacagaggagggaactggaaggcggacatgatgtcagctctcggggagtcggtttccttcggccgcttcctctcggagccgctcgaatgggggaagaggtccgccttcgcgcacaaccgctacctcgaggaggcggcggtgcaggcgcgcccgggctcagtcgcgcagaagaaggcattcttcgaggcgcactacgctaggaagaagcgcaagagcgaggaccacgccgccgccgccagtgatgatgttgcaggcggtgatggcgagctcgaggcggcagaggatggtggtgccgcgtcgtggtcgttgtctgctactgagtcttcctgcatgacggatgaaccaccggcaccagcagaggaagtgtgctgcggttgggaggaggacagagtggtggattgtggtggcagcgccagcgacaagccagtacacgtgccggaggagctcgcggacatcaccgatgccgttgggccctgttgcaggatggatgcgcccacggatgagacacagcacatggagggcggcgacgaagtggttggagcagttttgcccttgcagaagcaggatttgtgcatggatagtttgacggctgttgatgccactttgaaggaaatctctattttgaatcaggatatcacagattctgtcaagagaaggaggatccagatggcgtccttgcttccaaagccggcaaagctcagctctccccccacagcaaagaaagggcagaattcctcagctaaaagaaggtcaatgcggcattctgcaaaggagaataactcacctcctagtgcaggcagtaacaagctaagaacaacttcgacccccaaaaagaggtcaacgctgtcagccttgcatatgtctatgagtttcccgagatgtgaatctggcaatacttccatggcgtcaagaaatcttggtaccacaatcgctgctaggattagcgagttggaacatgcaaatgcaaccaagcctgcagaaaaaaacactaagcctcatgatttgaggctaccaagaaagaaattttccagcgctttaccagaaattgctccaaggacatctcaagtcgatgaagaaagatcatcacatataatgaaaatcaaagaaaagctatttggttcaacatttccaacactgcatcagaaatatggtataaccaaagaaaaagagagaaagatcaacaatgaacatgggtttaaagaatcacgacatagcttttgcttcaaagccacgctgttgccaaatttctatcgaagcaataaacaaccaaaggatacaagtcatcaggctactcaagaaatcctaagttcttcgaagtctggccatctatcaagggatattaatcaagcacaccaaacgggtaaagatgcacaaacgagtaaagatgcatctgatgccaaacaaatatgttgtttcccccttagaaagatgtattagatctattttatttagtgtttccattatatattagcctattcttttcattcatattcagtgacctatttgggacacctaatatgtagcaaggttatcttttaagccagcttggaggataacattctcaatccatccaatctcatggcataatgtttgtggtggtaatctagactaacttttcatggctttgaagtgtaaaaaaaaaaaaaaaaaatatcgataccgtcgacctcgag

SEQ ID NO: 36679 - protein, 518 aa, Zea mays subsp. mays
TDPTQTTISPRSPMGAEPVDFSPPPPPEPTLSPEPEISGKDRGGNWKADMMSALGESVSFGRFLSEPLEWGKRSAFAHNRYLEEAAVQARPGSVAQKKAFFEAHYARKKRKSEDHAAAASDDVAGGDGELEAAEDGGAASWSLSATESSCMTDEPPAPAEEVCCGWEEDRVVDCGGSASDKPVHVPEELADITDAVGPCCRMDAPTDETQHMEGGDEVVGAVLPLQKQDLCMDSLTAVDATLKEISILNQDITDSVKRRRIQMASLLPKPAKLSSPPTAKKGQNSSAKRRSMRHSAKENNSPPSAGSNKLRTTSTPKKRSTLSALHMSMSFPRCESGNTSMASRNLGTTIAARISELEHANATKPAEKNTKPHDLRLPRKKFSSALPEIAPRTSQVDEERSSHIMKIKEKLFGSTFPTLHQKYGITKEKERKINNEHGFKESRHSFCFKATLLPNFYRSNKQPKDTSHQATQEILSSSKSGHLSRDINQAHQTGKDAQTSKDASDAKQICCFPLRKMY

SEQ ID NO: 36680 - protein, 505 aa, Zea mays subsp. mays
MGAEPVDFSPPPPPEPTLSPEPEISGKDRGGNWKADMMSALGESVSFGRFLSEPLEWGKRSAFAHNRYLEEAAVQARPGSVAQKKAFFEAHYARKKRKSEDHAAAASDDVAGGDGELEAAEDGGAASWSLSATESSCMTDEPPAPAEEVCCGWEEDRVVDCGGSASDKPVHVPEELADITDAVGPCCRMDAPTDETQHMEGGDEVVGAVLPLQKQDLCMDSLTAVDATLKEISILNQDITDSVKRRRIQMASLLPKPAKLSSPPTAKKGQNSSAKRRSMRHSAKENNSPPSAGSNKLRTTSTPKKRSTLSALHMSMSFPRCESGNTSMASRNLGTTIAARISELEHANATKPAEKNTKPHDLRLPRKKFSSALPEIAPRTSQVDEERSSHIMKIKEKLFGSTFPTLHQKYGITKEKERKINNEHGFKESRHSFCFKATLLPNFYRSNKQPKDTSHQATQEILSSSKSGHLSRDINQAHQTGKDAQTSKDASDAKQICCFPLRKMY

SEQ ID NO: 36681 - protein, 469 aa, Zea mays subsp. mays
MMSALGESVSFGRFLSEPLEWGKRSAFAHNRYLEEAAVQARPGSVAQKKAFFEAHYARKKRKSEDHAAAASDDVAGGDGELEAAEDGGAASWSLSATESSCMTDEPPAPAEEVCCGWEEDRVVDCGGSASDKPVHVPEELADITDAVGPCCRMDAPTDETQHMEGGDEVVGAVLPLQKQDLCMDSLTAVDATLKEISILNQDITDSVKRRRIQMASLLPKPAKLSSPPTAKKGQNSSAKRRSMRHSAKENNSPPSAGSNKLRTTSTPKKRSTLSALHMSMSFPRCESGNTSMASRNLGTTIAARISELEHANATKPAEKNTKPHDLRLPRKKFSSALPEIAPRTSQVDEERSSHIMKIKEKLFGSTFPTLHQKYGITKEKERKINNEHGFKESRHSFCFKATLLPNFYRSNKQPKDTSHQATQEILSSSKSGHLSRDINQAHQTGKDAQTSKDASDAKQICCFPLRKMY

SEQ ID NO: 36682 - DNA, 780 bp, Zea mays subsp. mays
aaactagagatgatgcggcatgtctttgaacaaagtggtattaaaggagcaattgctgcagtggcaaagctacctgacaatgctgttcaagcagatgttgttagtgctctcaaaggaaagcttgatcttttcaacctggaatttttctcaaattttctgcctgttcttgctgggttactgtgtagcaagactgaaaggcatgctatggtctctttggaaatgttgttggatcttataaagatttttggaccagtaattcattcagcattatcagcaaatttaggcgttggagttgacattcaggctgagcagaggttgcaacgttgttcacggtgctttaaccatttgcaaaagatccaacagagtctgaatccattgattctgcggggtggtcaaacagcacaacttgcacaagaactacgtctttcattgcaagatttggtggtgatctaggcaagatgatgtacaatgtatacgacagagtagataccattggttttggcgaaaagtgcccacagttgtgtagcttgtaattttgtcatagctttgcaagtgggttttgcaactgtgttttaacattgggctggcattcagcctggtcccctgttgtaaatgtgagcctagccgtgaatgagtctgtaattagccagccacatctgctgtgtgagcagccctgaacaaaaagactagttgaaaggaaacaaccgcaaaggggatcattttggttaaaaaaaaaaaaaaaaaagcttatcgataccgtcggtgttaaacacaataaag

SEQ ID NO: 36683 - protein, 150 aa, Zea mays subsp. mays
KLEMMRHVFEQSGIKGAIAAVAKLPDNAVQADVVSALKGKLDLFNLEFFSNFLPVLAGLLCSKTERHAMVSLEMLLDLIKIFGPVIHSALSANLGVGVDIQAEQRLQRCSRCFNHLQKIQQSLNPLILRGGQTAQLAQELRLSLQDLVVI

SEQ ID NO: 36684 - protein, 147 aa, Zea mays subsp. mays
MMRHVFEQSGIKGAIAAVAKLPDNAVQADVVSALKGKLDLFNLEFFSNFLPVLAGLLCSKTERHAMVSLEMLLDLIKIFGPVIHSALSANLGVGVDIQAEQRLQRCSRCFNHLQKIQQSLNPLILRGGQTAQLAQELRLSLQDLVVI

SEQ ID NO: 36685 - protein, 146 aa, Zea mays subsp. mays
MRHVFEQSGIKGAIAAVAKLPDNAVQADVVSALKGKLDLFNLEFFSNFLPVLAGLLCSKTERHAMVSLEMLLDLIKIFGPVIHSALSANLGVGVDIQAEQRLQRCSRCFNHLQKIQQSLNPLILRGGQTAQLAQELRLSLQDLVVI

SEQ ID NO: 36686 - DNA, 1222 bp, Zea mays subsp. mays
ttgtactcatggtagtttactgaaagccaaggaattgattttggaaataatgaataatggcatgcgtcttgatattgttttcttcggttcgataattaacaatctttgcaaactgggaagggtaatggacgcacaaaatatatttgacttaactgtaaatgttggtctgcatcctactgctgtggtgtatagtatgctgatggatgggtactgtcttgttggcaagatggagaaagcattaagagtatttgatgctatggtgtcagctggcattgaaccaaacgatgtagtgtatggtacacttgttaatggctattgtaaaattggaaggattgatgaaggattgagtcttttcagagaaatgctgcaaaagggaataaagccttcaactattttatacaacatcataattgatgggttatttcaggatggagaacagttcctgcaaaggtgaaattacatgaaatcacagaaagtggtatcgctatggacaaatgtacatacagcatagtacttcgtggactttttaaaaatagatgctttgatgaagcaatctttcttttcaaagaattacgtgcaatgaatgtaaagatcgatatcataactctcagtaccatgatagctggaatgtttcaaaccaggagagttgaagaagctaaggatctgtttgcttctatctcgagaagtgggctggtgccttgtgttgtgacttacagtataatgatcacaaatcttataaaagaaggattggtggaagaggcagaagatatgttttcatccatgcagaatgctggctgtgagcccaattctcgattgctgaatcatgtagtcagggaattactaaagaaaaatgaaatagtcagggctggagcttacctgtccaagattgacgagaggaatttctcacttgaacatttaaccacaatgttgctggtcgatctcttctcaagcaaaggaacttgtagggaacacataagatttctccctgcaaagtatcattttcttgcagaggccagtccgtgattgatattttgattttttttttggaataagtccttgcacgcacctgtcacagttaagctagtatatgatcttaactaaaaccattggtttacttcatgttcatgttttctcggaagattttcttctcatttgacctgcttgatatgcagatgttcatttacttttgatccaatatatgcagagcgttttatgttttttg

SEQ ID NO: 36687 - protein, 178 aa, Zea mays subsp. mays
MDKCTYSIVLRGLFKNRCFDEAIFLFKELRAMNVKIDIITLSTMIAGMFQTRRVEEAKDLFASISRSGLVPCVVTYSIMITNLIKEGLVEEAEDMFSSMQNAGCEPNSRLLNHVVRELLKKNEIVRAGAYLSKIDERNFSLEHLTTMLLVDLFSSKGTCREHIRFLPAKYHFLAEASP

SEQ ID NO: 36688 - protein, 150 aa, Zea mays subsp. mays
CTHGSLLKAKELILEIMNNGMRLDIVFFGSIINNLCKLGRVMDAQNIFDLTVNVGLHPTAVVYSMLMDGYCLVGKMEKALRVFDAMVSAGIEPNDVVYGTLVNGYCKIGRIDEGLSLFREMLQKGIKPSTILYNIIIDGLFQDGEQFLQR

SEQ ID NO: 36689 - protein, 147 aa, Zea mays subsp. mays
MNVKIDIITLSTMIAGMFQTRRVEEAKDLFASISRSGLVPCVVTYSIMITNLIKEGLVEEAEDMFSSMQNAGCEPNSRLLNHVVRELLKKNEIVRAGAYLSKIDERNFSLEHLTTMLLVDLFSSKGTCREHIRFLPAKYHFLAEASP

SEQ ID NO: 36690 - DNA, 390 bp, Zea mays subsp. mays
ttctgctttccaactgcctgactgcttgttcgtctcactggtgtgagctccagcatcccctttgctcgaaatggaccccaactgctcttgcgccactggtggctcctgcacgtgcgccggctcctgcaagtgcaaagagtgcaaatgcacctcctgcaagaagagctgctgttcctgctgccccgtgggctgtgccaagtgtgcccagggctgcgtctgcaaaggggcatcggagaagtgcagctgctgtgcctgatgtgggaacagctcttctcccagatgtaaatagaacaacctgcacaacctggatttttttaaaaatacaacactgagccatttgctgcatttctttttatactaaatatgtgactgacaataaaaacaattttg

SEQ ID NO: 36691 - protein, 109 aa, Zea mays subsp. mays
LLSNCLTACSSHWCELQHPLCSKWTPTALAPLVAPARAPAPASAKSANAPPARRAAVPAAPWAVPSVPRAASAKGHRRSAAAVPDVGTALLPDVNRTTCTTWIFLKIQH

SEQ ID NO: 36692 - protein, 61 aa, Zea mays subsp. mays
MDPNCSCATGGSCTCAGSCKCKECKCTSCKKSCCSCCPVGCAKCAQGCVCKGASEKCSCCA

SEQ ID NO: 36693 - DNA, 1107 bp, Zea mays subsp. mays
tggcattgtgtagtgttttgagaaaataaacagaaaattgtcccaactcgtagtgtcatcctctcgatgagagtaagagtctcgttgcttacacatatgagggtttttatctgtcttaagagaagtacattctggatcttcttgatcgggcctctcttactgatagcggacagttgaggctcctatggaactcaatattcatctatgtgccacggatggtgagcctcttgaagaccctaatcattattgtcacattgttgggagtcttgtttacgttggtgtgactcgtcctgatatcttttattctgtacataatctcagtcagtttgtttccgcttccactcagcttcactatagtcacttgctttgggttctacgttatcttcgtggaactatatctcgtcgtttgttctttccacgatccaactctttacagttccaagcgtactatgatactacttgggctagtgattcctcttatcgcccttctctttctgcctattgtgtttttcttggtggttcttggaagactaataaacaggcagtggtttctcgttcgagtgtagaggctgagttgcatgatatggctcttgtgactgcagaggtggttgcttgaggattttggtgtctctgtctgtatgtcgactcctcttttgtctgacagtacaggtgctattggtattgctcgtggtccaatgaagcatgagcttaccaagcatattagtgttgatgctcattatacacgagcataggttcaggatggtgttgtttctcttcgatgtgtcctcagagcttcaactggcagatttcttcaccaatgctcagcatcgagctcagcatcggttttatatctccaaactcagtgtttttgtcttcttgatccaccttgagtttgagggggtgttagagatatatgtacttgtttatatttctctaacaccccttcaaactcaagtcggatcagagacattgagtttgagtaaatgtagtcgatgatgctcccgagtttgagctttagtgaagaaatctgccacttgcaaatctgaaggtacatattgtagagtaattgtcttctgacggcaatgagattgagtaaagaaggcatct

SEQ ID NO: 36694 - protein, 143 aa, Zea mays subsp. mays
MELNIHLCATDGEPLEDPNHYCHIVGSLVYVGVTRPDIFYSVHNLSQFVSASTQLHYSHLLWVLRYLRGTISRRLFFPRSNSLQFQAYYDTTWASDSSYRPSLSAYCVFLGGSWKTNKQAVVSRSSVEAELHDMALVTAEVVA

SEQ ID NO: 36695 - protein, 97 aa, Zea mays subsp. mays
MSLPSILVLMLIIHEHRFRMVLFLFDVSSELQLADFFTNAQHRAQHRFYISKLSVFVFLIHLEFEGVLEIYVLVYISLTPLQTQVGSETLSLSKCSR

SEQ ID NO: 36696 - protein, 88 aa, Zea mays subsp. mays
MLIIHEHRFRMVLFLFDVSSELQLADFFTNAQHRAQHRFYISKLSVFVFLIHLEFEGVLEIYVLVYISLTPLQTQVGSETLSLSKCSR

SEQ ID NO: 36697 - DNA, 480 bp, Zea mays subsp. mays
tgttcactgggcagtgaaaatggtctccatctatcaagaagcactgtggtgtacttcaagcacaatgatatggcttcacttgcaagcactttggaaaaacttactcgtggaaataaacgtgctgaaaagattagacgctacattgttgtagaatccatttaccagaattctggccaaattgcccccttggatgagattgtcaggttgaaggagaaatatcgattccgtgttattctggaggagagtcattcttttggggtgcttggcaagtctgggcgtggccttgctgaacattatggagttcctgtgagtgtttggcctcagcttttcttaatgtttcaccataatgccccacctgtggtgtctgaccggggtgcgttgttacctagctcccaaacgaggcctaactgtttggtgaaatgcttgggacaaagtggccatcaagaatggagtcatggaacatcagcaggacactacaag

SEQ ID NO: 36698 - protein, 160 aa, Zea mays subsp. mays
CSLGSENGLHLSRSTVVYFKHNDMASLASTLEKLTRGNKRAEKIRRYIVVESIYQNSGQIAPLDEIVRLKEKYRFRVILEESHSFGVLGKSGRGLAEHYGVPVSVWPQLFLMFHHNAPPVVSDRGALLPSSQTRPNCLVKCLGQSGHQEWSHGTSAGHYK

SEQ ID NO: 36699 - protein, 137 aa, Zea mays subsp. mays
MASLASTLEKLTRGNKRAEKIRRYIVVESIYQNSGQIAPLDEIVRLKEKYRFRVILEESHSFGVLGKSGRGLAEHYGVPVSVWPQLFLMFHHNAPPVVSDRGALLPSSQTRPNCLVKCLGQSGHQEWSHGTSAGHYK

SEQ ID NO: 36700 - DNA, 1011 bp, Zea mays subsp. mays
tagataatgctattgttcctgttgatgaacctgcagcaccttccggccctccactacctgtcttactgccttcgactacaggtcaagggctgcaaattagtgcacaactaacacggcgtgatggccagatatactatgacatatcttttgagaatggcacccaaggtgtcctagatggatttatgattcagtttaacaagaacacatttggtcttgctgctggtgaagcacttcaggttactccactgcaaccaggccaatcaacaaggacacttttacaaatgaccccgttccagaatatcagccctggtgcaccaaactcgctactacaggttgctgtgaaaaataatcagcagccagtgtggtacttcaatgacaaaattccgctgcatgttttctttggtgaagatggaaaaatggaacgagctggttttcttgaggcctggaaatctttgcctgatgacaatgaatttacaaaggaattcccgggctctgtcatcagcagcatagatgctactgttgagcgcctcgtagcatcaaatgtgttcttcatagccaagcggaaaaatgcgaacatggatgttctgtatctctccgcgaagatgccccgtggaatccccttccttatagaggttacagccgtggttggtgttcctggtgtgaagtgtgcagtcaaaacaccaaatagggagatggttcctctcttctttgaagctatggaggctctcaccaagtgacgacaaatttaatggatctggatcggtggttctaaaaaaataaataaaaaaaataaaaaaaaatcaatcgatgagctgctataggtgtttggacgtggcatttatttttgacggaagctggtgtgaattgtagttttttttggtattagattacagtatttaaactgctagtttcctggtttcaaagttttttcaccagaaatactggatgtgttcatgccttgcatgatttgtacatcttaccatgttgtatgaagcgatggaattgtaggtg

SEQ ID NO: 36701 - protein, 244 aa, Zea mays subsp. mays
DNAIVPVDEPAAPSGPPLPVLLPSTTGQGLQISAQLTRRDGQIYYDISFENGTQGVLDGFMIQFNKNTFGLAAGEALQVTPLQPGQSTRTLLQMTPFQNISPGAPNSLLQVAVKNNQQPVWYFNDKIPLHVFFGEDGKMERAGFLEAWKSLPDDNEFTKEFPGSVISSIDATVERLVASNVFFIAKRKNANMDVLYLSAKMPRGIPFLIEVTAVVGVPGVKCAVKTPNREMVPLFFEAMEALTK

SEQ ID NO: 36702 - protein, 184 aa, Zea mays subsp. mays
MIQFNKNTFGLAAGEALQVTPLQPGQSTRTLLQMTPFQNISPGAPNSLLQVAVKNNQQPVWYFNDKIPLHVFFGEDGKMERAGFLEAWKSLPDDNEFTKEFPGSVISSIDATVERLVASNVFFIAKRKNANMDVLYLSAKMPRGIPFLIEVTAVVGVPGVKCAVKTPNREMVPLFFEAMEALTK

SEQ ID NO: 36703 - protein, 151 aa, Zea mays subsp. mays
MTPFQNISPGAPNSLLQVAVKNNQQPVWYFNDKIPLHVFFGEDGKMERAGFLEAWKSLPDDNEFTKEFPGSVISSIDATVERLVASNVFFIAKRKNANMDVLYLSAKMPRGIPFLIEVTAVVGVPGVKCAVKTPNREMVPLFFEAMEALTK

SEQ ID NO: 36704 - DNA, 623 bp, Zea mays subsp. mays
gtttttgcttccgccgccggcaaggaagaagagagcaaaaccctagctagagttggcgagtgggggtggaggcgcggctgctcgtcacgacatcgagtttcagcgccgcccgcgagatccccggatttcgttctctacccctgagagctgcggcaatggctgggaaaggcgggtcgaccaacttagaaaaggagcagatgtttgggatggcggagaaagagatggagtacagggttgatcttttcaacaggcttacacagacctgttttaacaagtgcattgaaaaaaggtataaagaagctgagctcaatatgggcgagaacagttgcattgatcgatgtgtttcaaagtattggcaggtgactaatttagttggtcagatgcttggaaaccggcctcaaatgtgaactgagaagcactcgttccattttgtagcagaattctattgctctgtttcttctttttggttggttgtagaatgccgcacctgttctaagtacaccaatacagcaacagacatgctactgcgtggaccgctttaaagaaaaaaaatcagtgatgcgcattctctctgaatcatgaactgtaataatttgatacagctctagggcaattctgtttcg

SEQ ID NO: 36705 - protein, 83 aa, Zea mays subsp. mays
MAGKGGSTNLEKEQMFGMAEKEMEYRVDLFNRLTQTCFNKCIEKRYKEAELNMGENSCIDRCVSKYWQVTNLVGQMLGNRPQM

SEQ ID NO: 36706 - protein, 69 aa, Zea mays subsp. mays
MFGMAEKEMEYRVDLFNRLTQTCFNKCIEKRYKEAELNMGENSCIDRCVSKYWQVTNLVGQMLGNRPQM

SEQ ID NO: 36707 - protein, 66 aa, Zea mays subsp. mays
MAEKEMEYRVDLFNRLTQTCFNKCIEKRYKEAELNMGENSCIDRCVSKYWQVTNLVGQMLGNRPQM

SEQ ID NO: 36708 - DNA, 1687 bp, Zea mays subsp. mays
  misc_feature (1587)..(1588): n is a, c, g, or t
ccacgcagcacgcacggacgccatcgaggaaccctagaccagagcacatcacacggccggcgactggcgccccctcttcggtccccagcgcggcgacgccctcctgcttgagcaggtgtcctcttctgtctgcttgagcaggtgacttcctgggctttaggtactcgctttcgcttccaaccagcgcgtcctcagccagcgctggaggccgcccagccgcgcctgcgaccgcagaccgcgcgtcctcactcagccagcgctggagatctcctgtccgcccagccgcgcctgcgacagtgcgaccgccctcctgcccccagcactgcaagatgatactgctccagtccccatcgaggttcctgctccagatcctgcaagaccgtgttctcagtggcgagaagggcatggacattgactgtcacacggtagagttcgatgatgtccggtatcatatccagttttctatgaggaatccaaaggtaatggtgttgtcagttgctttgcctctgccacctcctgaagcgattctgtatgatgggctaccactaggtgccattgaagctataaaagcagcatatgggccagttgtgcagattcttgatcctccaaaggacgggtttgatctcacaatgaagataaatttgacaaaacttccgctagatgaagagcaaaggaatactatcttgacacaaattgcatctattagagaggttgtgttgggtgcaccactgaagctcctgctgaaacatttagcctcaaagacagttgcacctaatgttaacaaccttgttgctcttgttcaccgccctaatgaatcatttttccttgctccccaggcagataaagttactattgtgtatccaatgagattccaggactccattgatattgttttagcaacttccttcctgcaggaatttgtggaggcaagacgaacagctgcacttaataatgttccttcttgtatgtggtctccggtaccacctcttgagttaaaaggagtatctgctgatgcactaaatgcaaatgctggctttgttactttcgttgtttaccctcggcatgttgagggtaaaaagctagatagaacagtttggaatttgttgacatttcatgcttatgtaagctatcatgtaaagtgttctgaaggattcatgcataccaggatgaggcgcagggttgagtcgctgatccaggcgttggaccgggcgaagtctgatgctgagaagttgaagaagttggtacacggtggatctttcaaaagactgagcctgaagaacgagggggactcgcgtttctgaagggaattggcaaatgttgttgttttccatttggctaatgacttctgttgtgggaagcttacttccgttcagttttgggagcgaaggctcggaaccggttaaatccatgccattgaattttaatgtaaattcgcgttgcttttacatatttactagcctgaaatctctcggcgtatcagttccatgacacatcgcctttgcaaccggagagcctgctgcctgcatcttggtgcaagtagtttgtttttgccatgagatgtctgagtctgatcttttttggcattannaaaaaaaaaaaaaaaaaaaaaaaaaaaaaaaaaaaaaaaaaaaaaaagaaaaaaaaaaaaaaaaaatatcgataccgtcaacctcaagggggggcccgg

SEQ ID NO: 36709 - protein, 323 aa, Zea mays subsp. mays
MILLQSPSRFLLQILQDRVLSGEKGMDIDCHTVEFDDVRYHIQFSMRNPKVMVLSVALPLPPPEAILYDGLPLGAIEAIKAAYGPVVQILDPPKDGFDLTMKINLTKLPLDEEQRNTILTQIASIREVVLGAPLKLLLKHLASKTVAPNVNNLVALVHRPNESFFLAPQADKVTIVYPMRFQDSIDIVLATSFLQEFVEARRTAALNNVPSCMWSPVPPLELKGVSADALNANAGFVTFVVYPRHVEGKKLDRTVWNLLTFHAYVSYHVKCSEGFMHTRMRRRVESLIQALDRAKSDAEKLKKLVHGGSFKRLSLKNEGDSRF

SEQ ID NO: 36710 - protein, 298 aa, Zea mays subsp. mays
MDIDCHTVEFDDVRYHIQFSMRNPKVMVLSVALPLPPPEAILYDGLPLGAIEAIKAAYGPVVQILDPPKDGFDLTMKINLTKLPLDEEQRNTILTQIASIREVVLGAPLKLLLKHLASKTVAPNVNNLVALVHRPNESFFLAPQADKVTIVYPMRFQDSIDIVLATSFLQEFVEARRTAALNNVPSCMWSPVPPLELKGVSADALNANAGFVTFVVYPRHVEGKKLDRTVWNLLTFHAYVSYHVKCSEGFMHTRMRRRVESLIQALDRAKSDAEKLKKLVHGGSFKRLSLKNEGDSRF

SEQ ID NO: 36711 - protein, 278 aa, Zea mays subsp. mays
MRNPKVMVLSVALPLPPPEAILYDGLPLGAIEAIKAAYGPVVQILDPPKDGFDLTMKINLTKLPLDEEQRNTILTQIASIREVVLGAPLKLLLKHLASKTVAPNVNNLVALVHRPNESFFLAPQADKVTIVYPMRFQDSIDIVLATSFLQEFVEARRTAALNNVPSCMWSPVPPLELKGVSADALNANAGFVTFVVYPRHVEGKKLDRTVWNLLTFHAYVSYHVKCSEGFMHTRMRRRVESLIQALDRAKSDAEKLKKLVHGGSFKRLSLKNEGDSRF

SEQ ID NO: 36712 - DNA, 781 bp, Zea mays subsp. mays
gtaaaatttcagtggcggaagagacagctataggttccattctcaagtggccagataggctgtctaaaccttctgctagggcatcagttatcaacaatggagcaaacttgtttgaagtagatagtcagaagtgggttaggagagtgtcatattataagaaatcgcttggtgtgaagcttgggagcacaaacatacgcaatgtcatggacatgaatgcattctttggaggattcgcagccgctataatatctgatcctgtatgggttatgaatgttgttcctggtcagaagccattgacacttggagttatttatgataggggccttataggggtttatcatgactggtgtgaaccattctcaacgtatcctcgtacctatgatcttattcatgctgatgcaattgactccttgataagtggcccgatttcaggcactagcagatgtgacctgtttgatgtcatgttggagatggatcgcatactgcgcccagaaggaactgccgttatacgggcctcgccagacgtagtagccaaggcagcacagatcgctcagtcgattcggtggaaggcacaggtgcatgacagtgaaccagaatcaggcagtaccgagaaaatacttgtggctaccaaaacattttggaagctgccactaacaaaacaataggctaatgcgagtttgaactttgaacccttttcacttgcgctcccttaattttgtattcttttggggtgcgctgaagggatatagcaggctaatgggattgctggagtagtttagtc

SEQ ID NO: 36713 - protein, 220 aa, Zea mays subsp. mays
KISVAEETAIGSILKWPDRLSKPSARASVINNGANLFEVDSQKWVRRVSYYKKSLGVKLGSTNIRNVMDMNAFFGGFAAAIISDPVWVMNVVPGQKPLTLGVIYDRGLIGVYHDWCEPFSTYPRTYDLIHADAIDSLISGPISGTSRCDLFDVMLEMDRILRPEGTAVIRASPDVVAKAAQIAQSIRWKAQVHDSEPESGSTEKILVATKTFWKLPLTKQ

SEQ ID NO: 36714 - protein, 153 aa, Zea mays subsp. mays
MDMNAFFGGFAAAIISDPVWVMNVVPGQKPLTLGVIYDRGLIGVYHDWCEPFSTYPRTYDLIHADAIDSLISGPISGTSRCDLFDVMLEMDRILRPEGTAVIRASPDVVAKAAQIAQSIRWKAQVHDSEPESGSTEKILVATKTFWKLPLTKQ

SEQ ID NO: 36715 - protein, 151 aa, Zea mays subsp. mays
MNAFFGGFAAAIISDPVWVMNVVPGQKPLTLGVIYDRGLIGVYHDWCEPFSTYPRTYDLIHADAIDSLISGPISGTSRCDLFDVMLEMDRILRPEGTAVIRASPDVVAKAAQIAQSIRWKAQVHDSEPESGSTEKILVATKTFWKLPLTKQ

SEQ ID NO: 36716 - DNA, 1144 bp, Zea mays subsp. mays
gtagcgcaactccgcaagcaaatcctcctatctccaagcctccaatctgtgaacggtgaaccccaatcgaatgacgccgacggcgagcctcctcctcccggctcccccattcgtctctatctccgatgtgcgccgcctccagctccccccgcgcggcggccaccggcctcgcccctgctggaagggcttggagtgcggctccgtacagacgcggatggtctcttctttcgttgggagcagaacacgccgcagaaacgttatatgtgcttccctgttcggagttggagctcccgaagcactggtcattggagtagtcgccttgttggtgttcggccccaagggtctagcagaggtagccaggaatttggggaagactttgcgtgctttccaaccaaccattagagagatacaggatgtatcaagggagttcaggagcactcttgaacgagaaatcggaattgatgaggtttcccagtcgacgaattatacacccacgaccatgaataacaaccaacaacctgctgccgactcaaatatcaagcctgcacctgcaccttacaccagcgatgaacttgtgaaagtaactgaagaacaaattgctgcatcagctgctgcagcttggaacccgcaacaacctgcatcgtcgcaacagcaagaagtgtacactactccgagtgaggacgctcctacatcaggaggaagcgatggtcctgctgctccagctcttgctgcgagtgactcggatccaaagcaagtgaatctggacaaggcggaaacacagagatgactccgcttaacagcttgacactggatgggatgagcagcactgaacacgtcaggacgagcagtcttattttaattttgtaggcgatggacttcagattaaagccagttatttggactgctgcagctataatctatagagacataacactgtaaaaatagtagaatccgttttagattaaagccaaacgagatgagagcgttttctgtgtttactaggcttgttctgtagcagcatgcatgggcaggttcatacaaaaaggctatgtgtatgcgtaacataaccacgagtttatatggattaaatatatttagccacgttgaaaaaccggttcagttaataaaataatgtcagttggtt

SEQ ID NO: 36717 - protein, 238 aa, Zea mays subsp. mays
MTPTASLLLPAPPFVSISDVRRLQLPPRGGHRPRPCWKGLECGSVQTRMVSSFVGSRTRRRNVICASLFGVGAPEALVIGVVALLVFGPKGLAEVARNLGKTLRAFQPTIREIQDVSREFRSTLEREIGIDEVSQSTNYTPTTMNNNQQPAADSNIKPAPAPYTSDELVKVTEEQIAASAAAAWNPQQPASSQQQEVYTTPSEDAPTSGGSDGPAAPALAASDSDPKQVNLDKAETQR

SEQ ID NO: 36718 - protein, 190 aa, Zea mays subsp. mays
MVSSFVGSRTRRRNVICASLFGVGAPEALVIGVVALLVFGPKGLAEVARNLGKTLRAFQPTIREIQDVSREFRSTLEREIGIDEVSQSTNYTPTTMNNNQQPAADSNIKPAPAPYTSDELVKVTEEQIAASAAAAWNPQQPASSQQQEVYTTPSEDAPTSGGSDGPAAPALAASDSDPKQVNLDKAETQR

SEQ ID NO: 36719 - protein, 133 aa, Zea mays subsp. mays
VAQLRKQILLSPSLQSVNGEPQSNDADGEPPPPGSPIRLYLRCAPPPAPPARRPPASPLLEGLGVRLRTDADGLFFRWEQNTPQKRYMCFPVRSWSSRSTGHWSSRLVGVRPQGSSRGSQEFGEDFACFPTNH

SEQ ID NO: 36720 - DNA, 508 bp, Zea mays subsp. mays
ggccgctctagaatagtggatcccccgggctgcaggaattcgcacgagaccattacctagaacatcctaatcgaaaaatcgcagaaattctccgcaacttcacagcgtatcatcgttttccatcgctcctactcctatcatccagaaaatctgagcggtattgatggcgcccaaggcggagaagaagccggcggcgaagaaggtggcggaggaggagccctcggagaaggcggctccggcggagaaggcccccgcggggaagaaggccaaggcggagaagcggctacctgcgggcaagtccgccggcaaggagggcggcgacaagaaggggaggaagaaggcgaagaagagcgtggagaggtaattttgataggttacattatgttaagttatagtggtcgtgtttttctgttatttcgtaatgcttgtcaagacattatgaacaagtcattgagctgttactattggcaaaaaaaaaaaaaaaaaaaagcttatcgataccgtcgac

SEQ ID NO: 36721 - protein, 66 aa, Zea mays subsp. mays
MAPKAEKKPAAKKVAEEEPSEKAAPAEKAPAGKKAKAEKRLPAGKSAGKEGGDKKGRKKAKKSVER

SEQ ID NO: 36722 - protein, 42 aa, Zea mays subsp. mays
MLSYSGRVFLLFRNACQDIMNKSLSCYYWQKKKKKKAYRYRR

SEQ ID NO: 36723 - DNA, 473 bp, Zea mays subsp. mays
acctagaacatcctaatcgaaaaaccacgccccgcccgtgatgcccgctgccgcgcgcatcttcctccccgcaccccgcatgccccgcgccgcgaactgctcctcccgcacgccccgcccgtgatgcccgccgccgcgcgcgtcttcctccttcctccccgctagctccgcgcttccttcgcccaccaacgcccgcacccgccaagtcccccaccaacgccactatagcccgcacctctctagactagggcacccaaacccgagccgtcgtccccattgtgcctctcgacgcgcagccaaacccaaacccttcctcccgacgggcgacggcgatggccgccgcgacagagaagacggctgaggacatccgccgcgagctccaggagctccagtgccagcaccgcgagatcaccgagcgcctgcgcgacccccgtggccttcgtcgcggcacccccggccctggtcctggacct

SEQ ID NO: 36724 - protein, 47 aa, Zea mays subsp. mays
MAAATEKTAEDIRRELQELQCQHREITERLRDPRGLRRGTPGPGPGP

SEQ ID NO: 36725 - DNA, 648 bp, Zea mays subsp. mays
gtgggatggtttccatccatcggaagctgcatacaaagccattgcaatgggccttttgcgcgggacatacacacaaccatctattgcttccaccaccagttcctgtccacagctcactgagctcggctcttctgttgaatacaagagctgcggtactgtactgcacttctcggctgtggcccaagcgattggttgggttttgttttaccttctctttttcagtcacagtgctagaattaggaattgaaaggtggtgcttttaccatccatagaaggtaccaagaggaaccacagaattatacttggggggtccggaaactcatcggtacctctcaatgacttcaaaatggctgattaagaggagtggatgccaattctttgatcatattggctggtacagcgtagatgctatctacttcatttccatttcttgtaaatgtaaccatcagttcttccgatgcacgtgatacttagctgagcttctgcactatcaggaagtaagcagctttttagtatttcagagtcttcttgctgtcactgtctttcccttggcaactcccttattttgtgctcaatcgcacaatgagcaatttctatacaaaaaaaaaaaaaaaaaaatcgataccgtcgacctcgagggggggcccg

SEQ ID NO: 36726 - protein, 89 aa, Zea mays subsp. mays
GMVSIHRKLHTKPLQWAFCAGHTHNHLLLPPPVPVHSSLSSALLLNTRAAVLYCTSRLWPKRLVGFCFTFSFSVTVLELGIERWCFYHP

SEQ ID NO: 36727 - protein, 88 aa, Zea mays subsp. mays
MVSIHRKLHTKPLQWAFCAGHTHNHLLLPPPVPVHSSLSSALLLNTRAAVLYCTSRLWPKRLVGFCFTFSFSVTVLELGIERWCFYHP

SEQ ID NO: 36728 - protein, 81 aa, Zea mays subsp. mays
WDGFHPSEAAYKAIAMGLLRGTYTQPSIASTTSSCPQLTELGSSVEYKSCGTVLHFSAVAQAIGWVLFYLLFFSHSARIRN

SEQ ID NO: 36729 - protein, 66 aa, Zea mays subsp. mays
MGLLRGTYTQPSIASTTSSCPQLTELGSSVEYKSCGTVLHFSAVAQAIGWVLFYLLFFSHSARIRN

SEQ ID NO: 36730 - DNA, 620 bp, Zea mays subsp. mays
tgcaggaattcgcacgagaccattacctagaacatcctaatcgaaaaaatcaattctccagaccctccccggcaaccgcgtccggccgtccgcttccgtttccttggataaccacgacgcccgcccgccccccggcaagcgaaagcgaagcgagccaacccagccatggagaaggcgatcgatcggcagcgggtcctcctggcgcacctcctcccctccccctccgccgcctcctcgcagcctcagcttgcggcgtcggcgtgcgcggccggggacagcgccgcctaccagaggtcctcctccttcggggacgatgtcgtcgtcggcgcgtgcgtgcgagcaaggagcaagagcaacggtggcgtcgtatcttcctcgcgtgcagtgtgcataataactagcccgacttcttcagctagggttcgtaatcgtagctcttagtaacagcagcatctcagttggtttatgtttgtttagtgatcagggtctgtcacgactcacgacgactttggcggtgtcggtcatgcgtgtgtgatatatagattggaacgtgtacgtgtccaccaagccgcgatctggtgtacatatactaatctacgtagcacgtacgtacctaccgt

SEQ ID NO: 36731 - protein, 132 aa, Zea mays subsp. mays
QEFARDHYLEHPNRKNQFSRPSPATASGRPLPFPWITTTPARPPASESEASQPSHGEGDRSAAGPPGAPPPLPLRRLLAASACGVGVRGRGQRRLPEVLLLRGRCRRRRVRASKEQEQRWRRIFLACSVHNN

SEQ ID NO: 36732 - protein, 91 aa, Zea mays subsp. mays
MEKAIDRQRVLLAHLLPSPSAASSQPQLAASACAAGDSAAYQRSSSFGDDVVVGACVRARSKSNGGVVSSSRAVCIITSPTSSARVRNRSS

SEQ ID NO: 36733 - DNA, 827 bp, Zea mays subsp. mays
ttttcttttccatgtggactaacttgcctatttcaggttaagcaaattaagcatggcaaagaggtaaagattgacttgatggttatggaaaatcttctctttggccacaatatttcacgaatttatgacctcaaaggtgctattttttcgcgacgcatcactgactcaaacgatcatgatactgtttacctagatcaaaattatgttgaggacatgagcttttctccaatctatattggtggaagaacaaagcatcttttgcagcgtgcaatctggaatgacacgtctttcctcacttcggtgaatgttatggactattctctacttgtgggagtggacaaagagaagcatgaacttgtgtttggcatcattgattatctgaggcaatatacttaggacaaacaactggagacatgggtgaagacttctctggtagtacccaaaaatgttttaccaactgtaatttcccccaaggaatacaaaaaaaggtttaggaagttcatggcgaagtactttctgtcagttccagacacatggagtcttgataatccgtctaagccatgcaaatcccttggtcagagcaatcgcaagttggcggaagtccagattggtgataacctgtcagagcacccaaatgaagttgaggggtgtgcctaatcatgtgcaagatttcctggcaattttgttgaaccctatcatgttgttgtttggctatatttcactttgtaaaatggtgtacataggaggaccttgcggtttttaggcaaattgttgggcaagtgaggtccacatgacgtgtacctatacaaatgttcattgttgatttc

SEQ ID NO: 36734 - protein, 131 aa, Zea mays subsp. mays
FSFPCGLTCLFQVKQIKHGKEVKIDLMVMENLLFGHNISRIYDLKGAIFSRRITDSNDHDTVYLDQNYVEDMSFSPIYIGGRTKHLLQRAIWNDTSFLTSVNVMDYSLLVGVDKEKHELVFGIIDYLRQYT

SEQ ID NO: 36735 - protein, 105 aa, Zea mays subsp. mays
MVMENLLFGHNISRIYDLKGAIFSRRITDSNDHDTVYLDQNYVEDMSFSPIYIGGRTKHLLQRAIWNDTSFLTSVNVMDYSLLVGVDKEKHELVFGIIDYLRQYT

SEQ ID NO: 36736 - protein, 103 aa, Zea mays subsp. mays
MENLLFGHNISRIYDLKGAIFSRRITDSNDHDTVYLDQNYVEDMSFSPIYIGGRTKHLLQRAIWNDTSFLTSVNVMDYSLLVGVDKEKHELVFGIIDYLRQYT

SEQ ID NO: 36737 - DNA, 1850 bp, Zea mays subsp. mays
gctggatcagggcaccgcgcgtcggaacggcgctcgagcaacccgtgcccaggaacaccagcgaagacgaggtggagagcaccgccgccgctgcaacagcaccgctgcaacacccacgccgaggataactggctctgataccactgtaatacccgtggctacaccggcgagatcaatccgggagcgtgagtaattgcaggggaaatcgagagggggataggatctcacagccagaggaggaagacgagcttcctgtgttcctcggtctttcttctttctgaataatttcctgtcctctgcatcgatgcctcagctcctctttgtcctcgtggtctttggcttcagcaattgggttggatagagtgggcttcggccttggcaaatgggcaggtaggctgggcttcttctgggccacacttgggtcatgacaggcggctccgtgctgcacgcgcgccgccggtccaactccaagttcgacctccgggtctgggtgcgcatcctcttcgccaacctcgacttcaagaagtacctctggtcgctctacaacgccgataccgggtatgtggagccgctggacgacgatgtggagattgtcgtgccggaggacgaccacggcctgtttgccatcgacattcttgatccttcctggtttgtagaacttctccatctgtctatggtgtatcacttccatgatatgattgatatgctcataaactgtggatatgagaaagggaccacactatttggatatggttatgattttcgccaaagcaacaggatagacaaagcgatggctggtttgagagcaaaacttgagacagctcataagacctctggagggaaaaagttaatttaatctcacattctatgggtggattgctagtattcactaagtatgtcaacaaatggatttgcattgcttgtccattccaaggtgcccccggatgcatcaatgattctctacttactggattgcaatttgtttatggttttgagagcttctttttcgtatctagatgggcaatgcaccaattgcttgtcgaatgcccatcaatctatgaaatgttaccaaatccagaattcaagtggaaggaaaaaccaattattcaggtttggcgtaagaaccctgaaaaggatggaactgtggagcttgttcaatatgaagcaactgattgtgtgtccttgttcgaagaagctttaaggaataatgagctcacgtataacggaaagaaagtagcactaccattcaatatgtcagtcttcaaatgggccaccaagactcgccaaatcctagacaatgctgaattaccagatactgtgagcttttacaatatatacgggacatcttatgaaactccatacgatgtatgctatggctcagaaagctctccgattggagatttgtcagaagtgtgtcacacagtgccggcatacacttatgtggatggagattgcacggttcccatagaatcggcacgggctgatgggttctctgcgaaagaaagagttggcgtcaaggcggaccaccgtggcctgctgtccgatgagaacgtattcaagcttctcaagaaatggctcggtgtgagcgagaagaagtcagagtggcgttgcgtgtctaaatcctactccaaagtgacctaattgggttgcctgtagttcttcaggaagactgttattttggcctttcctcctgaagagaagatgaaacaaaattctggtgattgtattgtatgtctgcacgatgtaaatctctgcaagctgcacggaacaagggattagtgcccttgtacgatgtatcattgccaggcatttcttttgaagcctagggtcatatattcattgccccttcc

SEQ ID NO: 36738 - protein, 257 aa, Zea mays subsp. mays
MGGLLVFTKYVNKWICIACPFQGAPGCINDSLLTGLQFVYGFESFFFVSRWAMHQLLVECPSIYEMLPNPEFKWKEKPIIQVWRKNPEKDGTVELVQYEATDCVSLFEEALRNNELTYNGKKVALPFNMSVFKWATKTRQILDNAELPDTVSFYNIYGTSYETPYDVCYGSESSPIGDLSEVCHTVPAYTYVDGDCTVPIESARADGFSAKERVGVKADHRGLLSDENVFKLLKKWLGVSEKKSEWRCVSKSYSKVT

SEQ ID NO: 36739 - protein, 205 aa, Zea mays subsp. mays
MHQLLVECPSIYEMLPNPEFKWKEKPIIQVWRKNPEKDGTVELVQYEATDCVSLFEEALRNNELTYNGKKVALPFNMSVFKWATKTRQILDNAELPDTVSFYNIYGTSYETPYDVCYGSESSPIGDLSEVCHTVPAYTYVDGDCTVPIESARADGFSAKERVGVKADHRGLLSDENVFKLLKKWLGVSEKKSEWRCVSKSYSKVT

SEQ ID NO: 36740 - protein, 192 aa, Zea mays subsp. mays
MLPNPEFKWKEKPIIQVWRKNPEKDGTVELVQYEATDCVSLFEEALRNNELTYNGKKVALPFNMSVFKWATKTRQILDNAELPDTVSFYNIYGTSYETPYDVCYGSESSPIGDLSEVCHTVPAYTYVDGDCTVPIESARADGFSAKERVGVKADHRGLLSDENVFKLLKKWLGVSEKKSEWRCVSKSYSKVT

SEQ ID NO: 36741 - DNA, 667 bp, Zea mays subsp. mays
atgtttcctctacatggcttacagtggttggatctggctcatgtttcctggcttcttgcttggctctactatcttcatgctatggaacaaacactataggcatgggcgctcggtaggagcgtttgagatcataactcctcctcgaagaagaaccgtggaacagctcttagctctgcaacaggccatctcgcagctggaagcgcacgtgcaagcaggaaacatttttctcctgaagctccggtccctcatgcttgcagcgtttcctcagagcaccaacagagttgcagctgcactggttgctgtggctgcgatattcacgttcgtgcccttgaggaccatcgttctactaatccttctagaagaatacacaagacagatgccggtgaggaagaagagcagtgagaagctggtgaggagattgcgggagtggtggctccggatcccggctgcgcctgtacagcttgtaaagcctcgggagacgaggagatggagatccaggttgagatgagataagtaagccaaaaaatgttggtttgtttgcttttagttttacaccatgttccgtgcacattctttgagcggtagggatcttggtatcacgccttcaagtgaaagcaagaccttggtgtaagctgggactggttttaacaagcagaaacagatgaag

SEQ ID NO: 36742 - protein, 168 aa, Zea mays subsp. mays
CFLYMAYSGWIWLMFPGFLLGSTIFMLWNKHYRHGRSVGAFEIITPPRRRTVEQLLALQQAISQLEAHVQAGNIFLLKLRSLMLAAFPQSTNRVAAALVAVAAIFTFVPLRTIVLLILLEEYTRQMPVRKKSSEKLVRRLREWWLRIPAAPVQLVKPRETRRWRSRLR

SEQ ID NO: 36743 - protein, 164 aa, Zea mays subsp. mays
MAYSGWIWLMFPGFLLGSTIFMLWNKHYRHGRSVGAFEIITPPRRRTVEQLLALQQAISQLEAHVQAGNIFLLKLRSLMLAAFPQSTNRVAAALVAVAAIFTFVPLRTIVLLILLEEYTRQMPVRKKSSEKLVRRLREWWLRIPAAPVQLVKPRETRRWRSRLR

SEQ ID NO: 36744 - protein, 155 aa, Zea mays subsp. mays
MFPGFLLGSTIFMLWNKHYRHGRSVGAFEIITPPRRRTVEQLLALQQAISQLEAHVQAGNIFLLKLRSLMLAAFPQSTNRVAAALVAVAAIFTFVPLRTIVLLILLEEYTRQMPVRKKSSEKLVRRLREWWLRIPAAPVQLVKPRETRRWRSRLR

SEQ ID NO: 36745 - DNA, 593 bp, Zea mays subsp. mays
agctacttgcatctcaacttcgtgcgtgcataataaaacctaatcatcggcacttcccgttcctctagctaggctctatagcttccgcctttaattcccccatcagaccagtcatcgtcccctcggccgccggcgagctcttcgtcttcccgtgtgatccttccttcccatccggtccggcctagactagatctgagagacacaaggagggatggggagggggaagatagtgataaggaggatagacaactccacgagcaggcaggttaccttctccaagaggcggagcgggctgctgaagaaggcgaaggagctctctatcctctgcgacgcggaggttggcctcatcatcttctccagcaccggcaggctctacgatttctccaacaccaacatgaaagctgtgatagaccgatatgggaaggcaaaagacgagcagcttggcaagaacgatgcaacttcagaactcatggtacggtgaggaaaatgtacctatttctagctaactagcagttggtagtacacacgtgccatatgatgtatgtggtcggaccaagatcaggagtttagtcctttattactcacaaatactg

SEQ ID NO: 36746 - protein, 89 aa, Zea mays subsp. mays
MGRGKIVIRRIDNSTSRQVTFSKRRSGLLKKAKELSILCDAEVGLIIFSSTGRLYDFSNTNMKAVIDRYGKAKDEQLGKNDATSELMVR

SEQ ID NO: 36747 - DNA, 809 bp, Zea mays subsp. mays
gaaaagtagcacgtctcagaaagatctccaaaagcctaatgcttcagagcttccttcacaaggaaaagctgcatcagaattgacacttgatgggtgggatagtattgctctggaatattctattgactggcctctgcagctcttcttcactcctgatgttctgtccaagtatcgcaaggtttttcagtatctcatccgattgaagaggacacaaatggaacttgagaaatcctgggcagctgtaatgcataaagaccatgctgatttttctgattattgcaaggatcggaaaaataactctgcaacacaactgcgtcgacaacggtctaagcctttgtggcgagtaagggagcatatggcattcttgatcagaaacctacaattttacatccaggttgatgtaattgagtcacagtggaatgttttacaatctcacgtgcaagattcacatgattttacagatttagtgagctttcatcaagaatatttgtcagcgctggtttcccaatccttcttggacatcggatcagtctctaggatactggatagcataatgaagctttgcttgcagttctgctggagcatagagcaatatgaaactcggccaaatatttctgagattgatcacataactgaggagttcaacaagaagtccaattcgctgtacactatcttgaggagtagtcgcctcgcgggtagtcagagagcacctttcctgaggcaatttctgatgaggctaaattttaactctttctttgagaccaccgcaaggggagtgatgaattcaggaaggctgcgaccaatcactg

SEQ ID NO: 36748 - protein, 269 aa, Zea mays subsp. mays
KSSTSQKDLQKPNASELPSQGKAASELTLDGWDSIALEYSIDWPLQLFFTPDVLSKYRKVFQYLIRLKRTQMELEKSWAAVMHKDHADFSDYCKDRKNNSATQLRRQRSKPLWRVREHMAFLIRNLQFYIQVDVIESQWNVLQSHVQDSHDFTDLVSFHQEYLSALVSQSFLDIGSVSRILDSIMKLCLQFCWSIEQYETRPNISEIDHITEEFNKKSNSLYTILRSSRLAGSQRAPFLRQFLMRLNFNSFFETTARGVMNSGRLRPIT

SEQ ID NO: 36749 - protein, 198 aa, Zea mays subsp. mays
MELEKSWAAVMHKDHADFSDYCKDRKNNSATQLRRQRSKPLWRVREHMAFLIRNLQFYIQVDVIESQWNVLQSHVQDSHDFTDLVSFHQEYLSALVSQSFLDIGSVSRILDSIMKLCLQFCWSIEQYETRPNISEIDHITEEFNKKSNSLYTILRSSRLAGSQRAPFLRQFLMRLNFNSFFETTARGVMNSGRLRPIT

SEQ ID NO: 36750 - protein, 188 aa, Zea mays subsp. mays
MHKDHADFSDYCKDRKNNSATQLRRQRSKPLWRVREHMAFLIRNLQFYIQVDVIESQWNVLQSHVQDSHDFTDLVSFHQEYLSALVSQSFLDIGSVSRILDSIMKLCLQFCWSIEQYETRPNISEIDHITEEFNKKSNSLYTILRSSRLAGSQRAPFLRQFLMRLNFNSFFETTARGVMNSGRLRPIT

SEQ ID NO: 36751 - DNA, 545 bp, Zea mays subsp. mays
tggagcttttaactggccgctcagtttttcatgttgcgacacaatgtggcccgaggagcgcagttagatgggtacatatgccagcattcacttttctagttttcttataggacgcagcagctaatttgcttatcctaaggtgcaggctaaaccaatgcttagtcaagacaaggtggaacagtgcatagatccaaggcttggaggagggtacctactaaacgatgtcagaaagatggcttctgttgctgcactgtgtttacaagacgagccagagttccggcctgaaatgagcatcgtcgtcgaggctctgagcctgttactgaacagcaagtgaacaagtaaccgtccctgcattggtgaagcacgtggaatgtgatttccttgcatgtcattgcgagctcaagatcacgggtttcgtgaaggcgattggcccccaacagaaagttatgattactgcattcatctaggcttggaacttgtgctttctttgtctgtgcacatgtaatactcaaaattctaaataaagaatatagagagatcttctc

SEQ ID NO: 36752 - protein, 59 aa, Zea mays subsp. mays
MLSQDKVEQCIDPRLGGGYLLNDVRKMASVAALCLQDEPEFRPEMSIVVEALSLLLNSK

SEQ ID NO: 36753 - protein, 39 aa, Zea mays subsp. mays
MSLRAQDHGFREGDWPPTESYDYCIHLGLELVLSLSVHM

SEQ ID NO: 36754 - protein, 35 aa, Zea mays subsp. mays
ELLTGRSVFHVATQCGPRSAVRWVHMPAFTFLVFL

SEQ ID NO: 36755 - DNA, 1191 bp, Zea mays subsp. mays
  misc_feature (728)..(729): n is a, c, g, or t
  misc_feature (731)..(731): n is a, c, g, or t
ggtatttaagacagcttcaaaaggttggggagtcaggacttgggacactatcctccctggggctcccatctgtgagtacacgggggtgttgaggaggactgaagatctggatggttcacagaacaactattgttttgacattgattgtcttcaaaccatgaaaggtttggatggaagggagaaaagagctggatctgaaatgcacctgcctaatctttatccagagaatgactcagatgcaccacctgcacctgagtactgcatagacggcagttccattggcaattttgcaagatttataaatcatagttgccaacctaaccttttcgtccagtgcgtcatgagctcacacaacgatgttaaactagcaaaagtgatgctttttgctgctgacacaatacttcctcttcaggagctatcctatgactacggttatcgcttggacagtgttgttgggcctgatggtaaaattgtgaagctgccatgccactgtggtgctccagattgccggaagcgcctctactagacctgcagtgtgtttccattttgattttgcaggaaacaacctatattgtaggaaagcattcatgttatttatgtagttggcatgctctgatatatagcgaaagaggagcaacttaatctccttttagagcattcttattttgtgataattggaggacatgctggtcatggtagcatattttgcaggaaatcaattaactgannanaaaaaaaaaaaaaaaaaaaaaaaaaaaaaaaaaaaaaaaaaaaaaaaaaaaaaaaaggagaaaaaaaaaaaaaaaaaggaattcctgcaccccggggaatccacaatttcaaaaggggccccccccgcgggggagccccagcttttgttcccttggggaggctgccaatttactgatttagggaatgagggggtttttgaggggctccaggggtttctgtttcaatcagttgcccctcctgttcagttactgaggggggggggggaaagggaaaaagaaccgccggacataagggttatttctgttctcattgccgaaaaacatggaaattgaagttcatttacaccgtttctcaacccggtacgcaccaaaaaatcattgatatggccataaagggcgttgaatgccggcaaacagcccgaattatgggggttggcctcaacacgattttacgtcactt

SEQ ID NO: 36756 - protein, 174 aa, Zea mays subsp. mays
VFKTASKGWGVRTWDTILPGAPICEYTGVLRRTEDLDGSQNNYCFDIDCLQTMKGLDGREKRAGSEMHLPNLYPENDSDAPPAPEYCIDGSSIGNFARFINHSCQPNLFVQCVMSSHNDVKLAKVMLFAADTILPLQELSYDYGYRLDSVVGPDGKIVKLPCHCGAPDCRKRLY

SEQ ID NO: 36757 - protein, 126 aa, Zea mays subsp. mays
  misc_feature (15)..(16): Xaa can be any naturally occurring amino acid
MLVMVAYFAGNQLTXXKKKKKKKKKKKKKKKKKKKEKKKKKKEFLHPGESTISKGAPPAGEPQLLFPWGGCQFTDLGNEGVFEGLQGFLFQSVAPPVQLLRGGGEREKEPPDIRVISVLIAEKHGN

SEQ ID NO: 36758 - protein, 123 aa, Zea mays subsp. mays
  misc_feature (12)..(13): Xaa can be any naturally occurring amino acid
MVAYFAGNQLTXXKKKKKKKKKKKKKKKKKKKEKKKKKKEFLHPGESTISKGAPPAGEPQLLFPWGGCQFTDLGNEGVFEGLQGFLFQSVAPPVQLLRGGGEREKEPPDIRVISVLIAEKHGN

SEQ ID NO: 36759 - protein, 122 aa, Zea mays subsp. mays
MKGLDGREKRAGSEMHLPNLYPENDSDAPPAPEYCIDGSSIGNFARFINHSCQPNLFVQCVMSSHNDVKLAKVMLFAADTILPLQELSYDYGYRLDSVVGPDGKIVKLPCHCGAPDCRKRLY

SEQ ID NO: 36760 - DNA, 895 bp, Zea mays subsp. mays
aatttggttgccttggtatgtcagaggtttggtcatgtctatcacaaccttcaaaatcggttaactaaaacattgatccatgcatttcttgatcctgccaaatcactgacacaacattatggtgctgtccaagggatatctgcactggggcccagcgcgattagactccttcttttgcccaaccttgtgacatatatgcaacttctggagccggaactgcagcttgagaagcagaaaaacgagatgaaaaggaaggaagcttggcgtgtttatggtgccttgctgtgtgctgcaggcaaatgcttgtatgatcggttgaaactatttcctggtttgctttctccgtcgatgcggcctcttttacagagcaacaaaagggtcttaaccaacaacccaaataagcgaaaatctagcacagatctctctgcaactcagccacctctgaagaagatggcaacggacgcaacagccaactccatggcctcagcttccatgggaggaaacatgcaaggtgccatggatggctttcccaaccagttaggcaaccctggcatgatgcaggcctcgtcctctgggcagacggtggagagcatcccatcagctgcggtccggagggatcagggcagtgatctcgcgcagagagtttctgcagtgcttaggcaagcctggaaggaggaccaggacaccggtcatctcttggggtctctgtacgaggtcttcggggaagccatcttctcctttgtccaaccaccagagatatccttgtttgtgtagagagagagagagagaggaaatgcatagactctaggttttattattctacgctgttgtacaactagggatgttttgaagagttcacgaaacccggtttgacattgtcaaagtaatgtgactg

SEQ ID NO: 36761 - protein, 257 aa, Zea mays subsp. mays
NLVALVCQRFGHVYHNLQNRLTKTLIHAFLDPAKSLTQHYGAVQGISALGPSAIRLLLLPNLVTYMQLLEPELQLEKQKNEMKRKEAWRVYGALLCAAGKCLYDRLKLFPGLLSPSMRPLLQSNKRVLTNNPNKRKSSTDLSATQPPLKKMATDATANSMASASMGGNMQGAMDGFPNQLGNPGMMQASSSGQTVESIPSAAVRRDQGSDLAQRVSAVLRQAWKEDQDTGHLLGSLYEVFGEAIFSFVQPPEISLFV

SEQ ID NO: 36762 - protein, 192 aa, Zea mays subsp. mays
MQLLEPELQLEKQKNEMKRKEAWRVYGALLCAAGKCLYDRLKLFPGLLSPSMRPLLQSNKRVLTNNPNKRKSSTDLSATQPPLKKMATDATANSMASASMGGNMQGAMDGFPNQLGNPGMMQASSSGQTVESIPSAAVRRDQGSDLAQRVSAVLRQAWKEDQDTGHLLGSLYEVFGEAIFSFVQPPEISLFV

SEQ ID NO: 36763 - protein, 176 aa, Zea mays subsp. mays
MKRKEAWRVYGALLCAAGKCLYDRLKLFPGLLSPSMRPLLQSNKRVLTNNPNKRKSSTDLSATQPPLKKMATDATANSMASASMGGNMQGAMDGFPNQLGNPGMMQASSSGQTVESIPSAAVRRDQGSDLAQRVSAVLRQAWKEDQDTGHLLGSLYEVFGEAIFSFVQPPEISLFV

SEQ ID NO: 36764 - DNA, 604 bp, Zea mays subsp. mays
cgaaataaatgccaaagcagccccagatttggccaagtgcctagcggcaatgcagtcactcaagaagctgactttggctgaaaatgaactgaaggatgatggtgccgtgataatcgcaaaatcattggaagatggccacatagatctcaaggagcttgatgttagcgtgaacatgctgcagagggttggagctcggtgctttgcgcgggcagtcgctaataaaccggcttttgagctgctgaacatcaatggaaatttcatctctggtgaagggatcgatgaggtggaggaaatcttgaaggctggtaagaaacccctgaaagtgctgggcccactagatgagaatgagcctgatggagagcctgatgatgacgatgaagaggttgaggataatgaggacgagctgaattcgaagctgcagagtgtgaaggttgagcaggatgattgaccgagttggtatcgagatataagcctgtcgcagggtcttgataactgagttatctacaatgctgttgatctttggttttgtagtcggtttttgttatgaaaaaccagaaccagctatcttgtgacttgtgcaatctgattatagattagaactgct

SEQ ID NO: 36765 - protein, 148 aa, Zea mays subsp. mays
EINAKAAPDLAKCLAAMQSLKKLTLAENELKDDGAVIIAKSLEDGHIDLKELDVSVNMLQRVGARCFARAVANKPAFELLNINGNFISGEGIDEVEEILKAGKKPLKVLGPLDENEPDGEPDDDDEEVEDNEDELNSKLQSVKVEQDD

SEQ ID NO: 36766 - protein, 132 aa, Zea mays subsp. mays
MQSLKKLTLAENELKDDGAVIIAKSLEDGHIDLKELDVSVNMLQRVGARCFARAVANKPAFELLNINGNFISGEGIDEVEEILKAGKKPLKVLGPLDENEPDGEPDDDDEEVEDNEDELNSKLQSVKVEQDD

SEQ ID NO: 36767 - protein, 91 aa, Zea mays subsp. mays
MLQRVGARCFARAVANKPAFELLNINGNFISGEGIDEVEEILKAGKKPLKVLGPLDENEPDGEPDDDDEEVEDNEDELNSKLQSVKVEQDD

SEQ ID NO: 36768 - DNA, 1170 bp, Zea mays subsp. mays
cttcctttcttcctcctgctatttagacggttctcaccggagctatcgcctccctatcatctcaatatgttgtagtgagtttgcctctatcccgcccacctcaccgtcgttgtctccgccaccgccactgctcccaccactgccatgcattaacctcaacccttccgcaaactattcactgtcactttgtcatcggcgctccatcgttcactcaaatgtggtctccgatacctggcaccctcatgaggactagttcactccctgctgtcattgaggcttctggcaatgatgactggaagaaacgaaaggaagcacagagcctgaagaggctcgaggttaagaagaagaggattgagaggaggaactctctcgcctgcaacacttcaaaagaagctgctgggcagagtccaaaagagatgaatgcaaacactgacaaattagtaagttctgatgaaactattgtcagcgctaacgaaagtcatagcagtggcaagcatctggtgaaggggcttccaccaaagtaccaggccacaattacatcagaagacagttcgtcagcaatgcgaaagaagccaaactcggccttcaaagccatcactgaggagcagaactcatcatcgtctgttccttcctccggtgaagctataagtagcgtgacggcaccaagtctgcctctgttgtctttggtccccataacagcaacccttggttccagggaagaccaaagcattttaggcagggctggtgcaagggcaaacggcatgggggacgtggaaaggaggatgatgcaggagatgccgggcgtgttcaccaagggcctgtccaacggcagcagggtcgaaggcttcctgtacaaatacagcaaaggagaagtgaggatcgtatgcatctgccatggaagcttccttactccttcggagtttgtggagcacgccggcgccggcaaggtagataacccgctgcgacacattgtcgtcagcgctaccccgaacctgtgactgtgaggccaggcagacccgtgcacaagctatagtgttctgtagactcaggacctgagcctagcgtcagagcaatgtcaccgttagactgtgtggtgcggtgcttatgcccgattaaattggtgggcattgtggtaacataacctgttgataatgttttgacaatgttttg

SEQ ID NO: 36769 - protein, 260 aa, Zea mays subsp. mays
MWSPIPGTLMRTSSLPAVIEASGNDDWKKRKEAQSLKRLEVKKKRIERRNSLACNTSKEAAGQSPKEMNANTDKLVSSDETIVSANESHSSGKHLVKGLPPKYQATITSEDSSSAMRKKPNSAFKAITEEQNSSSSVPSSGEAISSVTAPSLPLLSLVPITATLGSREDQSILGRAGARANGMGDVERRMMQEMPGVFTKGLSNGSRVEGFLYKYSKGEVRIVCICHGSFLTPSEFVEHAGAGKVDNPLRHIVVSATPNL

SEQ ID NO: 36770 - protein, 251 aa, Zea mays subsp. mays
MRTSSLPAVIEASGNDDWKKRKEAQSLKRLEVKKKRIERRNSLACNTSKEAAGQSPKEMNANTDKLVSSDETIVSANESHSSGKHLVKGLPPKYQATITSEDSSSAMRKKPNSAFKAITEEQNSSSSVPSSGEAISSVTAPSLPLLSLVPITATLGSREDQSILGRAGARANGMGDVERRMMQEMPGVFTKGLSNGSRVEGFLYKYSKGEVRIVCICHGSFLTPSEFVEHAGAGKVDNPLRHIVVSATPNL

SEQ ID NO: 36771 - protein, 193 aa, Zea mays subsp. mays
MNANTDKLVSSDETIVSANESHSSGKHLVKGLPPKYQATITSEDSSSAMRKKPNSAFKAITEEQNSSSSVPSSGEAISSVTAPSLPLLSLVPITATLGSREDQSILGRAGARANGMGDVERRMMQEMPGVFTKGLSNGSRVEGFLYKYSKGEVRIVCICHGSFLTPSEFVEHAGAGKVDNPLRHIVVSATPNL

SEQ ID NO: 36772 - DNA, 898 bp, Zea mays subsp. mays
aaaagtagggctagaaaagctatatatacctggcgtgaaatctcactccagtcctctctcgatctaccttgatctttgatttcatttgtttctcaattctttgttaatttatatggctaatcgtacagtgttttgcaggtgagtgtcccggggaacagcatgctcagcatggtgacagttcggtgtgggcactgcacaaatctactgtcagtgaatctgagagcactcatgcactcagtcccagaacaagatcagctccagcaggagaacatcagggtccatggcacgttgcgtgagcatcatcagtgcggcggcggccaccatctggagctgggctcttcgtcgtcctcaaggttccggctgccgatgatgatgtcgtacgcgccgcagaacgagcacttgctgcaggaacagacactgaacaacgctcgtccggctcctgagaagaggcagcgggttccgtcggcgtataacagattcatcaaggaagagattcgcaggatcaaggcgaacaaccccgacattagccacagggaagccttcagcacagcagccaagaactgggcacattatccgaacatccatttcgacttaaactccggccgagagggtggcaagaataagctcgtggacgaggctgtcgcggcggtggcggtggctccgaagaagatccaaggtttctactgatcgatgccggtcgatcgagggatcagcgctcgtcgtcatcaactggccggccgggtgtggaagaattaataataccacacaaattataaatgtactgtgatgagtaaattaaagagttatagtggggaatgaagggagagagagatatatagcaatacgtatattaccttaccttattaatgagtgcaaaaaaacacttgtgaaggtttct

SEQ ID NO: 36773 - protein, 175 aa, Zea mays subsp. mays
MLSMVTVRCGHCTNLLSVNLRALMHSVPEQDQLQQENIRVHGTLREHHQCGGGHHLELGSSSSSRFRLPMMMSYAPQNEHLLQEQTLNNARPAPEKRQRVPSAYNRFIKEEIRRIKANNPDISHREAFSTAAKNWAHYPNIHFDLNSGREGGKNKLVDEAVAAVAVAPKKIQGFY

SEQ ID NO: 36774 - protein, 172 aa, Zea mays subsp. mays
MVTVRCGHCTNLLSVNLRALMHSVPEQDQLQQENIRVHGTLREHHQCGGGHHLELGSSSSSRFRLPMMMSYAPQNEHLLQEQTLNNARPAPEKRQRVPSAYNRFIKEEIRRIKANNPDISHREAFSTAAKNWAHYPNIHFDLNSGREGGKNKLVDEAVAAVAVAPKKIQGFY

SEQ ID NO: 36775 - protein, 152 aa, Zea mays subsp. mays
MHSVPEQDQLQQENIRVHGTLREHHQCGGGHHLELGSSSSSRFRLPMMMSYAPQNEHLLQEQTLNNARPAPEKRQRVPSAYNRFIKEEIRRIKANNPDISHREAFSTAAKNWAHYPNIHFDLNSGREGGKNKLVDEAVAAVAVAPKKIQGFY

SEQ ID NO: 36776 - DNA, 1021 bp, Zea mays subsp. mays
ctccccccctctcccccctcctaacctcaccacgcctccagtagcgctagccagcagccacctccatgcgcgctagctagctcctggcacagctccagcttctccgatccacctccataattctgccgtgcggccaccagcagcagctccggccgggaaaggcgcaagattccgccttgggttccttgcgcgcgcgcgggtaattaagctaccttgctagctagcaagctcgctccacgcgccggccggccggcatgcagcagccggccatgccgcctccattctcgcctgccgcggcgggccagcacgccacgcccatcagcagccgcccgccggagccacacccacacccacacccacagcagcaaggcgacgagctcggcggtgggtcggcggctttttccggaggcagcagcttggtcgtcgtcttggaccacgacggcggcgcacccgcgggcgacggcgggccttccggcggcaaccggtggccgcggcaggagacgctggcgctgctcaagatccgctccgagatggacgccgcgttccgggaggccgccctcaagggacccctctgggaccaagtctccaggaggctggaggccatgggctacaagcggagcgccaagaagtgccgcgagaagttcgagaacgtcgataagtactacaagcgcaccaaggacggccgcgcgggccgtggcgacggcaaggcataccgcttcttctccgagctcgaggccctccacggcgccgcgccggcggtggcgtcgctcgcgcgtcggcctgtggccatggcgcccgcgccaccaccaccggtcacggccctcgtgggcgcgtccaccggcatggcgccgaccgccttgcatgccgagccaccgccgatgccgcagcctgcagctccggctccaacggggacggggacggggactgggactggcagtgtcactgctaccatcgcgccccctgcaggcgccgccgccagcgacgcgttattaaaattaaaaaaaaaaaaaaaaaagcttat

SEQ ID NO: 36777 - protein, 255 aa, Zea mays subsp. mays
MQQPAMPPPFSPAAAGQHATPISSRPPEPHPHPHPQQQGDELGGGSAAFSGGSSLVVVLDHDGGAPAGDGGPSGGNRWPRQETLALLKIRSEMDAAFREAALKGPLWDQVSRRLEAMGYKRSAKKCREKFENVDKYYKRTKDGRAGRGDGKAYRFFSELEALHGAAPAVASLARRPVAMAPAPPPPVTALVGASTGMAPTALHAEPPPMPQPAAPAPTGTGTGTGTGSVTATIAPPAGAAASDALLKLKKKKKKL

SEQ ID NO: 36778 - protein, 250 aa, Zea mays subsp. mays
MPPPFSPAAAGQHATPISSRPPEPHPHPHPQQQGDELGGGSAAFSGGSSLVVVLDHDGGAPAGDGGPSGGNRWPRQETLALLKIRSEMDAAFREAALKGPLWDQVSRRLEAMGYKRSAKKCREKFENVDKYYKRTKDGRAGRGDGKAYRFFSELEALHGAAPAVASLARRPVAMAPAPPPPVTALVGASTGMAPTALHAEPPPMPQPAAPAPTGTGTGTGTGSVTATIAPPAGAAASDALLKLKKKKKKL

SEQ ID NO: 36779 - protein, 163 aa, Zea mays subsp. mays
MDAAFREAALKGPLWDQVSRRLEAMGYKRSAKKCREKFENVDKYYKRTKDGRAGRGDGKAYRFFSELEALHGAAPAVASLARRPVAMAPAPPPPVTALVGASTGMAPTALHAEPPPMPQPAAPAPTGTGTGTGTGSVTATIAPPAGAAASDALLKLKKKKKKL

SEQ ID NO: 36780 - DNA, 966 bp, Zea mays subsp. mays
aaaatcaacgcttccccatcgctcgcgtccccgcatctgccgccatccgcgcgtccccgcatccgccgccatccacgcccacggccccaaacacctcgatccgaacctccctccccacacactcacacgttgctgccggctaccctcctcccaccccactcgtcccctccgaacccaactccgatccatccatccccaagtttctcctctcagcgcgtggggcagtggcggcggcagcatgggcgtgcaggctgctacgggcacaggagcagcgggggctgcacaaccgtgcaggcagctgtcggcatgcggcacagtgactgcgggagcccaggcggcgccggtgcggctgcagccggcggcgggcgaccgtgaggcggctgcgggagtggtgcaagcccggtggcgcatgctttgttttttcttcctgtttttgatttgcgaaagcacttgtgaaggtgtccgacgtgccattagactagcttgtcccaaacgtcaagatttgggctaatgaagtcaggggctgtcctatgatattgaggacagactcgactccttcatggtgcgcatggagggtcttgattcaaccaagcgcaaaaccatcatgggattcattcaacaaactcatggcttggtcaccaagttcaggattcgccatggaatatctgataacattatagacatcgagagcaaagtaaagaaggtgaaggagcggtatggcaggtccaatgtgcatcgtattgtagctagtcttgtcgcaaccacagttgaccctcgtctcttagctatgcataatttgtttgaagatggtgatgagccagcgaaaaagatcaagacagtcttgttgttagatttggaggactcggcaagactactcttgttaaagcagtctatgacaaggttaaggagtttgattgcagtgcttttgtatcaataggtcagaaatgtgatatcaataaagttttc

SEQ ID NO: 36781 - protein, 169 aa, Zea mays subsp. mays
KSTLPHRSRPRICRHPRVPASAAIHAHGPKHLDPNLPPHTLTRCCRLPSSHPTRPLRTQLRSIHPQVSPLSAWGSGGGSMGVQAATGTGAAGAAQPCRQLSACGTVTAGAQAAPVRLQPAAGDREAAAGVVQARWRMLCFFFLFLICESTCEGVRRAIRLACPKRQDLG

SEQ ID NO: 36782 - protein, 125 aa, Zea mays subsp. mays
MVRMEGLDSTKRKTIMGFIQQTHGLVTKFRIRHGISDNIIDIESKVKKVKERYGRSNVHRIVASLVATTVDPRLLAMHNLFEDGDEPAKKIKTVLLLDLEDSARLLLLKQSMTRLRSLIAVLLYQ

SEQ ID NO: 36783 - protein, 124 aa, Zea mays subsp. mays
KINASPSLASPHLPPSARPRIRRHPRPRPQTPRSEPPSPHTHTLLPATLLPPHSSPPNPTPIHPSPSFSSQRVGQWRRQHGRAGCYGHRSSGGCTTVQAAVGMRHSDCGSPGGAGAAAAGGGRP

SEQ ID NO: 36784 - DNA, 1079 bp, Zea mays subsp. mays
accgcagcccgccccactaactattgactgtcggattccctacccgtcggcgacaatccgctgcccccaatctgcctggtaggtctcgcacctccggtcatggctgccgaagctggcccaatctccaaggtcctcatcgtcatagcaatgcagaaggaggcgacgccgctcgtccacaagttcaatctcgtcgaggcgcccgcccaccaatccacttttcctaaaggtgccccatgggtttggtaccatggcagctacaaaggcctccacattgaccttgtattgcctggaatggatgctgttcttggagtcgacagtgttggtacagtaccagtagctgttgtgactagtttctccattcaaacattgaagccagaccttatcattaatgcgggcactgctggtggcttcaaggccaaaggagcaagcattactgatgtattccttgcatcagatgttgcattccatgacaggaggataccaatacctatttttgacatgtatggaactggagcacgcaaaacttttgcagctcctaatatcttgaaggagctcaatttgaaggttggcaagttgtcgactggggattctctggatatgtgtccccaggataaggagttgatactgcgcaatgatgctacaataaaggacatggagggagctgctgtagcatatgtcgctgacatgttctcgacaccagcgatctttgtgaaagctgtgactgatatcgtggatggggtgaagccaacgtatgaggagtttctgcagaacctgattgccgtgacgacggcactggagctggcagtcaccaaagtggtggatttcatcagcgggaaacgcatctccgatctttgaaagctcgtggtcacgaaatccaacatccccctgctctgatgcacgatgctaggctaggatacaatacaacgttgggtcaatgattttttttggaggtgttctatacgtgaggttttaccccttttgcaatggctcttgatctattcctgaataccgaccagagcagttgtctcttgctaaacagaaggaatgtaaagtgagcaaacatgccattgatcgttgcg

SEQ ID NO: 36785 - protein, 251 aa, Zea mays subsp. mays
MAAEAGPISKVLIVIAMQKEATPLVHKFNLVEAPAHQSTFPKGAPWVWYHGSYKGLHIDLVLPGMDAVLGVDSVGTVPVAVVTSFSIQTLKPDLIINAGTAGGFKAKGASITDVFLASDVAFHDRRIPIPIFDMYGTGARKTFAAPNILKELNLKVGKLSTGDSLDMCPQDKELILRNDATIKDMEGAAVAYVADMFSTPAIFVKAVTDIVDGVKPTYEEFLQNLIAVTTALELAVTKVVDFISGKRISDL

SEQ ID NO: 36786 - protein, 235 aa, Zea mays subsp. mays
MQKEATPLVHKFNLVEAPAHQSTFPKGAPWVWYHGSYKGLHIDLVLPGMDAVLGVDSVGTVPVAVVTSFSIQTLKPDLIINAGTAGGFKAKGASITDVFLASDVAFHDRRIPIPIFDMYGTGARKTFAAPNILKELNLKVGKLSTGDSLDMCPQDKELILRNDATIKDMEGAAVAYVADMFSTPAIFVKAVTDIVDGVKPTYEEFLQNLIAVTTALELAVTKVVDFISGKRISDL

SEQ ID NO: 36787 - protein, 187 aa, Zea mays subsp. mays
MDAVLGVDSVGTVPVAVVTSFSIQTLKPDLIINAGTAGGFKAKGASITDVFLASDVAFHDRRIPIPIFDMYGTGARKTFAAPNILKELNLKVGKLSTGDSLDMCPQDKELILRNDATIKDMEGAAVAYVADMFSTPAIFVKAVTDIVDGVKPTYEEFLQNLIAVTTALELAVTKVVDFISGKRISDL

SEQ ID NO: 36788 - DNA, 541 bp, Zea mays subsp. mays
attgattgattgatcggtcacctgacctcatagataactctagggcggacggacggacgcgcgtctccggtcccgtccgtaatagcactgatccgatccacgccggccggcgatggagctcatcaagtccagggcgaccgtgtgcgcgctcctcctggcgctgctcctgctctcgcactacgacggcgggacgacgacgacgatggtggcggaggcccgggtgtgcatgggcaagagccagcaccactcgttcccctgcatctccgaccgcctctgcagcaacgagtgcgtcaaggaggacggcgggtggaccgccggctactgccacctccgctactgcaggtgccagaaggcgtgctaagcaaagctcttgaaacacccttggcttgccagaactgaactgtggtagtactaagtaacacccttggctagctgtgcacaacctacgtaccgtgcatgcatgtaatgtggtgtcatgtaacgtgacagcaataaatattaataacaataataacacggcatgtagcctttgcatgcttct

SEQ ID NO: 36789 - protein, 82 aa, Zea mays subsp. mays
MELIKSRATVCALLLALLLLSHYDGGTTTTMVAEARVCMGKSQHHSFPCISDRLCSNECVKEDGGWTAGYCHLRYCRCQKAC

SEQ ID NO: 36790 - protein, 52 aa, Zea mays subsp. mays
MVAEARVCMGKSQHHSFPCISDRLCSNECVKEDGGWTAGYCHLRYCRCQKAC

SEQ ID NO: 36791 - protein, 44 aa, Zea mays subsp. mays
MGKSQHHSFPCISDRLCSNECVKEDGGWTAGYCHLRYCRCQKAC

SEQ ID NO: 36792 - DNA, 1165 bp, Zea mays subsp. mays
ctctccttccggcttccggccccgctcctccccaaaatcccccaaaacctgacgagctggagggccgatccgcggctccccgccgcctgatccgagcagtctactcggcccagccggggatccaagcgggatggggtacttgagctccgtgatcggccaccccaccgatggatcctccgtcagcggcggcggcctcagccagaatggtagatttagctatggctatgcaagctcccctggtaaaagggcatccatggaagacttctatgagacaaaaattgattgtgttgatggtcagatagttggtctttttggagtttttgatggtcatggtggtgctaaggtagcagagtatgttaaagaaaacctgttcaacaatcttgttagtcatccaaagttcatcagtgatactaaagtcgctatagatgatgcttataaaagcaccgacagtgaattcttagaatctgacagtagtcaaaatcaatgcgggtcaactgcatcaactgctgtacttgttggtgatcgtctcttcgtcgcaaatgttggtgactctagggctatcatatgcagggaaggaaatgctattgctgtttcaaaggatcacaagcctgatcaaactgatgagcggcagcgtattgaagatgctggaggttttgtgatgtgggcaggaacatggcgcgttggtggtgtacttgctgtttcgcgtgcttttggtgacaaactcttaaagcaatatgtggttgtggatccggagatccgagaggaagttgttgatgacacactcgagtttcttatccttgcaagtgatgggctgtgggatgtggtctctaacgaggaagctgttgcgatgactagatccattaaggacccagaagaggctgcaaagatgctcttgcaagaggcgtacaagagggagagcagtgacaacataacttgcgtcgtcgtgcacttcttgcatgggcaaggtagcagcggatacgcttaaagcgtagcagtaaaattattttacgcagtggtgtgctctgatgtacatgcgtcgattgatttcccgatgttaaatggagaaacgtaactacgtaaggtaggaaacgtgtattatgatgggttgaactgggaaatgcgtgtaccctatactatatatatatactgtagtgtggtcgcggac

SEQ ID NO: 36793 - protein, 284 aa, Zea mays subsp. mays
MGYLSSVIGHPTDGSSVSGGGLSQNGRFSYGYASSPGKRASMEDFYETKIDCVDGQIVGLFGVFDGHGGAKVAEYVKENLFNNLVSHPKFISDTKVAIDDAYKSTDSEFLESDSSQNQCGSTASTAVLVGDRLFVANVGDSRAIICREGNAIAVSKDHKPDQTDERQRIEDAGGFVMWAGTWRVGGVLAVSRAFGDKLLKQYVVVDPEIREEVVDDTLEFLILASDGLWDVVSNEEAVAMTRSIKDPEEAAKMLLQEAYKRESSDNITCVVVHFLHGQGSSGYA

SEQ ID NO: 36794 - protein, 243 aa, Zea mays subsp. mays
MEDFYETKIDCVDGQIVGLFGVFDGHGGAKVAEYVKENLFNNLVSHPKFISDTKVAIDDAYKSTDSEFLESDSSQNQCGSTASTAVLVGDRLFVANVGDSRAIICREGNAIAVSKDHKPDQTDERQRIEDAGGFVMWAGTWRVGGVLAVSRAFGDKLLKQYVVVDPEIREEVVDDTLEFLILASDGLWDVVSNEEAVAMTRSIKDPEEAAKMLLQEAYKRESSDNITCVVVHFLHGQGSSGYA

SEQ ID NO: 36795 - DNA, 1617 bp, Zea mays subsp. mays
catatggctcaatgctgaaaaatctgacatttgtcaagacttttgcctctggaatacttgttcccaaaagctatatctggcctgttacaccagataattacctgctgccttatacttcagtggttgatgatgctcacaaagcaggactagaaatctatgccgctgattttgcaaatgacttaaccatcagctataactacagctttgatccattagcggaatatcttttcttcattgataacggtgccttctctgttgatggtgtattgactgatttcccgattactccttcagaggcagttggttgctttagtaacctgaacaccagcaagattgatcatgctaaacctctagttatctcgcataatggtgctagtggtgactacccagactgcactgaccaagcttatgaaaaggcagttgccgatggtgcggatgtcattgactgtcctgttcaagtgactaaagatggcatactgatatgcatgagctctgttgacctaatggatgttactactgttgcaaaatcacaatttgcttcgcaagtaactaccatcaacagtctgaaggctgggtctggagtcttcaccttcaaccttacttgggatgatatttctaagaacctaaagcccatgatatcgaacccaatgagcacctataatctgtacagaaatcctagaaacaagaacgcaggaaacttcatgagattgtcagactttttgacctttgcaaatggaaaggatttgtcaggaatcatgataactgttgagcatgctgcattcatggcagaggagcttgggtttggtgtggtagatgcagtgatcaaagcacttgatgactctggttatagcaaacagactgcccagaatgttatgattcagtcaaccaacagctcagttctggtgaagttcaagcaggaaaccaagtacaaccttgtctacatgatcgaagaaagtgtccgagatgccgcaccttcctcccttgcggacattaagaagtttgctgatgctgtttctgttggcaccacatctgttttcccggaaacccattactatttgacgaaccagaccaataagcttgttccgacccttaagtctgccggcctccaagtttacgtttacgtgctcatgaatgagtttgcttcccagccaaatgacttcttcgcagacgccacttcacagatcaatgcttatgtgcaaagtgctaaggtggatggtgtcatcactgatttccctgggactgctcacagatacaaactgaactcctgcacgagcatgggaaagaacatgccactattcatgcagcctccgcaaccaggtggcctcctttcaaccattctcccagatgcacagccaccagcagcagcgccaatgccgctcttgacggacgctgacgtcgcagaaccagccctacctccggtcagcaacaccaccacggctgcatcgccttcgcatgccgccctcagaatgcgaacccatgtcttgagcatcgccacattgctgatgctatgtgcttccctcctcatctgaagatagtcttgcccaacatcatacgcggcgtggcgcattagagctgaggattttcacattgagctgctaatagcaattctttccacct

SEQ ID NO: 36796 - protein, 508 aa, Zea mays subsp. mays
YGSMLKNLTFVKTFASGILVPKSYIWPVTPDNYLLPYTSVVDDAHKAGLEIYAADFANDLTISYNYSFDPLAEYLFFIDNGAFSVDGVLTDFPITPSEAVGCFSNLNTSKIDHAKPLVISHNGASGDYPDCTDQAYEKAVADGADVIDCPVQVTKDGILICMSSVDLMDVTTVAKSQFASQVTTINSLKAGSGVFTFNLTWDDISKNLKPMISNPMSTYNLYRNPRNKNAGNFMRLSDFLTFANGKDLSGIMITVEHAAFMAEELGFGVVDAVIKALDDSGYSKQTAQNVMIQSTNSSVLVKFKQETKYNLVYMIEESVRDAAPSSLADIKKFADAVSVGTTSVFPETHYYLTNQTNKLVPTLKSAGLQVYVYVLMNEFASQPNDFFADATSQINAYVQSAKVDGVITDFPGTAHRYKLNSCTSMGKNMPLFMQPPQPGGLLSTILPDAQPPAAAPMPLLTDADVAEPALPPVSNTTTAASPSHAALRMRTHVLSIATLLMLCASLLI

SEQ ID NO: 36797 - protein, 505 aa, Zea mays subsp. mays
MLKNLTFVKTFASGILVPKSYIWPVTPDNYLLPYTSVVDDAHKAGLEIYAADFANDLTISYNYSFDPLAEYLFFIDNGAFSVDGVLTDFPITPSEAVGCFSNLNTSKIDHAKPLVISHNGASGDYPDCTDQAYEKAVADGADVIDCPVQVTKDGILICMSSVDLMDVTTVAKSQFASQVTTINSLKAGSGVFTFNLTWDDISKNLKPMISNPMSTYNLYRNPRNKNAGNFMRLSDFLTFANGKDLSGIMITVEHAAFMAEELGFGVVDAVIKALDDSGYSKQTAQNVMIQSTNSSVLVKFKQETKYNLVYMIEESVRDAAPSSLADIKKFADAVSVGTTSVFPETHYYLTNQTNKLVPTLKSAGLQVYVYVLMNEFASQPNDFFADATSQINAYVQSAKVDGVITDFPGTAHRYKLNSCTSMGKNMPLFMQPPQPGGLLSTILPDAQPPAAAPMPLLTDADVAEPALPPVSNTTTAASPSHAALRMRTHVLSIATLLMLCASLLI

SEQ ID NO: 36798 - protein, 347 aa, Zea mays subsp. mays
MSSVDLMDVTTVAKSQFASQVTTINSLKAGSGVFTFNLTWDDISKNLKPMISNPMSTYNLYRNPRNKNAGNFMRLSDFLTFANGKDLSGIMITVEHAAFMAEELGFGVVDAVIKALDDSGYSKQTAQNVMIQSTNSSVLVKFKQETKYNLVYMIEESVRDAAPSSLADIKKFADAVSVGTTSVFPETHYYLTNQTNKLVPTLKSAGLQVYVYVLMNEFASQPNDFFADATSQINAYVQSAKVDGVITDFPGTAHRYKLNSCTSMGKNMPLFMQPPQPGGLLSTILPDAQPPAAAPMPLLTDADVAEPALPPVSNTTTAASPSHAALRMRTHVLSIATLLMLCASLLI

SEQ ID NO: 36799 - DNA, 789 bp, Zea mays subsp. mays
acaagaaaccaaaccgtgacgcagcacagccatggggaagcagctctgcgacatgcaccgctcgcgccgccgcgcccgcatcgtcgccgccgccctcctctccgccttcgccgccgccgccgccgcgctcacggtgtacctcgtcttccgtccgctgaagccgcaggcctccgtggtgcgcgtcgccgtgtaccgcatggccacggccgccgggaactcctcggaggggcgggccccgccgccgtacacgctcgcggcgagcgcgcggttcacggcgctgctgcacaacccgagcgaccgcgccgtggtgttctacgacggcctcttcgcctacgtgacgtaccgcggggagatggtggcgccccccgcgccgctgcccggggtggcccagggccgcggcgccgacgtggcgctgtcgccgcatttcggccttcgcggcgcggtgcccgtgccggtgtcggcagacgcggcacaagcgctggagggagactgcgcggcgggccgcgtggagctacgcctcgtcgtcatgggccgggtcaagtacatgagcgggccattcaggaccggatggcgcgggctatacctgcgctgcgatgtcaccgtcggcctcggggtggacgccaccgcgggcgacgacggagccggggacgtgccactgctcgagtaccccaagtgctccgtcgacgcttgagttgatccttgatcggcgcaatgcatgagcgctcagatgatcagattttcagaattctggtggagaataaggaattgggaaaagcatttttctgtgtc

SEQ ID NO: 36800 - protein, 231 aa, Zea mays subsp. mays
TRNQTVTQHSHGEAALRHAPLAPPRPHRRRRPPLRLRRRRRRAHGVPRLPSAEAAGLRGARRRVPHGHGRRELLGGAGPAAVHARGERAVHGAAAQPERPRRGVLRRPLRLRDVPRGDGGAPRAAARGGPGPRRRRGAVAAFRPSRRGARAGVGRRGTSAGGRLRGGPRGATPRRHGPGQVHERAIQDRMARAIPALRCHRRPRGGRHRGRRRSRGRATARVPQVLRRRLS

SEQ ID NO: 36801 - protein, 219 aa, Zea mays subsp. mays
MGKQLCDMHRSRRRARIVAAALLSAFAAAAAALTVYLVFRPLKPQASVVRVAVYRMATAAGNSSEGRAPPPYTLAASARFTALLHNPSDRAVVFYDGLFAYVTYRGEMVAPPAPLPGVAQGRGADVALSPHFGLRGAVPVPVSADAAQALEGDCAAGRVELRLVVMGRVKYMSGPFRTGWRGLYLRCDVTVGLGVDATAGDDGAGDVPLLEYPKCSVDA

SEQ ID NO: 36802 - protein, 212 aa, Zea mays subsp. mays
MHRSRRRARIVAAALLSAFAAAAAALTVYLVFRPLKPQASVVRVAVYRMATAAGNSSEGRAPPPYTLAASARFTALLHNPSDRAVVFYDGLFAYVTYRGEMVAPPAPLPGVAQGRGADVALSPHFGLRGAVPVPVSADAAQALEGDCAAGRVELRLVVMGRVKYMSGPFRTGWRGLYLRCDVTVGLGVDATAGDDGAGDVPLLEYPKCSVDA

SEQ ID NO: 36803 - DNA, 1024 bp, Zea mays subsp. mays
ttttttccccgattctctaatcgcccgcccccacctagtattctggaattgcggacacaaggagatgctgtccgtgcaggaagcccttgagcttgcgtcgtccagctgcggcacgacgatggacgttaccacgtgcgggttcacgccgtgggggcccgagtcgtgccctggcctggagcaggtgatggcgtcgacgccggccgcggcagcgaggcacccggaccccgaggaggaggagaggcgccggcggcagcgccgcaagctgtcgaaccggctgtcggcgcgccggtcgcgagcgcggaagcagcagcggctggaggagctccgcgcggaggcggcgcggctccgcggccagaagcgggagctggaggccaggctgcaggccctggcgcggcacggcctcgccgtgcgctgccagaacgcgcggctccgcgccgaggccgccgcgctcgcgcgcaggctcctcgcgatcgcgtcgtacgcccagcagccgcagcataaggccggagtcgcgcccgcgccggcggcggcgctgctggggctggcgtcgctgacgacgtaggcggctggcgagagggacgttcttctgcccggtggaacgaagtctcgcgcccactcgcagttgcagtctcgcgctctcgcatgctatggtgaactggaaacatgcatgggctgagggcagttgggcacacacaccgaggcttgctagtacggtgcatgcagcggtcagccggtagcactatactattagtccctgtttgggaacaaagtttttgaaaactacagtttttgaaatattatactatactttagttatgacaataccgtagtttataataccgcagttttgaaaactgaggtccagagctaagtttagaatgccttaaaacaactatagtatttgcaatacttcagttttgaaaacagagattttacccagcttgccaaacaccattatgtatataatactgcagtatttgagaatactgcagtattcttccaaaactgcagaaaaactttgttc

SEQ ID NO: 36804 - protein, 186 aa, Zea mays subsp. mays
FFPDSLIARPHLVFWNCGHKEMLSVQEALELASSSCGTTMDVTTCGFTPWGPESCPGLEQVMASTPAAAARHPDPEEEERRRRQRRKLSNRLSARRSRARKQQRLEELRAEAARLRGQKRELEARLQALARHGLAVRCQNARLRAEAAALARRLLAIASYAQQPQHKAGVAPAPAAALLGLASLTT

SEQ ID NO: 36805 - protein, 165 aa, Zea mays subsp. mays
MLSVQEALELASSSCGTTMDVTTCGFTPWGPESCPGLEQVMASTPAAAARHPDPEEEERRRRQRRKLSNRLSARRSRARKQQRLEELRAEAARLRGQKRELEARLQALARHGLAVRCQNARLRAEAAALARRLLAIASYAQQPQHKAGVAPAPAAALLGLASLTT

SEQ ID NO: 36806 - protein, 147 aa, Zea mays subsp. mays
MDVTTCGFTPWGPESCPGLEQVMASTPAAAARHPDPEEEERRRRQRRKLSNRLSARRSRARKQQRLEELRAEAARLRGQKRELEARLQALARHGLAVRCQNARLRAEAAALARRLLAIASYAQQPQHKAGVAPAPAAALLGLASLTT

SEQ ID NO: 36807 - DNA, 536 bp, Zea mays subsp. mays
aatcgaaaaaacatcgcaggcagagctatcccccaacacgatgctgatccgcccattcacgagatccttctcactggagcccggtcggctcgtttcactagttgacagcgacgggaaggaggttggcaggggcaagatattccaagcgccagggaagagcccagccccagtggagagccgcatctgcacggttgatgtcaccgagctcaggaccgagaagtggagggagctcccacacccttctgaggcatctgggaggaccttccaggaggcggaggcgaggaatggtggaatcatgagggtctcttgggactccggcaggctgttgcctgtagtgtagcaaggcagaaacttttcgtcaggttgctgtataccgctaggcacaaggtgagcagagggagcctttggtttagggcgagagactggatcatgggattcttgggggcctaagtaacactgttaaaacctgtggttaactgtggtgtatccatcaactaattgtctcaagcaatgcaggtagagtagttactaatttt

SEQ ID NO: 36808 - protein, 112 aa, Zea mays subsp. mays
IEKTSQAELSPNTMLIRPFTRSFSLEPGRLVSLVDSDGKEVGRGKIFQAPGKSPAPVESRICTVDVTELRTEKWRELPHPSEASGRTFQEAEARNGGIMRVSWDSGRLLPVV

SEQ ID NO: 36809 - protein, 99 aa, Zea mays subsp. mays
MLIRPFTRSFSLEPGRLVSLVDSDGKEVGRGKIFQAPGKSPAPVESRICTVDVTELRTEKWRELPHPSEASGRTFQEAEARNGGIMRVSWDSGRLLPVV

SEQ ID NO: 36810 - DNA, 557 bp, Zea mays subsp. mays
agtctcacatagcatagccatcttcttcgtcgacaagcaggggagttaggtctcacatgcatgcttcatcacattgttgactgcataacgaaacacatcgtcgtcggatcggagatgatgagttccgtcgtcgtggatgctgctgctaccagcagcagcgagaagaagacgtcgtggccggaggtggtgggcatgtccatcaaggaggcgacggagactattctcaaggacatgcccaacgcgtacatccaggtgctgcctgttgggtcgcccgtgacgctggaccttcgccccgaccgcgtccgtatcttcgttgacaccgtcgccatgactccgacagttgggtgatacataccaaatgcaataaacaaaccctactttttattttatgtttccagttaataataaaccaggccttagcttcttggttgtccttccttggttggtgttagcttctaagctactagtacaccattaaaaaaaggaggacctcatgtatggctaccgtgaaaaatgtgatcttgatggaataatatatcataaataagcaattaatg

SEQ ID NO: 36811 - protein, 95 aa, Zea mays subsp. mays
MLHHIVDCITKHIVVGSEMMSSVVVDAAATSSSEKKTSWPEVVGMSIKEATETILKDMPNAYIQVLPVGSPVTLDLRPDRVRIFVDTVAMTPTVG

SEQ ID NO: 36812 - protein, 77 aa, Zea mays subsp. mays
MMSSVVVDAAATSSSEKKTSWPEVVGMSIKEATETILKDMPNAYIQVLPVGSPVTLDLRPDRVRIFVDTVAMTPTVG

SEQ ID NO: 36813 - protein, 76 aa, Zea mays subsp. mays
MSSVVVDAAATSSSEKKTSWPEVVGMSIKEATETILKDMPNAYIQVLPVGSPVTLDLRPDRVRIFVDTVAMTPTVG

SEQ ID NO: 36814 - DNA, 695 bp, Zea mays subsp. mays
aaaaggaaaaagagaatctggggtgaaggagacggaagatagattgaataatatcaaatggcgacatcgaggcttcaagctctgtggaatcaccctgccggacctaaaaccattcatttctgggcgccaacgttcaagtggggaatcagcattgctaacattgcagactttgctaaacctactgacaaaatttcctaccctcaacagattgctgttacatgcactggagttatctggtctcgctacagcatggttatcactcccaaaaactggaacctctttagcgtcaatgttgctatggctgggactggcatgtaccagcttgctcgtaaaatcaaaaacgattttgcatctgatgtggagcctgttgttgctaaagaatgattacgacgaaaaacaagaagatgaaaacatcaaaaggaaagatgtgatatcatcatcatcatcatcatcatattgcttgtgtttgaaaatctagtttcaagatatttgatttttcttttcactcccagatcgtaagggtcgaattaccaaataagttttctttttaatacccaatatcgaaactttgcgacagtgagctcctcctgcggctgtgataagaaccttttaagctaaagaaaaaaaaaaaaaaaaaagcttatcgataccgtcgatgtttaaacacaataaagttggaacgggaggggggaaag

SEQ ID NO: 36815 - protein, 158 aa, Zea mays subsp. mays
KGKRESGVKETEDRLNNIKWRHRGFKLCGITLPDLKPFISGRQRSSGESALLTLQTLLNLLTKFPTLNRLLLHALELSGLATAWLSLPKTGTSLASMLLWLGLACTSLLVKSKTILHLMWSLLLLKNDYDEKQEDENIKRKDVISSSSSSSYCLCLKI

SEQ ID NO: 36816 - protein, 108 aa, Zea mays subsp. mays
MATSRLQALWNHPAGPKTIHFWAPTFKWGISIANIADFAKPTDKISYPQQIAVTCTGVIWSRYSMVITPKNWNLFSVNVAMAGTGMYQLARKIKNDFASDVEPVVAKE

SEQ ID NO: 36817 - DNA, 685 bp, Zea mays subsp. mays
tattacttatccgtctcaaagcagcctagtgccgcaaagtcagtccagtccacaggccttcttcaagcagatatatagcagtaccgtccatgggcaactgcacggcgtcgcagcgcgcagcggagtcgtgggccgacgacggcgagtgggaggaggcggcgtcatcgtcgccgttgtcgtcggagggcgaccaccaccaccatcatcatcaccgcgacgagaggagagaggatcaccacgactccgaggtgaccatcaggatcaccaagaggcagctgcacgagctgattgagaagaacggcggcggccacgggttaccgctaccggggtccgggaggcgccggcggtcgtccgcggagcagctgctggccgacatcatggactccggcgaggtgcaccaccgcgaccaccacagggaggaccactggcactggaagcccgcgctgcagagcatccccgagaccgtcgagtcatcatgactgtcatgcatgatctttcttggtgtttggtggttcagtagctcgatcaggggtcgttattttcgcctcttgttcggtgtgcaagtgtagtcgctagctaatcggtgacacggtgtacatatcaaagttttcagacatgtacatataggtctagggaggtgggagttcattgttaggttaggtccattatatttcagatgtgtggg

SEQ ID NO: 36818 - protein, 129 aa, Zea mays subsp. mays
MGNCTASQRAAESWADDGEWEEAASSSPLSSEGDHHHHHHHRDERREDHHDSEVTIRITKRQLHELIEKNGGGHGLPLPGSGRRRRSSAEQLLADIMDSGEVHHRDHHREDHWHWKPALQSIPETVESS

SEQ ID NO: 36819 - protein, 96 aa, Zea mays subsp. mays
ITYPSQSSLVPQSQSSPQAFFKQIYSSTVHGQLHGVAARSGVVGRRRRVGGGGVIVAVVVGGRPPPPSSSPRREERGSPRLRGDHQDHQEAAARAD

SEQ ID NO: 36820 - DNA, 1361 bp, Zea mays subsp. mays
gtgtgtcatttctctctgacgggtgagatttggtttggatctggtcggaccaggtgctccacgcgatggcgcagaaggagactaatggcagcaacggcgatcacatctccacccgcccgccgccgaccccctcgcccctccgcttctccaagttctttcaggctaacctgcggatcctggtcactggtggggcgggcttcatcggctcgcacctcgtagacaagctcatggagaacgagaagcacgaggtcattgttgctgataactttttcactggttcaaaagacaacctgaagaagtggattggccacccaagatttgagctcatccgtcatgatgtcaccgagccgcttcttgtggaagttgaccaaatctatcaccttgcttgccctgcttcaccaatcttctacaagcacaaccctgttaagaccatcaagacaaatgttattggtaccctgaacatgctaggacttgcaaagagagttggagctaggattttgttgacatcaacctctgaagtttatggtgatccacttgagcatcctcaaactgaggcctactggggcaatgttaacccgattggtgttaggagttgttatgatgagggtaagcgtgtagcagagacgctgatgttcgactatcacaggcagcatggcattgaaatccggattgccaggattttcaacacctatgggcctaggatgaacattgatgatggccgtgttgttagcaacttcattgctcaggctgtgcgcggtgagcccctgactgtccagaggccaggaacacagactaggagtttctgctatgttgccgatatggttgatggtcttattaagctgatgaatggaaacaagactggaccgattaacttggggaacccaggtgaattcaccatgctggaacttgctgagaatgtgaaggagttgatcaacccagatgtgacagtgacgatgaccgagaacactcctgatgatccccgccagaggaagccggacatcacaaaggcgaaggaagttctgggatgggagcccaagatcgtcctgcgggacggcttggtgctcatggaggatgatttccgggagcgcctgaccgtgcccaagaaaaccaaggcctaaattgccctgcagttggggaagaatatccacacggggaagcatactcatagtcgggctcgtcattatttgtggccacatttcattacggaatttgagttccaataaacttaatattcctttgtcgttcaccttgaaggattgtattattagaattttcatacagggctggccattcgagtctctgcctacgcagatcttgtggtacttgtgtttgtagccaatgtgtgagtaaaagtcgattat

SEQ ID NO: 36821 - protein, 350 aa, Zea mays subsp. mays
MAQKETNGSNGDHISTRPPPTPSPLRFSKFFQANLRILVTGGAGFIGSHLVDKLMENEKHEVIVADNFFTGSKDNLKKWIGHPRFELIRHDVTEPLLVEVDQIYHLACPASPIFYKHNPVKTIKTNVIGTLNMLGLAKRVGARILLTSTSEVYGDPLEHPQTEAYWGNVNPIGVRSCYDEGKRVAETLMFDYHRQHGIEIRIARIFNTYGPRMNIDDGRVVSNFIAQAVRGEPLTVQRPGTQTRSFCYVADMVDGLIKLMNGNKTGPINLGNPGEFTMLELAENVKELINPDVTVTMTENTPDDPRQRKPDITKAKEVLGWEPKIVLRDGLVLMEDDFRERLTVPKKTKA

SEQ ID NO: 36822 - protein, 296 aa, Zea mays subsp. mays
MENEKHEVIVADNFFTGSKDNLKKWIGHPRFELIRHDVTEPLLVEVDQIYHLACPASPIFYKHNPVKTIKTNVIGTLNMLGLAKRVGARILLTSTSEVYGDPLEHPQTEAYWGNVNPIGVRSCYDEGKRVAETLMFDYHRQHGIEIRIARIFNTYGPRMNIDDGRVVSNFIAQAVRGEPLTVQRPGTQTRSFCYVADMVDGLIKLMNGNKTGPINLGNPGEFTMLELAENVKELINPDVTVTMTENTPDDPRQRKPDITKAKEVLGWEPKIVLRDGLVLMEDDFRERLTVPKKTKA

SEQ ID NO: 36823 - protein, 218 aa, Zea mays subsp. mays
MLGLAKRVGARILLTSTSEVYGDPLEHPQTEAYWGNVNPIGVRSCYDEGKRVAETLMFDYHRQHGIEIRIARIFNTYGPRMNIDDGRVVSNFIAQAVRGEPLTVQRPGTQTRSFCYVADMVDGLIKLMNGNKTGPINLGNPGEFTMLELAENVKELINPDVTVTMTENTPDDPRQRKPDITKAKEVLGWEPKIVLRDGLVLMEDDFRERLTVPKKTKA

SEQ ID NO: 36824 - DNA, 686 bp, Zea mays subsp. mays
atatattagagtagagagcagaaaagaagaagttaaaaaggtagatcgaatgaacagaaatggagaggaggaagtggccgagaagaagaggaggaggagggagggggtgcaggtgtccctcagaggaggctgcttggctgcttcagccactgctatagcggtaatgctgatggcaacagagaagggtgtggctgacatctatggcttgccgctccctctcaactccagctggtctttttctccctcctaccagtatgtggtgggggcatgcacggtgaccattctctactccctgttccacctctgtctaggaatttacaggctcctcactggatcacccatcacaccctcccgttcccaagcttggctttgtttcatcttcgatcagctcttcagctatttgataatgagcgctggatcagccggtattggagttacaaacctcaacaagaccggcatcaaacacactcctctccctgacttctgcaagaccctttcttatttctgcaatcacgtcgccctctccctcctcctagtcttgctctccttcatctttctcgcctcctcttccctctttaatgtccttgtgctctccactctctagtctcatggattctctattgttggtgctctatataatctaagacagactctaattattattatttatgatcacttgcattccc

SEQ ID NO: 36825 - protein, 200 aa, Zea mays subsp. mays
YIRVESRKEEVKKVDRMNRNGEEEVAEKKRRRREGVQVSLRGGCLAASATAIAVMLMATEKGVADIYGLPLPLNSSWSFSPSYQYVVGACTVTILYSLFHLCLGIYRLLTGSPITPSRSQAWLCFIFDQLFSYLIMSAGSAGIGVTNLNKTGIKHTPLPDFCKTLSYFCNHVALSLLLVLLSFIFLASSSLFNVLVLSTL

SEQ ID NO: 36826 - protein, 184 aa, Zea mays subsp. mays
MNRNGEEEVAEKKRRRREGVQVSLRGGCLAASATAIAVMLMATEKGVADIYGLPLPLNSSWSFSPSYQYVVGACTVTILYSLFHLCLGIYRLLTGSPITPSRSQAWLCFIFDQLFSYLIMSAGSAGIGVTNLNKTGIKHTPLPDFCKTLSYFCNHVALSLLLVLLSFIFLASSSLFNVLVLSTL

SEQ ID NO: 36827 - protein, 146 aa, Zea mays subsp. mays
MLMATEKGVADIYGLPLPLNSSWSFSPSYQYVVGACTVTILYSLFHLCLGIYRLLTGSPITPSRSQAWLCFIFDQLFSYLIMSAGSAGIGVTNLNKTGIKHTPLPDFCKTLSYFCNHVALSLLLVLLSFIFLASSSLFNVLVLSTL

SEQ ID NO: 36828 - DNA, 694 bp, Zea mays subsp. mays
acgaatcccctcctcacttcgcccctccccctctcctatttcttctctccgggccccgggccaaaattccatcctaagttccatcgaagagggcggcaaggggcgatccggatagcgcaagagcgaccatggcctacgtcgagagaggtgttgtgaaaggcaaacggacaatctggagactaagcataatccccgacttctttaaggctattgtgaacttcatcagaatgttcttcctcacaatgttttctatcgagaaaacagacagctataagaaaggatatggtagtggtaagaagtgggatggtggacctggtgggggaggtcctggtgggggtccatatggtggtgggggcggcggtggaggtggccctcgcggtcctcgcacactatctgacctccgatcaaacgatcagagttccctccctgcttgtggatcctgctgcggatgacatcttaacaaaagaacaacatattataatgacagaaaaacttccgtatttcatttcagcagagcaaaatcattgtgatgccgtgaagagtctagcatgtccagtatatattctgtagcttgtttctgatgtgatttgcatactgtattcatcatcgctttgccatgctgaattgtcctggatggagtcaaaatcttatccttaatactggcttcctgttgtgcaatgtgaatttactatgc

SEQ ID NO: 36829 - protein, 107 aa, Zea mays subsp. mays
MAYVERGVVKGKRTIWRLSIIPDFFKAIVNFIRMFFLTMFSIEKTDSYKKGYGSGKKWDGGPGGGGPGGGPYGGGGGGGGGPRGPRTLSDLRSNDQSSLPACGSCCG

SEQ ID NO: 36830 - protein, 95 aa, Zea mays subsp. mays
MVVVRSGMVDLVGEVLVGVHMVVGAAVEVALAVLAHYLTSDQTIRVPSLLVDPAADDILTKEQHIIMTEKLPYFISAEQNHCDAVKSLACPVYIL

SEQ ID NO: 36831 - protein, 88 aa, Zea mays subsp. mays; identical to SEQ ID NO: 15646

SEQ ID NO: 36832 - DNA, 534 bp, Zea mays subsp. mays
cctagaacatcctaatcgaaaaaaaccctaatcgaaccgaatcgaatcctccagtccagatcaaaacaagggagcgagcatggcgtcgtcctctgctgtgagcaagcgcggcgacgccggcggcgtcctgtctgcgatctcgcggtcctcggtggcggcgcacggccgcgaggccgcggcggtggcggggaagctgctgcggagcacggggaaggcggcgtggatcgccgggacgaccttcctggtgctggtcgtgccgctcatcatcgagatggaccgcgagcagcagatggtcgacctcgacctgcagcagcaggctcttctcggctcgccgccgcccctcgccaaataaatccctcctctttcgtccgtctttgttgcctgccgctgctgctgatgcgatcacatttcgttttgctagtatcataagttgtcgagaattttatcactagtctgttttgggggagaaagatcatgccttgttgtgactgctcctgctcgatacaattattatcgcaatatcaccgacttgcc

SEQ ID NO: 36833 - protein, 90 aa, Zea mays subsp. mays
MASSSAVSKRGDAGGVLSAISRSSVAAHGREAAAVAGKLLRSTGKAAWIAGTTFLVLVVPLIIEMDREQQMVDLDLQQQALLGSPPPLAK

SEQ ID NO: 36834 - DNA, 686 bp, Zea mays subsp. mays
agatctgatcatttggaagtaaaactagttgaaaggttaagaaaaaaaaaaagacagagaaagaatggcagaaacggagcaaaaggaggtagaagaaaagggatcgttgatctcaggcttgttggataaagccaaaggtttctttgccgagaagcttgctaatattccgacgccggaagccaccgtggacgacgtagacttcaaaggtgtgactcgtcaaggagttgattatcacgccaaggtctccgtcaagaacccttaccctcaggccatccctatttgccagatctcttacatcctcaagagtgacacaaggatgatagcgtctggtacaataccggatccgggttcgttgatcgcgaacgggtcgacggttctggacgtaccggtgaaggtgccttacagcatagcggtgagtttgatgaaggacatgtgtttggactgggacattgactatcaactcgacattggattgaccatcgacattcctattgttggtgacattaccattcctgtctctactcagggtgagatgaagctcccttcccttcgcgacttcttttaatcatctatataagttataatctgatttttcaataagtacgatccgtaaacgacatagacgatcgttggatgtttcagttgtggactcttgtgtttgttggttatatgtatttgttgctttg

SEQ ID NO: 36835 - protein, 166 aa, Zea mays subsp. mays
MAETEQKEVEEKGSLISGLLDKAKGFFAEKLANIPTPEATVDDVDFKGVTRQGVDYHAKVSVKNPYPQAIPICQISYILKSDTRMIASGTIPDPGSLIANGSTVLDVPVKVPYSIAVSLMKDMCLDWDIDYQLDIGLTIDIPIVGDITIPVSTQGEMKLPSLRDFF

SEQ ID NO: 36836 - DNA, 646 bp, Zea mays subsp. mays
attttcactcagccaaatctgtgaagctcagcttctctcatcaatggcgaaatcagtggcgacggcgacttcttccctcgtgcaaaccctcagacgttacgtcaagaagccgtgggagataaccggaccttgcgctcacccggagtacctcgaatccgttccgaaggcgacggagtatcggatccgatgccccgccacgatcgatcaagaggcgatcgtgccgacctcggatcccgagacggtgtacaacatcgtgtaccacggtagagatcagcggcgtaaccgtccgccgatcaggcgatatctgttgaagaaggaggacgtggtgagtgagaagaagatgttcgaggagacggacttccctagggtttacttgacgaccactgtggaggaggatgagaacgcacgtggcggaggctacgagtaacaaaaaaaaaaggttttcttgtagtctctgacttgctgatgggcgaaggactgcgtgcgatatttctctaccgacagaagattttccatggtttgctttactaataaggtttgtagtagcttaatgtactgcaagacacactatttttcttcacaggaattagattgctgttcagacattctccctatgtttacgcatatctatgatgatgatgatgat

SEQ ID NO: 36837 - protein, 141 aa, Zea mays subsp. mays
FSLSQICEAQLLSSMAKSVATATSSLVQTLRRYVKKPWEITGPCAHPEYLESVPKATEYRIRCPATIDQEAIVPTSDPETVYNIVYHGRDQRRNRPPIRRYLLKKEDVVSEKKMFEETDFPRVYLTTTVEEDENARGGGYE

SEQ ID NO: 36838 - protein, 127 aa, Zea mays subsp. mays
MAKSVATATSSLVQTLRRYVKKPWEITGPCAHPEYLESVPKATEYRIRCPATIDQEAIVPTSDPETVYNIVYHGRDQRRNRPPIRRYLLKKEDVVSEKKMFEETDFPRVYLTTTVEEDENARGGGYE

SEQ ID NO: 36839 - DNA, 708 bp, Zea mays subsp. mays
aatcgaaaaatcgccaagtttttttaactatacaatccaggaaggaagtcactgtcacttggtgagatcgatggcccgcgtcgccgccgtcctcgttgctctcctcgccctctttgccgtcgcggccacggcgcaggcccctgccgcgtcgcccaagcgcgccccagcccctgcgccacccaagatggcccctctcccgccgccgccgaccagggcccccatggcctccccgccctcgcctcccacgatgtcgccggcgtccgccccctccgccgacgctccagccacgagccccgccggtgcgggatttggcgacgcgatggccccggcgggagcctccgctctgactccggccgccgcgcccgtcacggagaagagcacagccgcatctgcctccgccatcagcttcgtcgccatcgccggcgctgtggcagccgccgccgtcgtgttctagacatccggaagtggatctgaggagctgcagctgcacctgagccgctctgctgttgttgatagatgccctctgtttgctctgttttacgatccattgtttatttatttatttgtttgtttgtcatttagaggtctgagacagagatgaggatgtgtaatcctatcaattttctgaacgggagttgtttctatgctccgcaagcaaacatatgacactgcaagaaaaaaaaaaaaaaaaaagcttatcgataccgt

SEQ ID NO: 36840 - protein, 150 aa, Zea mays subsp. mays
IEKSPSFFNYTIQEGSHCHLVRSMARVAAVLVALLALFAVAATAQAPAASPKRAPAPAPPKMAPLPPPPTRAPMASPPSPPTMSPASAPSADAPATSPAGAGFGDAMAPAGASALTPAAAPVTEKSTAASASAISFVAIAGAVAAAAVVF

SEQ ID NO: 36841 - protein, 127 aa, Zea mays subsp. mays
MARVAAVLVALLALFAVAATAQAPAASPKRAPAPAPPKMAPLPPPPTRAPMASPPSPPTMSPASAPSADAPATSPAGAGFGDAMAPAGASALTPAAAPVTEKSTAASASAISFVAIAGAVAAAAVVF

SEQ ID NO: 36842 - protein, 89 aa, Zea mays subsp. mays
MAPLPPPPTRAPMASPPSPPTMSPASAPSADAPATSPAGAGFGDAMAPAGASALTPAAAPVTEKSTAASASAISFVAIAGAVAAAAVVF

SEQ ID NO: 36843 - DNA, 1558 bp, Zea mays subsp. mays
atcgacccagccatctcctcaccctcgttcaccacacagtccgccactcctttagtagcttgtgatttgtacgtcgacgagatcactggtcgggtggcggacgacgacacatggggaagggtagtgtgggtgcatcatggtgggcgttcctcctgctcgccggcgtgctgctggtcgtagcagccacggccggggcggaggacggagtggtcgaacgggaccgcaaggaggacctgcggtggtgcaagcaggcgtgcgagtggcagtacggaaaggacaccccgcggaagagggaatgcgagagcgagtgccgcgagcggcaccagcaagctgacgcgggcgaggacggcgacagcggcgtggacgcctacgtctcccgctccgggaggggcgagtgccggcgccagtgcctgcgccgccacgagggccagccgtgggagacccaggagtgcatgaggcggtgccgccgccgcggactggccgtcgacatggagcaagagtacggtcgcggcagcgagagcgcgggcaagtgccgggagaggtgcgagcgccaccaccgcggggactggtgggagaggcagcgctgcctgatggactgcaagagccgggagcgggaggaggagggcggcagcggcggccggcgcggcgaggaggaggaggacagcggcgaccgctgcccttgcgagaagcagtgcgagggccaccacgaccgggaaagcaggcagcagtgcgtccaggcttgcgagcgccggcgacagcagcgcggcggcagccgtgactccaacgtcgacgaggacgacagcgaccggcggtgccagatgaaatgccggcgccacagcgatcggcaggcgaggcagtggtgcgtgcagcgctgcgagcgtaagcaacaggaggaggacgccgccgccgacgacgacaacagcggccggtgccagaagagatgccagcaccacagcgatcggcaggcgaggcagtggtgcgtgcagcgctgcgagcgtaagcaacaggaggacgccgccgccgacgacgacgagaacagcgaccggtgccagaaaagatgccagcagcacagcgactggatgaaaaggctgcggtgcatgcaacggtgcgggcgacaggaggagggcggcgcacgcgacgacgctgacgacgacgccagccacggcgaccggtgcgagaagaagtgccagcagcaccaccgcgactacgacaagcagcagcagtgcgtgcgcgactgccgccgcggccgtggctgggaaacggtggccggcgccatccttgaggtggtgtgacgatcgacgacgtgcatggcgtggcgcagagctaataataaaagggtagtgtacgcttaccgcgtacgtacgtgtcaccgggcgtggcactctccagtctccagggacccatccaccaagtgctactgctccttcgtagggagacgtgggaataaagagtggtagctgcatgcgcgtacggcggccatggctctccgatgagagagctagctgtgtacgtgtgttcgtgatgttgttccatgcatgacatgtatacgtcttgcctg

SEQ ID NO: 36844 - protein, 393 aa, Zea mays subsp. mays
MGKGSVGASWWAFLLLAGVLLVVAATAGAEDGVVERDRKEDLRWCKQACEWQYGKDTPRKRECESECRERHQQADAGEDGDSGVDAYVSRSGRGECRRQCLRRHEGQPWETQECMRRCRRRGLAVDMEQEYGRGSESAGKCRERCERHHRGDWWERQRCLMDCKSREREEEGGSGGRRGEEEEDSGDRCPCEKQCEGHHDRESRQQCVQACERRRQQRGGSRDSNVDEDDSDRRCQMKCRRHSDRQARQWCVQRCERKQQEEDAAADDDNSGRCQKRCQHHSDRQARQWCVQRCERKQQEDAAADDDENSDRCQKRCQQHSDWMKRLRCMQRCGRQEEGGARDDADDDASHGDRCEKKCQQHHRDYDKQQQCVRDCRRGRGWETVAGAILEVV

SEQ ID NO: 36845 - protein, 279 aa, Zea mays subsp. mays
MRRCRRRGLAVDMEQEYGRGSESAGKCRERCERHHRGDWWERQRCLMDCKSREREEEGGSGGRRGEEEEDSGDRCPCEKQCEGHHDRESRQQCVQACERRRQQRGGSRDSNVDEDDSDRRCQMKCRRHSDRQARQWCVQRCERKQQEEDAAADDDNSGRCQKRCQHHSDRQARQWCVQRCERKQQEDAAADDDENSDRCQKRCQQHSDWMKRLRCMQRCGRQEEGGARDDADDDASHGDRCEKKCQQHHRDYDKQQQCVRDCRRGRGWETVAGAILEVV

SEQ ID NO: 36846 - protein, 267 aa, Zea mays subsp. mays
MEQEYGRGSESAGKCRERCERHHRGDWWERQRCLMDCKSREREEEGGSGGRRGEEEEDSGDRCPCEKQCEGHHDRESRQQCVQACERRRQQRGGSRDSNVDEDDSDRRCQMKCRRHSDRQARQWCVQRCERKQQEEDAAADDDNSGRCQKRCQHHSDRQARQWCVQRCERKQQEDAAADDDENSDRCQKRCQQHSDWMKRLRCMQRCGRQEEGGARDDADDDASHGDRCEKKCQQHHRDYDKQQQCVRDCRRGRGWETVAGAILEVV

SEQ ID NO: 36847 - DNA, 1062 bp, Zea mays subsp. mays
ctagaacatcctaatcgaaaatagaatatgattctgggtggtagatataaatgaaaattgcgtctggttccgacgacacctcttttaagttttggttttgtttcttttataccaccggacttttgcttttacaggttccaaaacgcatctcctccacctccgtctcctactcctcgcttcctcgtcacgcaaactttgatccaccggagcaatgaagatcaccgccttgcttgttctcaaggccgcccccgaaacctcggatcccgtgatcctcgcaaatgcttctgacgtctctcactttggctatttccagcgatctagcgtcaaggagttcgtcgtcttcgtgggccgcactgtcgctagccgaacccctccttctcagcgccagtccgtccagcacgaagagtacaaggttcacgcttacaataggaatggcctttgcgcggtgggattcatggacgatcattatcctgttcgaagtgccttttctcttctcaatcaggtcatagatgagtaccagaagagttttggtgaggcatggaggtctgctaaagaagactcctctcagccctggccttacttagccgaagctcttaccaaattccaggacccggcagaggctgataagctgttgaaaatccagagggagttggatgagaccaagattatcctccataagaccattgatagcgttctagcccgcggtgagaagctggacagcctagtggagaagagctctgatttgagcatggcatcgcagatgttctacaagcaagcaaagaaaacgaattcatgctgcactattctgtgagctgcgactctggatggatgtctttgggtatatatagtcaaccaaacttttgctgtggggcgagactgttttccattttatataatatatatttgattccgttctctcgtttgcatgcactcttgaaattccatataagactcatgtcgtgtggcgtgttatccaaatacagtttcaattgtctttgccagattatatgattgcttttgtttatgttaaaaaaaaaaaaaaaaaagcttatcgataccgtc

SEQ ID NO: 36848 - protein, 199 aa, Zea mays subsp. mays
MKITALLVLKAAPETSDPVILANASDVSHFGYFQRSSVKEFVVFVGRTVASRTPPSQRQSVQHEEYKVHAYNRNGLCAVGFMDDHYPVRSAFSLLNQVIDEYQKSFGEAWRSAKEDSSQPWPYLAEALTKFQDPAEADKLLKIQRELDETKIILHKTIDSVLARGEKLDSLVEKSSDLSMASQMFYKQAKKTNSCCTIL

SEQ ID NO: 36849 - protein, 118 aa, Zea mays subsp. mays
MDDHYPVRSAFSLLNQVIDEYQKSFGEAWRSAKEDSSQPWPYLAEALTKFQDPAEADKLLKIQRELDETKIILHKTIDSVLARGEKLDSLVEKSSDLSMASQMFYKQAKKTNSCCTIL

SEQ ID NO: 36850 - DNA, 971 bp, Zea mays subsp. mays
aagaacattaacaaagatggctcttgccattgcttctgctctcacttccaccacactcgctttatccacaagcagagtacaaaatgcacgaggagctttctcatcacgtgttggtggaagaacgagcgagcgtttggtggtggttcgtgccggtaaagaagtttctagtgtctgtgaaccacttactccggaccgtcctatgtggttccccggtacttctccacctgagtggctcgatggcagtcttcctggtgatttcggtttcgatcctcttggtctagggtctgatccggaaaccctcagatggtttgcccaagctgagctcatacatagccggtgggccatgctagccgtgaccggtatcttaataccggaatgtctggagcggttaggtttcatcgagaattactcgtggtacgacgcaggctcgcgcgagtatttcgcggattccactaccttattcgtcgtccagttagtgttaatgggctgggccgaaggtagacgttgggctgattttatcaaaccgggttcggtggacatagagcctcagtatccgcacaaggtgaatcctaaaccggatgttggttacccgggaggtttatggttcgatccgatgatgtggggaagaggttctcctgatccggtcatggttatgaggactaaagagattaaaaacggacggttagcgatgcttgctttcgttgggttttgtttccaagctaactacagtgctagtcaagatccaattgagaatctcatggctcatctcgctgatcctggtcactgcaacgtcttctcagcatttacatcacaatgatcacgttgattgagattagtttgcggcgaatataattttcttatggctgtataagcaaccaaatgatgttataactttggtgtatagtatcagttacgttattgttatgaatttaattatttgtatattgttgttttataaagagacaaaattc

SEQ ID NO: 36851 - protein, 271 aa, Zea mays subsp. mays
RTLTKMALAIASALTSTTLALSTSRVQNARGAFSSRVGGRTSERLVVVRAGKEVSSVCEPLTPDRPMWFPGTSPPEWLDGSLPGDFGFDPLGLGSDPETLRWFAQAELIHSRWAMLAVTGILIPECLERLGFIENYSWYDAGSREYFADSTTLFVVQLVLMGWAEGRRWADFIKPGSVDIEPQYPHKVNPKPDVGYPGGLWFDPMMWGRGSPDPVMVMRTKEIKNGRLAMLAFVGFCFQANYSASQDPIENLMAHLADPGHCNVFSAFTSQ

SEQ ID NO: 36852 - protein, 266 aa, Zea mays subsp. mays
MALAIASALTSTTLALSTSRVQNARGAFSSRVGGRTSERLVVVRAGKEVSSVCEPLTPDRPMWFPGTSPPEWLDGSLPGDFGFDPLGLGSDPETLRWFAQAELIHSRWAMLAVTGILIPECLERLGFIENYSWYDAGSREYFADSTTLFVVQLVLMGWAEGRRWADFIKPGSVDIEPQYPHKVNPKPDVGYPGGLWFDPMMWGRGSPDPVMVMRTKEIKNGRLAMLAFVGFCFQANYSASQDPIENLMAHLADPGHCNVFSAFTSQ

SEQ ID NO: 36853 - protein, 205 aa, Zea mays subsp. mays
MWFPGTSPPEWLDGSLPGDFGFDPLGLGSDPETLRWFAQAELIHSRWAMLAVTGILIPECLERLGFIENYSWYDAGSREYFADSTTLFVVQLVLMGWAEGRRWADFIKPGSVDIEPQYPHKVNPKPDVGYPGGLWFDPMMWGRGSPDPVMVMRTKEIKNGRLAMLAFVGFCFQANYSASQDPIENLMAHLADPGHCNVFSAFTSQ

SEQ ID NO: 36854 - DNA, 607 bp, Zea mays subsp. mays
actcccaccacttcgagcgcctcctcctgtctcgtcctcgtcccccgtcccctcgtcggcgcccgatctaagtcaagatgagtcgtggcgggagtgctggtggtggtcaaagttctctgggttacctgtttggagatggcgagcctgcaaagcctgctgcagcaccagctgcgaagcccgcacctgctgagaaaccagcaccggcagctgctgatgtagccaagcagattccagctggcattccaggtagccgggcgaacaactattaccgtgcagatggccagaacacgggcaacttccttacggaccgtccttcaaccaaggttcatgctgctcctggcggtggctcgtccctgggctacttgtttggcggaaagtgatgttaatgatggtgcctgcttaatgaacgagcgatgaattggcctgtatctctgttatccatgtggtgaaaactggaagtgtttggtttgagcagtttaccacctgcgtcgatgtactctgtctgtatggttcattgtgtccaagctgacctcctgcttggaagccagcttgcctaaaacctgtcgctttcaaactaatcgtcttcatctcaaaacttggtgtgcct

SEQ ID NO: 36855 - protein, 100 aa, Zea mays subsp. mays
MSRGGSAGGGQSSLGYLFGDGEPAKPAAAPAAKPAPAEKPAPAAADVAKQIPAGIPGSRANNYYRADGQNTGNFLTDRPSTKVHAAPGGGSSLGYLFGGK

SEQ ID NO: 36856 - protein, 62 aa, Zea mays subsp. mays
LPPLRAPPPVSSSSPVPSSAPDLSQDESWRECWWWSKFSGLPVWRWRACKACCSTSCEARTC

SEQ ID NO: 36857 - DNA, 506 bp, Zea mays subsp. mays
aaaaagagtgattattaatggcgacttcagggtttaagcatttggtggttgtgaagtttaaggaagatgctaaggttgatgagatcttgaagggattagagaatcttgtttctcaaattgattctgtcaaatcctttgaatggggagaagataatgagagtcacgagatgcttagacaaggattcactcatgcattctcgatgacttttgagaacaaagatgcttacgtttctttcacaggccatcctcttcacgttgagttctctgccgctttcaccgccgtcatcgacaagattgtggtcatggacttcaccgtcgccgccgtcaaatctcccgttgttgtagcaccgtgaaaactcatcgtacttgtttcttaattaatctcgttttataatttaatcgaggtttgtgagttgtttcggtttatgtaattctgtttgttaagtatgttttggtttgattccttcagttccggttcggaataataaaaaactggttttgtgggt

SEQ ID NO: 36858 - protein, 111 aa, Zea mays subsp. mays
MATSGFKHLVVVKFKEDAKVDEILKGLENLVSQIDSVKSFEWGEDNESHEMLRQGFTHAFSMTFENKDAYVSFTGHPLHVEFSAAFTAVIDKIVVMDFTVAAVKSPVVVAP

SEQ ID NO: 36859 - protein, 61 aa, Zea mays subsp. mays
MLRQGFTHAFSMTFENKDAYVSFTGHPLHVEFSAAFTAVIDKIVVMDFTVAAVKSPVVVAP

SEQ ID NO: 36860 - DNA, 808 bp, Zea mays subsp. mays
ctctctcgccgtccgccgctactcccctgcctcccccagagctcgttagggttttctcttttttcgggggagaaatctcaagaggcggcaccatgctcgtgtaccaggacaagctttccggcgacgagcttctgtcggattcgttcccttacagggagctggagaacggcgtgctctgggaagtcgatggccattgggtcgttcaaggagcagttgatgtggacattggagccaatccctctgctgagggtggtggtgatgatgagggtgttgatgaccaggccgtgaaggtggttgacattgttgacaccttccgtcttcaggagcaacctgcttttgacaagaagcagtttatctctcacatgaagcgctacatcaagaacctctctgccaagcttgaaggggatgacctagatgctttcaagaagaatgttgagtccgccacaaagtatcttcttagcaagctcaaggaccttcagttctttgttggcgagagcatgcatgatgatggcggcgtggtgttcgcctactacaaggagggagctgctgatccaactttcctgtactttgcacatgggctgaaagaggtcaagtgctaatcgcactgtatgctaaaatctatgctgtcttcagtatttttgctcttatctatggttgtcagtcgactctccaatgttggtgtcagtaactgtcagatgttgagtgtcttgaaaactttctgataattgtgggatttgctttgtaatggtaatcgtgaaattggtgtggttgtgttttggttgaatcaagagattctgccctgttattc

SEQ ID NO: 36861 - protein, 198 aa, Zea mays subsp. mays
LSPSAATPLPPPELVRVFSFFGGEISRGGTMLVYQDKLSGDELLSDSFPYRELENGVLWEVDGHWVVQGAVDVDIGANPSAEGGGDDEGVDDQAVKVVDIVDTFRLQEQPAFDKKQFISHMKRYIKNLSAKLEGDDLDAFKKNVESATKYLLSKLKDLQFFVGESMHDDGGVVFAYYKEGAADPTFLYFAHGLKEVKC

SEQ ID NO: 36862 - protein, 168 aa, Zea mays subsp. mays
MLVYQDKLSGDELLSDSFPYRELENGVLWEVDGHWVVQGAVDVDIGANPSAEGGGDDEGVDDQAVKVVDIVDTFRLQEQPAFDKKQFISHMKRYIKNLSAKLEGDDLDAFKKNVESATKYLLSKLKDLQFFVGESMHDDGGVVFAYYKEGAADPTFLYFAHGLKEVKC

SEQ ID NO: 36863 - DNA, 727 bp, Zea mays subsp. mays
agtgttttctagtgactcggaaaggaaagcgtgactcgctctgaagactcagtgagggctctgtgatcggagttgtaaaaatgtcgacggtggtagatcggagtgtatcgacgctgaatccaaacgcgccggcgttcgatccggtgggattccgtgaggtagaggatttctctcccaagtggtgggagctggtgacaacatccaagtggttccgtgacttctggctcagtgccaactcggaggagtatgagttcggcgagttctcagatatggaggacgagttcgaggagctagtcatgacgtcatccggtgagaatgagatggatggatcttcggtgagagaatcagatgttgggaggtacttgaaggtgcttctgagcatggcgaagtctacgaaagggaagctttacagatctaatgtgtcttgttctgccaagtataaccagaagaagatgaacccaaacttctactgtcgccggaaccatcacatctatcagcctcggtgaaaaggttgcagcagcgtctgggaaagaaataaaagctcatctctaaatctcttgtgttttcatgaatgagatactctcatctttacttcttgttctgtactacttgttcctctgattatgtgaatattcttctgttttgtgctttgcgtttatcaaaataatttcgcatagaaaaaaaaaaaaaaaaaagcttatcgataccgtcgacctcgagggggggc

SEQ ID NO: 36864 - protein, 141 aa, Zea mays subsp. mays
MSTVVDRSVSTLNPNAPAFDPVGFREVEDFSPKWWELVTTSKWFRDFWLSANSEEYEFGEFSDMEDEFEELVMTSSGENEMDGSSVRESDVGRYLKVLLSMAKSTKGKLYRSNVSCSAKYNQKKMNPNFYCRRNHHIYQPR

SEQ ID NO: 36865 - protein, 78 aa, Zea mays subsp. mays
MEDEFEELVMTSSGENEMDGSSVRESDVGRYLKVLLSMAKSTKGKLYRSNVSCSAKYNQKKMNPNFYCRRNHHIYQPR

SEQ ID NO: 36866 - DNA, 701 bp, Zea mays subsp. mays
aataaacacaaaagagttcttcaacgacgagattgagaaacgagaaacgacgatggcgacgaatctcctgaaactctcctctcaaatccgccgcctctctccactcaccagatccctaaccgtccgcacctccgccacatccaccggatcgaagaaagtctccgaccgaatcgtcaagctctccgcgatcgatgccgacggggacaagaaggacatcatcgggctctccgggcagactctcctccgcgcgctcacccacaccggattgatcgatccgctctcgcatcgcttggaggacatcgacgcttgctcggcggagtgcgaggtccagatcgccgaggagtggctcgagaagctcccgccgcgtacctacgacgaggagtacgtgctgaagcgtaactcgagatcacgtgtgctgaacaagcactcgcgtctcgggtgtcaggttgtgttgacgcaggagcttcaaggtatggttgtggctgtccctgaggccaagccttgggacatcccgtaagtgtagtaggtctttatttgttgtttgggaataaatcgctttggaaaaaggattatgataatgaatctgtgatcttccattttgaaactttattgtaatgtggttgaagaacttgcttgttttaacgattcccctgcttcgagtatgggtttgcattttaattgaatattgctttcttggtttt

SEQ ID NO: 36867 - protein, 171 aa, Zea mays subsp. mays
INTKEFFNDEIEKRETTMATNLLKLSSQIRRLSPLTRSLTVRTSATSTGSKKVSDRIVKLSAIDADGDKKDIIGLSGQTLLRALTHTGLIDPLSHRLEDIDACSAECEVQIAEEWLEKLPPRTYDEEYVLKRNSRSRVLNKHSRLGCQVVLTQELQGMVVAVPEAKPWDIP

SEQ ID NO: 36868 - protein, 154 aa, Zea mays subsp. mays
MATNLLKLSSQIRRLSPLTRSLTVRTSATSTGSKKVSDRIVKLSAIDADGDKKDIIGLSGQTLLRALTHTGLIDPLSHRLEDIDACSAECEVQIAEEWLEKLPPRTYDEEYVLKRNSRSRVLNKHSRLGCQVVLTQELQGMVVAVPEAKPWDIP

SEQ ID NO: 36869 - DNA, 646 bp, Zea mays subsp. mays
agaacatcctaatcgaaaagaagagtgtggaagcgtctcgttctcttttcttgcttgtttcccaagaaggagaaggagaagagcggcggcgtctgatctcgtcggcggcggcgatggcggcgattcggcgtctgatcccgtccttcaaccgggtgctggtggagaaggtggtgcagcccaagaagagcgccggcggcatcctcctcccggagacctccaagcagctgaactctggtaaggtcatagctgttggccctggcagccgtgacaaggaagggaagctgatccctgttgctctcaaggaaggtgaccatgtgctcctgcctgagtatggtggtcttgaagtcaagcttgctcctgagaaagagtacctcctctacagagacgatgacattctgggcaccctccacgagtgattcagatggtgcggaagtcatcagctgctttaatgcaggaggagaggatgttagagtttccatgttatcggataaacctgaagtagaactctcttttatggtgtgatgatagacttatatgattgttgccagactttctgtcgtgatgcagttcagtaaacttgcagctgaagtgctgccttaattttcgtcaaattacttccctggctgctaagccttgcgttatttgg

SEQ ID NO: 36870 - protein, 137 aa, Zea mays subsp. mays
NILIEKKSVEASRSLFLLVSQEGEGEERRRLISSAAAMAAIRRLIPSFNRVLVEKVVQPKKSAGGILLPETSKQLNSGKVIAVGPGSRDKEGKLIPVALKEGDHVLLPEYGGLEVKLAPEKEYLLYRDDDILGTLHE

SEQ ID NO: 36871 - protein, 100 aa, Zea mays subsp. mays
MAAIRRLIPSFNRVLVEKVVQPKKSAGGILLPETSKQLNSGKVIAVGPGSRDKEGKLIPVALKEGDHVLLPEYGGLEVKLAPEKEYLLYRDDDILGTLHE

SEQ ID NO: 36872 - protein, 78 aa, Zea mays subsp. mays
EHPNRKEECGSVSFSFLACFPRRRRRRAAASDLVGGGDGGDSASDPVLQPGAGGEGGAAQEERRRHPPPGDLQAAELW

SEQ ID NO: 36873 - DNA, 619 bp, Zea mays subsp. mays
attgaaaattagattttgtccggtggagaagatgggagcagaaacggtcgtggaagctgagaaaattgacgacttgctcgaggcagctagatacaatgatatagatgatctcaaaagcttggcctttgatggtgtctctcttaactctcgcgattcccaaggccgaacagcgcttcatatggccgcggcgaatggacatatgagtatagtggagtatctgatcagtcaaggagtggatattaacgctctgaacgaggagaacaatgctcctctgcattgggcttgtttgaatggccatatcgaggttgtgaagaaaatgatcttggcaggagccagtcttagtcttttgaatcggtacgagcggactcccatggacgaagctattggtgcagggaagatggagattatagatgctatcaacacaactgttacacaaatggaacttgaaaacaccactgtagcctgactttaatggcgtcttcctaaatgcttgttgtctctctctctctctgtagtttacagcgtagtttttataatgtggaagttttgcgttgttatgtagactgatggttagaactggaatcatctgaaatcgaattctaccaaaaagattattgcc

SEQ ID NO: 36874 - protein, 154 aa, Zea mays subsp. mays
LKIRFCPVEKMGAETVVEAEKIDDLLEAARYNDIDDLKSLAFDGVSLNSRDSQGRTALHMAAANGHMSIVEYLISQGVDINALNEENNAPLHWACLNGHIEVVKKMILAGASLSLLNRYERTPMDEAIGAGKMEIIDAINTTVTQMELENTTVA

SEQ ID NO: 36875 - protein, 144 aa, Zea mays subsp. mays
MGAETVVEAEKIDDLLEAARYNDIDDLKSLAFDGVSLNSRDSQGRTALHMAAANGHMSIVEYLISQGVDINALNEENNAPLHWACLNGHIEVVKKMILAGASLSLLNRYERTPMDEAIGAGKMEIIDAINTTVTQMELENTTVA

SEQ ID NO: 36876 - protein, 95 aa, Zea mays subsp. mays
MAAANGHMSIVEYLISQGVDINALNEENNAPLHWACLNGHIEVVKKMILAGASLSLLNRYERTPMDEAIGAGKMEIIDAINTTVTQMELENTTVA

SEQ ID NO: 36877 - DNA, 614 bp, Zea mays subsp. mays
ataacacaagcttagaatcataaaaccaactaagtctccttattttcttatcacaagacaaaagagaaaagcaaaagacaatggcttcggctctgagttttttcacatgccttgttttgactgtgtgcatagttgcatcagtagatgcagcaatctcatgtggcacagtgactagtaacttggctccatgtgccgtctatctaatgaaaggcgggccggtgccagctccatgctgcgccggagtttcaaaattgaacagtatggctaaaaccacaccggaccgccaacaagcatgtaaatgcctaaagaccgctgcaaagaacgtcaatccaagtctagcctctagccttcctggaaagtgcggtgttagcattccctatcccatctccatgagcactaactgcgacaccgtcaagtgaaatgggaactcatatatcatcgtgaggatgaacagtatggtctagcataaataaaagagtgtctatctacactgacctcagcatgtcctagtttgtcttgtttttattttgcagtcgaaagtttgtcatattactttgtaatcttttgctttatattgtgtcttaatgatgtttaagatatgataatattatcct

SEQ ID NO: 36878 - protein, 112 aa, Zea mays subsp. mays
MASALSFFTCLVLTVCIVASVDAAISCGTVTSNLAPCAVYLMKGGPVPAPCCAGVSKLNSMAKTTPDRQQACKCLKTAAKNVNPSLASSLPGKCGVSIPYPISMSTNCDTVK

SEQ ID NO: 36879 - protein, 71 aa, Zea mays subsp. mays
MKGGPVPAPCCAGVSKLNSMAKTTPDRQQACKCLKTAAKNVNPSLASSLPGKCGVSIPYPISMSTNCDTVK

SEQ ID NO: 36880 - DNA, 651 bp, Zea mays subsp. mays
gaagaagctacaagttaagaggaagaggaagaggaagaggaagcagaggaataatggagtcaccgaagaagatagctcatgagatcggtggtgtgaagagagacgctcttcgatttggtctcaacggcgttaagagcgacatcgtcggatctcacccgctcgaatcctcttacgaatctgagaagagatctcatgaggcgatgaagaggacgatcattgggcatacctacgggactgcacttcctttgaagatggatatggacaggcagattctctctcggtttcaaagaccggctggaccaattccgtcatctatgctcggtttagaagtctacacaggagccattgatgactttggttttgaggattacttgaatgaccctcgtgactcggagactgtcaggccagtagacttccaccacgagatggaagttcgtcttggcatgtcaaagggcccggttgccccaagtttcatttaaggccctcatcatggtcgtggtttattacatgttatgtcttctttagcttttgaatgatgaatcaagtggaatcgtgtatgaacgtcttttgacatgtactctcttcaagtgtgatgtctgatgagacaactactgaatatggtcaatcaattctagtatgttaggttttgcg

SEQ ID NO: 36881 - protein, 158 aa, Zea mays subsp. mays
RSYKLRGRGRGRGSRGIMESPKKIAHEIGGVKRDALRFGLNGVKSDIVGSHPLESSYESEKRSHEAMKRTIIGHTYGTALPLKMDMDRQILSRFQRPAGPIPSSMLGLEVYTGAIDDFGFEDYLNDPRDSETVRPVDFHHEMEVRLGMSKGPVAPSFI

SEQ ID NO: 36882 - protein, 141 aa, Zea mays subsp. mays
MESPKKIAHEIGGVKRDALRFGLNGVKSDIVGSHPLESSYESEKRSHEAMKRTIIGHTYGTALPLKMDMDRQILSRFQRPAGPIPSSMLGLEVYTGAIDDFGFEDYLNDPRDSETVRPVDFHHEMEVRLGMSKGPVAPSFI

SEQ ID NO: 36883 - protein, 92 aa, Zea mays subsp. mays
MKRTIIGHTYGTALPLKMDMDRQILSRFQRPAGPIPSSMLGLEVYTGAIDDFGFEDYLNDPRDSETVRPVDFHHEMEVRLGMSKGPVAPSFI

SEQ ID NO: 36884 - DNA, 737 bp, Zea mays subsp. mays
aggatggctcgataccttgcaaacaaatgttccattgcttcacgtattgactgctattcagatatgagtagctccatttttggtgagaagctgcgtgaacaagttgaggagaggctagatttctacgataagggtgttgcaccccgcaagaaccttgatgtgatgaaagctgctattgatggcttgacaaacacagaggatgatgacggcaaagagaatggtgacgcatctgtgaagaaaagcaagaagtccaaagctgaggctaacagtgacgcgatggacgttgagaatgccgcaacagaagctgaaactggaaccgagaagaagaagaaaaagaagcacaagcttgaggagccgcaggatgtggagatgcaagccaatggcgatgatgagacccctaagaagaagaaaaagaagaaccgcgacgccgagtctgttgatcctaagacgggcaccgaggggaaatccaagaaaaagaagaagaaatccaaggctgatgacgacgagtagtagattagtacctaagtacctagcagcgagtgttcaagtcgattgaggatgaaattttttgtaccgactgtttatgtgtgtactgtttgagcctctttgagcccttgacgaggtctgtaatgtagcttcatggactgaagcggcgtatctgtaatacatttgatgttgcagtatgtcgtttcttggggatggcttagctttcctatataaatggaatggcattgttg

SEQ ID NO: 36885 - protein, 169 aa, Zea mays subsp. mays
RMARYLANKCSIASRIDCYSDMSSSIFGEKLREQVEERLDFYDKGVAPRKNLDVMKAAIDGLTNTEDDDGKENGDASVKKSKKSKAEANSDAMDVENAATEAETGTEKKKKKKHKLEEPQDVEMQANGDDETPKKKKKKNRDAESVDPKTGTEGKSKKKKKKSKADDDE

SEQ ID NO: 36886 - protein, 168 aa, Zea mays subsp. mays
MARYLANKCSIASRIDCYSDMSSSIFGEKLREQVEERLDFYDKGVAPRKNLDVMKAAIDGLTNTEDDDGKENGDASVKKSKKSKAEANSDAMDVENAATEAETGTEKKKKKKHKLEEPQDVEMQANGDDETPKKKKKKNRDAESVDPKTGTEGKSKKKKKKSKADDDE

SEQ ID NO: 36887 - protein, 148 aa, Zea mays subsp. mays
MSSSIFGEKLREQVEERLDFYDKGVAPRKNLDVMKAAIDGLTNTEDDDGKENGDASVKKSKKSKAEANSDAMDVENAATEAETGTEKKKKKKHKLEEPQDVEMQANGDDETPKKKKKKNRDAESVDPKTGTEGKSKKKKKKSKADDDE

SEQ ID NO: 36888 - DNA, 683 bp, Zea mays subsp. mays
agtttatctctctctctgttgcaatgtcgaagagcggaagatattgcttaggatcaatggaagacatccgagcagtattccagcgcttcgacaaaaacggagacgggaaaatctccatcgacgagctcaaagacgtgatcggagctctcagtcccacggcgtcgccggaagaaacgacgttgatgatgaaagagttcgatctcgacggtaacggatacatcgacatggacgagttcgttgctctgttccaaaccgaagacggtggcgatattcgagatctgaaggaagcgtttgatctgtacgatttggatggaaacggacggatctctgtgaacgagcttcactcggtgatgaagaatctcggcgagaagtgttcggttgaggattgcaagaggatcattagcaaagttgatgctgacggtgacggttgtgttaactttgaagagtttaagaagatgatgatgaacggcagagctactgcttgacttaacggcgaggaatcgtttccttttttttttttttgtatatattcaatttttagttttaggttttatcgattaaactggattaatctttgtttttcctttggttttttaatcttatggattaattagggatttttatttcttaattgtaaggtttaatcgatttttttattttaataattatttattagtatggtt

SEQ ID NO: 36889 - protein, 160 aa, Zea mays subsp. mays; identical to SEQ ID NO: 30464

SEQ ID NO: 36890 - protein, 153 aa, Zea mays subsp. mays; identical to SEQ ID NO: 30465

SEQ ID NO: 36891 - protein, 142 aa, Zea mays subsp. mays; identical to SEQ ID NO: 30466

SEQ ID NO: 36892 - DNA, 589 bp, Zea mays subsp. mays
atcgactccaaaacccatctctcaaaattctcaatttcagttcactctatagctcaaatggcgactcctcaatcctcaaccagaccaacccaccaaaacccacaacccaatttccacgacctcttccccgccatggccggaaaactcggaggagaaggtctaatcgacgagctctgcaaaggcttcgagctcctcatggacggagacaaaggagtcatcactttcgagagcttgcggcgaaacgcatcagcggttcttggactcggagatctgacggacgacgatgtaaggtgtatgatcgacgaaggggatttcgatcgagacggtgcgttgaatcagatggagttttgtgtgctcatgtttaggctaagccctgacttgatggatgcgtcacgctttgtcgtcacggaggcgatcgaggaggagtttggtgaccgaacgcatgggcattgatatccttctttctccatcagagactttgacttaagtttgtttaacccttttatgtttttcttatcctttcgattattgttgcaattcgtataaaattcttggatattatatcaaccgatatggaaaaaattcattg

SEQ ID NO: 36893 - protein, 150 aa, Zea mays subsp. mays
IDSKTHLSKFSISVHSIAQMATPQSSTRPTHQNPQPNFHDLFPAMAGKLGGEGLIDELCKGFELLMDGDKGVITFESLRRNASAVLGLGDLTDDDVRCMIDEGDFDRDGALNQMEFCVLMFRLSPDLMDASRFVVTEAIEEEFGDRTHGH

SEQ ID NO: 36894 - protein, 131 aa, Zea mays subsp. mays
MATPQSSTRPTHQNPQPNFHDLFPAMAGKLGGEGLIDELCKGFELLMDGDKGVITFESLRRNASAVLGLGDLTDDDVRCMIDEGDFDRDGALNQMEFCVLMFRLSPDLMDASRFVVTEAIEEEFGDRTHGH

SEQ ID NO: 36895 - protein, 120 aa, Zea mays subsp. mays
RLQNPSLKILNFSSLYSSNGDSSILNQTNPPKPTTQFPRPLPRHGRKTRRRRSNRRALQRLRAPHGRRQRSHHFRELAAKRISGSWTRRSDGRRCKVYDRRRGFRSRRCVESDGVLCAHV

SEQ ID NO: 36896 - DNA, 588 bp, Zea mays subsp. mays
agaacatcctaatcgaaaaggattaggttttaacttttatacatctcgtcgcgcaaacaacgaatcgagataaaaaaaaatggcgatgagaagagtatacagcgagatcaaaggcaagaaggtgaaggagcttcctgcctatttcaaatcgtcgttttcaacgcagtccgtgaagacgtatgtgaagaaaggtctcgataactacaacgacaagtacatccagaccagctccgtccagcctctcctccatatctgcttcggaggcatggccttctcttacctcgtcgctctccccaacgagcgtcgccacctcgagcaccagcagcatgccaaggagcacggtggccattgatctccagatgttggtttctgcgatgttggtgactgagcattgcacgtcttgttttttttcttcttgattctcctggattgatattattgttgatctaaaggaaaacctttttttttttttttttcaaaactgatggttgatattgatgaataatgaaactgttgttttcttttgatcgtaataagctgtggattcggcattttgttttgtcttatttaagtgtttcagtttgatct

SEQ ID NO: 36897 - protein, 90 aa, Zea mays subsp. mays; identical to SEQ ID NO: 17333

SEQ ID NO: 36898 - protein, 88 aa, Zea mays subsp. mays; identical to SEQ ID NO: 17334

SEQ ID NO: 36899 - DNA, 1020 bp, Zea mays subsp. mays
gtacagatgcttctccctcctcctcctctagaaacttctcccatggcggcttcttctgctctctcctcaccagcgcttctctccaacaaccgctctcctccgtcatgcggctccgtcagacgctcgatctcctcctccccggtgctcatcgctactcccagatcgtctcgtttgagcttcacaatacctgagaggagaagcctcgtcgtgaaatcaaccgtcggcgaggtctcctttcgcgaaccggcaacatcgggagataaggagggaatcgaatcgctgaaactcaaattactgagggtggtttcgggtttgaacagaggacttgtggcgagtgtagatgatctacaaagtgctgaggccgctgctaaattacttgaagccgctggtgggcctgtggatctaaccaatgatcttgacaaactccaagggaaatggaggctgctgtatagcagcgccttctcttctcgctctttaggtggtagccgtcctggtctacccactggtcgcttgattcccgtcactcttggccaggtgtttcagaggattgatgtgtttagcaaagatttcgataacattgccgaagtggagttaggagctccttggccgtttcctcctctggaagccactgcaacactggcacacaaattcgaactcttaggtacttgcaagatcaagatcacatttgagaaaacaactgtgaagacatcgggaaacttagcgcagattcctccgtttgagatcccgaggcttcccgatagtttcaggccaccgtctaaccctggaactggagattttgaagtcacctatgttgatgagaacatgcgcataactcgtggggatagaggtgaacttagggtctttgtcattgcttaagtcaaaaggaggtttgacatgtaaagatcaagtactttctgcttgttgcagcagccttatgacccctatgagttttgtacacatcgtttgaacgttgattatagatgtattttataatgaagtgaatgtcagttatgcttagtg

SEQ ID NO: 36900 - protein, 291 aa, Zea mays subsp. mays
VQMLLPPPPLETSPMAASSALSSPALLSNNRSPPSCGSVRRSISSSPVLIATPRSSRLSFTIPERRSLVVKSTVGEVSFREPATSGDKEGIESLKLKLLRVVSGLNRGLVASVDDLQSAEAAAKLLEAAGGPVDLTNDLDKLQGKWRLLYSSAFSSRSLGGSRPGLPTGRLIPVTLGQVFQRIDVFSKDFDNIAEVELGAPWPFPPLEATATLAHKFELLGTCKIKITFEKTTVKTSGNLAQIPPFEIPRLPDSFRPPSNPGTGDFEVTYVDENMRITRGDRGELRVFVIA

SEQ ID NO: 36901 - protein, 289 aa, Zea mays subsp. mays
MLLPPPPLETSPMAASSALSSPALLSNNRSPPSCGSVRRSISSSPVLIATPRSSRLSFTIPERRSLVVKSTVGEVSFREPATSGDKEGIESLKLKLLRVVSGLNRGLVASVDDLQSAEAAAKLLEAAGGPVDLTNDLDKLQGKWRLLYSSAFSSRSLGGSRPGLPTGRLIPVTLGQVFQRIDVFSKDFDNIAEVELGAPWPFPPLEATATLAHKFELLGTCKIKITFEKTTVKTSGNLAQIPPFEIPRLPDSFRPPSNPGTGDFEVTYVDENMRITRGDRGELRVFVIA

SEQ ID NO: 36902 - protein, 277 aa, Zea mays subsp. mays
MAASSALSSPALLSNNRSPPSCGSVRRSISSSPVLIATPRSSRLSFTIPERRSLVVKSTVGEVSFREPATSGDKEGIESLKLKLLRVVSGLNRGLVASVDDLQSAEAAAKLLEAAGGPVDLTNDLDKLQGKWRLLYSSAFSSRSLGGSRPGLPTGRLIPVTLGQVFQRIDVFSKDFDNIAEVELGAPWPFPPLEATATLAHKFELLGTCKIKITFEKTTVKTSGNLAQIPPFEIPRLPDSFRPPSNPGTGDFEVTYVDENMRITRGDRGELRVFVIA

SEQ ID NO: 36903 - DNA, 683 bp, Zea mays subsp. mays
gaaaactctcgcatcccaccaccaagctccagacgcctcctcctcctcccccgccgccgccgcactctccagagaccgcaggcatgggcgtcttcactttcgtgtgccgcgactccggcgccgagtggtcggccaagcagcacaagggcgagctcgaggcctccgccgccaccccctacgacctgcagcgccagctcgtgtccgccgcctgcgccgaggacaagtccggtggcgtccagtcctccttcaccatggtctcccccaagtccgccatcttccaggtggtcattggtggcgcctctgctggtccgatcggtggtggtgctgctgcaggtggtgccgctgcatcaggtggagctgccgccgaggcccccaaggctgaggagaagaaggaagaggagaaggaggagagcgaggatgaccttggcttctccctcttcgattagatcttctttaccctgttgcttgccagaaatgacatggtcctattgccgcagtaattttgatgccatgcccacagggtttgtgaacctgcctagtttgattgtcaagggatgtatgtggtactttctgttcatgtgaggatttggttatgttattatgcaggaatatcctaatatggctttagtcttgccagttcacaaaaaaaaaaaaaaaaaaacttatcgataccgtcgacctcg

SEQ ID NO: 36904 - protein, 193 aa, Zea mays subsp. mays
ENSRIPPPSSRRLLLLPRRRRTLQRPQAWASSLSCAATPAPSGRPSSTRASSRPPPPPPTTCSASSCPPPAPRTSPVASSPPSPWSPPSPPSSRWSLVAPLLVRSVVVLLQVVPLHQVELPPRPPRLRRRRKRRRRRARMTLASPSSIRSSLPCCLPEMTWSYCRSNFDAMPTGFVNLPSLIVKGCMWYFLFM

SEQ ID NO: 36905 - protein, 147 aa, Zea mays subsp. mays
KLSHPTTKLQTPPPPPPPPPHSPETAGMGVFTFVCRDSGAEWSAKQHKGELEASAATPYDLQRQLVSAACAEDKSGGVQSSFTMVSPKSAIFQVVIGGASAGPIGGGAAAGGAAASGGAAAEAPKAEEKKEEEKEESEDDLGFSLFD

SEQ ID NO: 36906 - protein, 126 aa, Zea mays subsp. mays
KTLASHHQAPDASSSSPAAAALSRDRRHGRLHFRVPRLRRRVVGQAAQGRARGLRRHPLRPAAPARVRRLRRGQVRWRPVLLHHGLPQVRHLPGGHWWRLCWSDRWWCCCRWCRCIRWSCRRGPQG

SEQ ID NO: 36907 - protein, 120 aa, Zea mays subsp. mays
MGVFTFVCRDSGAEWSAKQHKGELEASAATPYDLQRQLVSAACAEDKSGGVQSSFTMVSPKSAIFQVVIGGASAGPIGGGAAAGGAAASGGAAAEAPKAEEKKEEEKEESEDDLGFSLFD

SEQ ID NO: 36908 - DNA, 1516 bp, Zea mays subsp. mays
gtagtgtggatccatccccacacggccctcgccaaatctactcctccagtcggcaggaaaggaaccctctctacctcggaggctcggacagagtgaacgcgccacccgccccggcgagcattgtccgctgccgcgcgccaccttccgctcacgggtgcatttgatccgtcccggccgcctacacgatgtccaagtcgggagcgctggatcttgcttctggcctcggagggaagatcaacaaggtggaagtcaagtcggccgtcgatgagtatgagaaatatcatggatactatggagggaaggaggaagcaaggaagtccaactatactgatatggttaataaatactatgatcttgccactagcttctatgagtatggttggggtgaatccttccactttgctcacagatggaatggagaatccttacgtgaaagcatcaagcgacatgagcattttcttgccctgcaacttggtttgaaaccaggaatgaaggttttagatgtgggctgtggaataggtggaccgctgagagaaattgcaagatttagctcaacttcagttacgggattgaataacaacgaataccagataaccaggggaaaggagctcaaccgtttagcaggaattagtggaacatgtgattttgtcaaggcagacttcatgaagatgccgttcgatgacaacacttttgatgctgtttatgccattgaggcaacatgtcatgcacctgatccagttggttgctacaaggagatatatcgtgtgttgaagcctggccagtgctttgccgtgtacgagtggtgcattacggatcactatgatcctaacaatgcaacccacaaaaggatcaaggatgaaattgagcttggcaatggcctgccagatatcagaagcactcggcaatgtctccaggcagtaaaagacgccgggtttgaggttgtttgggataaggatcttgctgaagattctcccttgccttggtacttgcccttggatccaagccgattctccctgagtagcttccgtttgacttctgtgggacgcatgattacccgcacaatggtcaaggccctggagtacgttggtcttgctccgcagggcagtgagagggtctctaatttcctggagaaggctgcagaagggctggtagagggcggaaagaaggagatcttcacgccaatgtacttctttcttgttcggaagcctcttctggaatgagctcttggatcaccttttcagagagagaaggcaagtggccatttcgaagaagccgaggagggggaacctggaaccaagaataccttcagctctcctgtgtaggaggaaagttaacgaacagtgtagtaactgttcagctttgtgtttattcagttgttttgctgcttgaggtcattcgtttctaggtgggggttggaatccttttcgccataaacctctcagtggcataaataagattgtttgcataagagtacttcatggataccgtaagggctactactgaaagagaaatattt

SEQ ID NO: 36909 - protein, 344 aa, Zea mays subsp. mays
MSKSGALDLASGLGGKINKVEVKSAVDEYEKYHGYYGGKEEARKSNYTDMVNKYYDLATSFYEYGWGESFHFAHRWNGESLRESIKRHEHFLALQLGLKPGMKVLDVGCGIGGPLREIARFSSTSVTGLNNNEYQITRGKELNRLAGISGTCDFVKADFMKMPFDDNTFDAVYAIEATCHAPDPVGCYKEIYRVLKPGQCFAVYEWCITDHYDPNNATHKRIKDEIELGNGLPDIRSTRQCLQAVKDAGFEVVWDKDLAEDSPLPWYLPLDPSRFSLSSFRLTSVGRMITRTMVKALEYVGLAPQGSERVSNFLEKAAEGLVEGGKKEIFTPMYFFLVRKPLLE

SEQ ID NO: 36910 - protein, 295 aa, Zea mays subsp. mays
MVNKYYDLATSFYEYGWGESFHFAHRWNGESLRESIKRHEHFLALQLGLKPGMKVLDVGCGIGGPLREIARFSSTSVTGLNNNEYQITRGKELNRLAGISGTCDFVKADFMKMPFDDNTFDAVYAIEATCHAPDPVGCYKEIYRVLKPGQCFAVYEWCITDHYDPNNATHKRIKDEIELGNGLPDIRSTRQCLQAVKDAGFEVVWDKDLAEDSPLPWYLPLDPSRFSLSSFRLTSVGRMITRTMVKALEYVGLAPQGSERVSNFLEKAAEGLVEGGKKEIFTPMYFFLVRKPLLE

SEQ ID NO: 36911 - protein, 243 aa, Zea mays subsp. mays
MKVLDVGCGIGGPLREIARFSSTSVTGLNNNEYQITRGKELNRLAGISGTCDFVKADFMKMPFDDNTFDAVYAIEATCHAPDPVGCYKEIYRVLKPGQCFAVYEWCITDHYDPNNATHKRIKDEIELGNGLPDIRSTRQCLQAVKDAGFEVVWDKDLAEDSPLPWYLPLDPSRFSLSSFRLTSVGRMITRTMVKALEYVGLAPQGSERVSNFLEKAAEGLVEGGKKEIFTPMYFFLVRKPLLE

SEQ ID NO: 36912 - DNA, 857 bp, Zea mays subsp. mays
atacatagtggatatagccagagagaaagtaggacgtgttcttaaccttggagctattgaaggaggtgctaatgcttggaaaaacatggacgttcttgtcttcaattcttggcattggtggactcacaaaggcaattctcaagggtgggattacattagagatgggtcgtctttggtgagagacatgaaccgtcttgatgctttctacaaaggacttagcacttggggtcgatgggttgaccaaaacgtcgataccaccaaaaccaaagttttcttccaaggcatttctcccactcactacgagggaagggaatggaacgagccgagaaaaagttgtactgggcaaatgcagccgttgggtggatcaaattacccaagtggccagcctgcatctgcaggagttgtgtccaaagtgttgggagcgatgaaaacgcgtgtgtccttgcttgatatcaccacgctatctcagctgagaaaagatgctcatccttctacttatggtggcgatggaggaaatgattgcagccactggtgccttcccgggttgccagatacttggaaccaacttctctacgcagctttgttcatgtgaatttgaacaatacatctttacaaagaaagtgcaaacacacctttgttctgtaattacattcttggaggtgcaaagaagctgacagttttactttgggggtggtctttaagtgaagactaggagcataaggaagatggattgtaaagcgccttttatttatattgttttcgtatgggatgaaaacaataatctaaaaatttgtctaattaaatattgtgtgatgttatagaaagaaattaataaacaaaggagacattctaagtct

SEQ ID NO: 36913 - protein, 196 aa, Zea mays subsp. mays
YIVDIAREKVGRVLNLGAIEGGANAWKNMDVLVFNSWHWWTHKGNSQGWDYIRDGSSLVRDMNRLDAFYKGLSTWGRWVDQNVDTTKTKVFFQGISPTHYEGREWNEPRKSCTGQMQPLGGSNYPSGQPASAGVVSKVLGAMKTRVSLLDITTLSQLRKDAHPSTYGGDGGNDCSHWCLPGLPDTWNQLLYAALFM

SEQ ID NO: 36914 - protein, 168 aa, Zea mays subsp. mays
MDVLVFNSWHWWTHKGNSQGWDYIRDGSSLVRDMNRLDAFYKGLSTWGRWVDQNVDTTKTKVFFQGISPTHYEGREWNEPRKSCTGQMQPLGGSNYPSGQPASAGVVSKVLGAMKTRVSLLDITTLSQLRKDAHPSTYGGDGGNDCSHWCLPGLPDTWNQLLYAALFM

SEQ ID NO: 36915 - protein, 135 aa, Zea mays subsp. mays
MNRLDAFYKGLSTWGRWVDQNVDTTKTKVFFQGISPTHYEGREWNEPRKSCTGQMQPLGGSNYPSGQPASAGVVSKVLGAMKTRVSLLDITTLSQLRKDAHPSTYGGDGGNDCSHWCLPGLPDTWNQLLYAALFM

SEQ ID NO: 36916 - DNA, 732 bp, Zea mays subsp. mays
atccaatctcgtttccaaggaaggaaggaagaaaatccagagaaactccagagaagaagaagaagaaggtcgacgacgatggcggtgttggtggagctgaccaaggagtacggctacgtggtgctcaccgtggtggcctacgccttcctcaacttctggatgagcttccaggtcggcgccgcccgcaagaagtacaaggtgttctaccccacgctgtacgccatcgagtcggagaacaaggacgccaagcgcttcaactgcgtccagagggggcaccagaactcgctggagatgatgccgctcttcttcgtcacggtgctgctcggtggcctgcagcacccggtggtcgccgccgcgctgggggtcctctacacagtcgccaggttcttctacttcaagggctacgccaccggcgtcccggacaaccgcctcaagcttggggggctcaacttcttggcgatcatcgggctgatcctctgcacggcgtccttcggcatcaaccttgtcatcagggaggcgatctgaggctccggactgatgtgcctgacttgataggcgtttgtgactcgagtcatttagacatggcggtggtgtcttttatagtgtccaaaaatgtgtgtgcctctgttttactctcacagaataaagctagatggagacggtttgtaacatcgaggttttgtagcttttgcagcacagttttaaatatggaggtgaatctccttccaattt

SEQ ID NO: 36917 - protein, 243 aa, Zea mays subsp. mays
PISFPRKEGRKSRETPEKKKKKVDDDGGVGGADQGVRLRGAHRGGLRLPQLLDELPGRRRPQEVQGVLPHAVRHRVGEQGRQALQLRPEGAPELAGDDAALLRHGAARWPAAPGGRRRAGGPLHSRQVLLLQGLRHRRPGQPPQAWGAQLLGDHRADPLHGVLRHQPCHQGGDLRLRTDVPDLIGVCDSSHLDMAVVSFIVSKNVCASVLLSQNKARWRRFVTSRFCSFCSTVLNMEVNLLPI

SEQ ID NO: 36918 - protein, 174 aa, Zea mays subsp. mays
IQSRFQGRKEENPEKLQRRRRRRSTTMAVLVELTKEYGYVVLTVVAYAFLNFWMSFQVGAARKKYKVFYPTLYAIESENKDAKRFNCVQRGHQNSLEMMPLFFVTVLLGGLQHPVVAAALGVLYTVARFFYFKGYATGVPDNRLKLGGLNFLAIIGLILCTASFGINLVIREAI

SEQ ID NO: 36919 - protein, 148 aa, Zea mays subsp. mays; identical to SEQ ID NO: 27005

SEQ ID NO: 36920 - DNA, 1174 bp, Zea mays subsp. mays
aagattagtcactcttcgcaagccaaaaaaaaaaaccccaaattgcggaaggataagcctcgccggcgacgaaatcagggtttcatcgaacaagaagatggctcacgcttgcgtctacacatcggcttcttcactcaggtttacagccggattcgtctccgcgagtcccaacgcctcctctttcgattctcagaagctttccctccctttcgagcctcttcgttcaagaaagacgaagaagttagttagcgtcagaaagaattggaagagctcgtctccgaaggctgtgtactccggcaatctctggacgccggagactccttcgcctcaaggagtttggtccatcagagatgatttacaagtcccttcttcgccgtattttcctgcgtacgctcaaggacaaggaccacctcctatggtgcaagagcgtttccagagtatcataagccagctcttccaatataggattattcgttgtggtggtgctgtggacgatgatatggccaacataatcgtagctcagcttctttaccttgatgctgttgatcctactaaggatattgtcatgtatgtgaactctcctggtggatcagttacagctggcatggctatattcgatactatgaggcatatccgacctgatgtctccactgtctgtgtcggtctagctgctagtatgggagcctttctgcttagtgctggaaccaaagggaaaagatacagtctgccaaactcaaggataatgatccatcagccgcttggtggagctcaaggtggccaaaccgatatcgacattcaggcaaatgaaatgctgcatcacaaggcaaacctaaacggttacctcgcttaccagactggtcaaagcctagagaagataaaccaggacacagaccgtgatttcttcatgagtgctaaagaagcaaaagattacgggcttatcgatggtgttatcatgaaccctcttaaggcccttcagccacttgcagcagcttgatcgcctgaaggtaatgtttcagcttgtcacttacattttggtgggccttttctgaacttagaatgaaaacaaatcagtagctgatacatacatgaacaagtaaagttttctttctctgctgtttgattgaataacaatgacattgtaatgttttgatcctttgtaatcgaattattggcc

SEQ ID NO: 36921 - protein, 330 aa, Zea mays subsp. mays
RLVTLRKPKKKTPNCGRISLAGDEIRVSSNKKMAHACVYTSASSLRFTAGFVSASPNASSFDSQKLSLPFEPLRSRKTKKLVSVRKNWKSSSPKAVYSGNLWTPETPSPQGVWSIRDDLQVPSSPYFPAYAQGQGPPPMVQERFQSIISQLFQYRIIRCGGAVDDDMANIIVAQLLYLDAVDPTKDIVMYVNSPGGSVTAGMAIFDTMRHIRPDVSTVCVGLAASMGAFLLSAGTKGKRYSLPNSRIMIHQPLGGAQGGQTDIDIQANEMLHHKANLNGYLAYQTGQSLEKINQDTDRDFFMSAKEAKDYGLIDGVIMNPLKALQPLAAA

SEQ ID NO: 36922 - protein, 298 aa, Zea mays subsp. mays
MAHACVYTSASSLRFTAGFVSASPNASSFDSQKLSLPFEPLRSRKTKKLVSVRKNWKSSSPKAVYSGNLWTPETPSPQGVWSIRDDLQVPSSPYFPAYAQGQGPPPMVQERFQSIISQLFQYRIIRCGGAVDDDMANIIVAQLLYLDAVDPTKDIVMYVNSPGGSVTAGMAIFDTMRHIRPDVSTVCVGLAASMGAFLLSAGTKGKRYSLPNSRIMIHQPLGGAQGGQTDIDIQANEMLHHKANLNGYLAYQTGQSLEKINQDTDRDFFMSAKEAKDYGLIDGVIMNPLKALQPLAAA

SEQ ID NO: 36923 - protein, 192 aa, Zea mays subsp. mays
MVQERFQSIISQLFQYRIIRCGGAVDDDMANIIVAQLLYLDAVDPTKDIVMYVNSPGGSVTAGMAIFDTMRHIRPDVSTVCVGLAASMGAFLLSAGTKGKRYSLPNSRIMIHQPLGGAQGGQTDIDIQANEMLHHKANLNGYLAYQTGQSLEKINQDTDRDFFMSAKEAKDYGLIDGVIMNPLKALQPLAAA

SEQ ID NO: 36924 - DNA, 1706 bp, Zea mays subsp. mays
actagatttttcttctttctgatcctcttaaggtttcagaatctgtactgccattttctcggtaaaatgggaacccgatttcaatccttcttgctcctgttcttgctttcttgtttaatctttatatcggcgacctcatccgagcaaaaaggtgatggaacccttagaattggattgaagaaaaggaaactaaaccgggccaacaggctagcttctcagctttttttgaaaaaccgagggtcttggtcgtccaaaggtttttttcacctgaacgatggcaattcggatactgttccccctaaaaattatttggatgctcaatattacggtgacattaccattggtactccacctcagaagtttactgccatctttgatactggaagctccaatctctggatgccatcttctaaatgctacctatcggttgcttgttattttcattcgaagtacacggctagcgagtcatcaacatacaaaaagaacggaaaacctgcgtcaatccgctatgggacaggtgctatatctggttacttcagcaatgatgatgttaaaattggtgatcttgttatcaaggatcaggagttcatagaggctactaatgagcctggtattacattcttggtagccaagtttgatggaatcctagggttgggattcaaagagatagctgttggaaattcaacaccggtttggtataacatggtagaaaaaggtctggttaaggaacagattttttcgttttggcttaaccgcaacccgcaagatcaagaaggtggtgagattgtctttggcggagtcgatcctaagcacttcaaaggagagcatacttatgttcccgtgacacgtaaaggttactggcaatttgacatgggtgatctccacattgctggcaaaccaacaggatactgttctaatggttgttctgccattgctgattctggaacttctctactcaccggtccaacgagtgtcatcacaatgatcaatcatgcgattggagcagtaggagtcgcaagcaaagagtgcaaaaccgtcataggtcaatatggaaaaaccatgttgaactcccttttatctcaggcggatcctaggaaggtatgctcacagataggactctgcggtttcaatgagagaatggggattaagtcagttctagacgatggaacatcagatcttataaacgaagcgatgtgcagcgtttgtgaaatggcaaccgtgtggatgcagagtgaattgaatcagaatgaaacacaagaacgtatactctcttatgctgctgagctatgtgaccatataccaagtccgaaccaacaatcagcagtgaactgcgagaaggtttcgtcgatgcctatagtcacattcaccattggtggcaaaccctttgatctctcacctcaagattatatattcaagattggggatggagttcagtctcagtgcaccagtggtttcactgccatggacatccctccacctcgtggacctctctggatcttgggtgatatattcatgggaccataccatactgtgttcgattatgggaaagcaagagttggattcgccaaatctgcttaaagaaagatcaaaaccctttgttaatatgatgtttgtgaatgtgtttaaatcttaaatggttgtaataacttaaaagcattgctatcctagaatggtgtatcatcttaaatacatattcttaagctttt

SEQ ID NO: 36925 - protein, 525 aa, Zea mays subsp. mays
TRFFFFLILLRFQNLYCHFLGKMGTRFQSFLLLFLLSCLIFISATSSEQKGDGTLRIGLKKRKLNRANRLASQLFLKNRGSWSSKGFFHLNDGNSDTVPPKNYLDAQYYGDITIGTPPQKFTAIFDTGSSNLWMPSSKCYLSVACYFHSKYTASESSTYKKNGKPASIRYGTGAISGYFSNDDVKIGDLVIKDQEFIEATNEPGITFLVAKFDGILGLGFKEIAVGNSTPVWYNMVEKGLVKEQIFSFWLNRNPQDQEGGEIVFGGVDPKHFKGEHTYVPVTRKGYWQFDMGDLHIAGKPTGYCSNGCSAIADSGTSLLTGPTSVITMINHAIGAVGVASKECKTVIGQYGKTMLNSLLSQADPRKVCSQIGLCGFNERMGIKSVLDDGTSDLINEAMCSVCEMATVWMQSELNQNETQERILSYAAELCDHIPSPNQQSAVNCEKVSSMPIVTFTIGGKPFDLSPQDYIFKIGDGVQSQCTSGFTAMDIPPPRGPLWILGDIFMGPYHTVFDYGKARVGFAKSA

SEQ ID NO: 36926 - protein, 503 aa, Zea mays subsp. mays
MGTRFQSFLLLFLLSCLIFISATSSEQKGDGTLRIGLKKRKLNRANRLASQLFLKNRGSWSSKGFFHLNDGNSDTVPPKNYLDAQYYGDITIGTPPQKFTAIFDTGSSNLWMPSSKCYLSVACYFHSKYTASESSTYKKNGKPASIRYGTGAISGYFSNDDVKIGDLVIKDQEFIEATNEPGITFLVAKFDGILGLGFKEIAVGNSTPVWYNMVEKGLVKEQIFSFWLNRNPQDQEGGEIVFGGVDPKHFKGEHTYVPVTRKGYWQFDMGDLHIAGKPTGYCSNGCSAIADSGTSLLTGPTSVITMINHAIGAVGVASKECKTVIGQYGKTMLNSLLSQADPRKVCSQIGLCGFNERMGIKSVLDDGTSDLINEAMCSVCEMATVWMQSELNQNETQERILSYAAELCDHIPSPNQQSAVNCEKVSSMPIVTFTIGGKPFDLSPQDYIFKIGDGVQSQCTSGFTAMDIPPPRGPLWILGDIFMGPYHTVFDYGKARVGFAKSA

SEQ ID NO: 36927 - protein, 392 aa, Zea mays subsp. mays
MPSSKCYLSVACYFHSKYTASESSTYKKNGKPASIRYGTGAISGYFSNDDVKIGDLVIKDQEFIEATNEPGITFLVAKFDGILGLGFKEIAVGNSTPVWYNMVEKGLVKEQIFSFWLNRNPQDQEGGEIVFGGVDPKHFKGEHTYVPVTRKGYWQFDMGDLHIAGKPTGYCSNGCSAIADSGTSLLTGPTSVITMINHAIGAVGVASKECKTVIGQYGKTMLNSLLSQADPRKVCSQIGLCGFNERMGIKSVLDDGTSDLINEAMCSVCEMATVWMQSELNQNETQERILSYAAELCDHIPSPNQQSAVNCEKVSSMPIVTFTIGGKPFDLSPQDYIFKIGDGVQSQCTSGFTAMDIPPPRGPLWILGDIFMGPYHTVFDYGKARVGFAKSA

SEQ ID NO: 36928 - DNA, 842 bp, Zea mays subsp. mays
ctttttccacttcctccctcctaatcctaaatcagcatcaatggcgattaccttctcagatctacacacagaggaaggcctcaaatccgtggaggagcacctcgccggaaaaacctacatctccggagatcaattgtccgtggatgatgtgaaggtatacgctgccgtttcggtgaaacctagcgatgctttccctaatgctagcaggtggttcgattgcgtcgcttcccatctagctaaaagcttccctggaaaagccgttggagttagtatcggtggctctgctgctgctgctcctgctcaagctgaggcacctgcagcagctgcagctgatgatgatgatgacatggatctgtttggtgacgagaccgaggaggaaaagaaagcagctgaggagagggaggctgccaagaaggacaccaaaaagcccaaagagagtggaaagtcctctgtgctcatggaagttaagccatgggatgacgagactgacatgaagaaacttgaggagtgtgttcgcgctgttgagatgcctggtcttctttggggagcttcaaaactggttccagttggttacggcatcaagaagctcacgatcatgctcacaatcgttgatgacctcgtgtccccagacaacctcattgaagactacctcacctgtgaacctaacaacgagtacatccagagtgttgacatcgtcgcattcaacaagatctagagactttaaaaacctctccccctaccaaacgatacattttgatttccttccaagttttgttatcttttgttgtttgcttgagatgcttattctctagttgcaagacctatgttacatgctatcaaag

SEQ ID NO: 36929 - protein, 237 aa, Zea mays subsp. mays
FFHFLPPNPKSASMAITFSDLHTEEGLKSVEEHLAGKTYISGDQLSVDDVKVYAAVSVKPSDAFPNASRWFDCVASHLAKSFPGKAVGVSIGGSAAAAPAQAEAPAAAAADDDDDMDLFGDETEEEKKAAEEREAAKKDTKKPKESGKSSVLMEVKPWDDETDMKKLEECVRAVEMPGLLWGASKLVPVGYGIKKLTIMLTIVDDLVSPDNLIEDYLTCEPNNEYIQSVDIVAFNKI

SEQ ID NO: 36930 - protein, 224 aa, Zea mays subsp. mays
MAITFSDLHTEEGLKSVEEHLAGKTYISGDQLSVDDVKVYAAVSVKPSDAFPNASRWFDCVASHLAKSFPGKAVGVSIGGSAAAAPAQAEAPAAAAADDDDDMDLFGDETEEEKKAAEEREAAKKDTKKPKESGKSSVLMEVKPWDDETDMKKLEECVRAVEMPGLLWGASKLVPVGYGIKKLTIMLTIVDDLVSPDNLIEDYLTCEPNNEYIQSVDIVAFNKI

SEQ ID NO: 36931 - protein, 122 aa, Zea mays subsp. mays
MDLFGDETEEEKKAAEEREAAKKDTKKPKESGKSSVLMEVKPWDDETDMKKLEECVRAVEMPGLLWGASKLVPVGYGIKKLTIMLTIVDDLVSPDNLIEDYLTCEPNNEYIQSVDIVAFNKI

SEQ ID NO: 36932 - DNA, 825 bp, Zea mays subsp. mays
gaagatctggttagtactgaagaagaaaactctgtcggaaaattctatctttctcggagggaagaatccatttctgagaggtgcttcgctttctttgctgatcagcttcggattgattacttcgaaagatggatcctaaccagccgcctgttgaaaactatgcgaacccaaatacatgtctcttccatgttctcttcaagggtgctgcgttggcgttttacattctatccgctctcttcttcaacagctttgtcataatctttgttgtgactgttctccttgctgcacttgacttctgggtggttaagaacgtgagtgggcgtatactggttggtctcaggtggtggaacgagatcaatgacttgggcgaaagtgtctggaaatttgagtctcttgaccaagagtccttggctcggatgaacaagaaagactcgtggcttttctggtggacgctttaccttgcagcagctgcgtggttgatccttggggtgttttcactgataaggtttcaggccgactacctgcttgttgtgggcgtttgcttgtccctcaacgtggctaatatcatcggcttcacaaagtgcaagaaagatgcaaagaaacagtttcagcagtttgcttcacagacaatcgcatcaaggttccaatccacggtacaatctgccttcacccttgtttgaaaaataaaaaaggttttagtgagagcaaagactgtgtacaaagaagattgtcgccataagccacaccatgtcttttttttttttttttctggctgattgttttttccactatataatattaacggatataagaaagaggcttatc

SEQ ID NO: 36933 - protein, 183 aa, Zea mays subsp. mays
MDPNQPPVENYANPNTCLFHVLFKGAALAFYILSALFFNSFVIIFVVTVLLAALDFWVVKNVSGRILVGLRWWNEINDLGESVWKFESLDQESLARMNKKDSWLFWWTLYLAAAAWLILGVFSLIRFQADYLLVVGVCLSLNVANIIGFTKCKKDAKKQFQQFASQTIASRFQSTVQSAFTLV

SEQ ID NO: 36934 - DNA, 1110 bp, Zea mays subsp. mays
acctcctccctcctgttccttcagccaccgtgagcaatggcgcccaagcggaagggtggcaacggccggaagaagaccgtcctcctctcgatcgtcaaggaggacgcccgccatgtatgcttctcaaagcgcaagcggggcctgttcagcaagaccagcgcgctgtccctgctcacgggcgcccaggtggccgccgtcatcttctcgcccggcggcaaggtcttctccttcggccacccctccgtcgacgccgtcgtcaaccgcttcatggcgggggacgccgcggtggtccaggccgccgccgacgacaacgggttgcagacgctgcagctgcagcacggcgacatgcgcaccgagctggcggaccagaagaagcggaagaagcgcgctgaggaggccctggacaaggagcgcgctgggggggaccagattgcctcgtggctccaccccgacgtgcgcgacatggggcatgacgacatggcggccttcgccgccgcgctcttgcaggtccaggccgccgtctccggacgcgccaaccaggttctcgtcgaggcctttcgcgtcgacatcagccgtatgctccaggtgcccccgccgccgccgcctccgctccagctcttcggtgccagcaccattgagttcggtagtagcagcagcagcgccaacgccgggatggagatgcaacagatgcagatggttatggagatgccaccgccgcctgacttccccgcagtgatggggatgcagcagttggttatggagatgccaccacagccaaggttcgaggcagcgatggagatgacgccgctgcaggagttcgtcgccgggatgcagaaggtgcagcggcaggggctcgggccgaacgccgacttcccctactgaggagaagaaagacaccagacagagtccgaccgagtccgagtctcagttactatattctaaataaatcgttcagatccatgtaagatccatctacgtgggtccaagatctatgcattagttggttcaattatcttagtagcaattaaatttatggcattgtaatcttttttgtatcggtagtacaatggctggaaattcgtgaatgaaatactattaagccttttcaag

SEQ ID NO: 36935 - protein, 281 aa, Zea mays subsp. mays; identical to SEQ ID NO: 27494

SEQ ID NO: 36936 - protein, 244 aa, Zea mays subsp. mays
PPPSCSFSHREQWRPSGRVATAGRRPSSSRSSRRTPAMYASQSASGACSARPARCPCSRAPRWPPSSSRPAARSSPSATPPSTPSSTASWRGTPRWSRPPPTTTGCRRCSCSTATCAPSWRTRRSGRSALRRPWTRSALGGTRLPRGSTPTCATWGMTTWRPSPPRSCRSRPPSPDAPTRFSSRPFASTSAVCSRCPRRRRLRSSSSVPAPLSSVVAAAAPTPGWRCNRCRWLWRCHRRLTSPQ

SEQ ID NO: 36937 - protein, 207 aa, Zea mays subsp. mays; identical to SEQ ID NO: 27496

SEQ ID NO: 36938 - DNA, 524 bp, Zea mays subsp. mays
acccaacaaaaagagaagaaaaaaacacaagagaaacaaacataaagtaacatgagatctctcttactagccttgttcctagttcttgctttccaccgtggtgaagcagccgtgtcttgcaacgcagtggttggagatctttacccttgtctctcctacgtggttcaaggcggtaacgtcccagcgaactgctgcaacggcatcagaacgctcaacagtcaggcccaaacccctgtggaccgtcagggcgtttgccgttgcatcaaaaatgctatcggaggagtctctttctcttctaacaacgtcaacaatgctcagtctctgcctgctaagtgtggtgtgaatctcccttacagtatcagcccttccaccaactgcgacagtatcaactgagagaaagaagacaaggaagctactactattactacaagaactaagaagtcagtaataaattagaacgtatggtttgctactagctacgttaatgtgtgatgtatcgtcacttctatgttcttgagagttat

SEQ ID NO: 36939 - protein, 113 aa, Zea mays subsp. mays
MRSLLLALFLVLAFHRGEAAVSCNAVVGDLYPCLSYVVQGGNVPANCCNGIRTLNSQAQTPVDRQGVCRCIKNAIGGVSFSSNNVNNAQSLPAKCGVNLPYSISPSTNCDSIN

SEQ ID NO: 36940 - DNA, 1317 bp, Zea mays subsp. mays
ggacgatcaggatgtctgattgaccaatcagagcccggttaatcgggctggtcgtcaactaatcgtgattagtcagctgatcgcccctctggcgatcaggagcgatcagccgatctgaaaacattgcttctggggctaggggccgagctgccgcagacaacaccaactgcacattgctgcataggaggtcaggagaaggcgctccagcgcagcacggcagcagggatttctggacggctctgattgaataaaccgtgaaggagatgccctggaatagattcatgcccttcctttcaaaatgttgtacttctaccgttcagacatcttcatcatattcatctttttcctcgtccttctccccgatacaaccatggttatttgtgggtcttggcaaccctggtgagaagtatcaatccaccaggcacaacgtgggttttgatatgatagatgcatttgcgcattcccagggtatacccctgactacacattacttcaaagcactctttggtgaagggatggttgatggagtccctgttcttcttgccaagccccagacttatatgaatctcagtggagaatctgtcggcccacttgctgcctattataaactgccacttaatcgtgtcctagtggcgtttgatgacatggacttgccatgtggagttctccgtctacagccaaaaggaggttctggacgacacaatggatcgattcagccgtgagagagggtgtcgatattctgaagatggtggctgcgaggggtttgacagaggcggcaaaactgacaaatgcggaccagaagtataagcatctgagatcacatggtatccagactaacgatgactagacaaagcttactagggggactactcttttcagcacatctcccgatattcagactaaagacgaaactcgttttatggcctgttgtctagagcatggtaggcttgagaaacaggcgctcgatgagcccctttagaccgtcgctgaacgtgaacgcgtccttgttgtcaccgtacatcaacggcatgctggcggttatgtcggcaactcgctgcactgctggaagtagtttgctgttctcaaagcgtgctccgtttatagttttccatgcatcttcaatcagggagcttatctgtgcaaaggcaacctcagctgtgacgccatgctcactgatgtagcattcgaccgagctgtccacgtcgtttttgttctttccacgctgcgaaagaacacatccatttatttattatttattactgggcaacaatccaaaggacaagaatacttaatggtcttattaaagaattaatcaag

SEQ ID NO: 36941 - protein, 152 aa, Zea mays subsp. mays
MPWNRFMPFLSKCCTSTVQTSSSYSSFSSSFSPIQPWLFVGLGNPGEKYQSTRHNVGFDMIDAFAHSQGIPLTTHYFKALFGEGMVDGVPVLLAKPQTYMNLSGESVGPLAAYYKLPLNRVLVAFDDMDLPCGVLRLQPKGGSGRHNGSIQP

SEQ ID NO: 36942 - protein, 146 aa, Zea mays subsp. mays
MPFLSKCCTSTVQTSSSYSSFSSSFSPIQPWLFVGLGNPGEKYQSTRHNVGFDMIDAFAHSQGIPLTTHYFKALFGEGMVDGVPVLLAKPQTYMNLSGESVGPLAAYYKLPLNRVLVAFDDMDLPCGVLRLQPKGGSGRHNGSIQP

SEQ ID NO: 36943 - protein, 93 aa, Zea mays subsp. mays
MIDAFAHSQGIPLTTHYFKALFGEGMVDGVPVLLAKPQTYMNLSGESVGPLAAYYKLPLNRVLVAFDDMDLPCGVLRLQPKGGSGRHNGSIQP

SEQ ID NO: 36944 - DNA, 469 bp, Zea mays subsp. mays
ccacaaaccccgctgcgccaatagctcttccccagaacaatagactagtcaatgaaggggaggtttattaagcagagcagaagaatatagttaatggttcctggatgagaagtggaaatgctactggctgtggaaggaggaggttttttctcatcgtcagcttcaggatacagtcatggcctcgctcttttgctgcttggacggaaagaagaagagaagcctgtcaaggtatcaccatggagtcagtaccgactagtcgatggggaagctgagcatgtttgtcatctggcttccacgaaaaaccaagctccccgtaaatgtgctcccttcatctgcttcggtagcactgctttggagctcgaaggggcgtctcctccgaaactgagttcaagcaacactttggactctttggaggagccatcccgttcaacaaagaagaaggttaccactaatggttccataactggag

SEQ ID NO: 36945 - protein, 117 aa, Zea mays subsp. mays
MLLAVEGGGFFSSSASGYSHGLALLLLGRKEEEKPVKVSPWSQYRLVDGEAEHVCHLASTKNQAPRKCAPFICFGSTALELEGASPPKLSSSNTLDSLEEPSRSTKKKVTTNGSITG

SEQ ID NO: 36946 - DNA, 500 bp, Zea mays subsp. mays
agaacatcctaatcgaaaaaaagagagagagagagagaagaggagcactcgaccccgccgtcgcagcgccaaccaaaccctcgtcgtcgtctccgatcccgccgtcgccgccgcagccatgccgttcaccccgggaccctactccggcaagagcaccctcgccctcgtcgccagggtctccgccgtcggcatcggcgtcgtctacggctccgtcaagctcggcatcctcaagatgaccaagcccaaggaggaagcagctgctcatcactgaggacaagtagctccagcgggttgacgccgtagattcgcaatgtaccttctatatgcccatccggttctgtgatttgtgtcttgaaacccaaaaaaccccaggcccatgtgggagctgaaccttagttttttgcttggtggaaaataatatcctcggctgaatcgacttgaaatcaggaagagtgaaactttaaatcatttccttttgcgtggtgctgcgatccagaccc

SEQ ID NO: 36947 - protein, 89 aa, Zea mays subsp. mays
EHPNRKKEREREKRSTRPRRRSANQTLVVVSDPAVAAAAMPFTPGPYSGKSTLALVARVSAVGIGVVYGSVKLGILKMTKPKEEAAAHH

SEQ ID NO: 36948 - protein, 77 aa, Zea mays subsp. mays
NILIEKKRERERRGALDPAVAAPTKPSSSSPIPPSPPQPCRSPRDPTPARAPSPSSPGSPPSASASSTAPSSSASSR

SEQ ID NO: 36949 - protein, 50 aa, Zea mays subsp. mays
MPFTPGPYSGKSTLALVARVSAVGIGVVYGSVKLGILKMTKPKEEAAAHH

SEQ ID NO: 36950 - DNA, 1022 bp, Zea mays subsp. mays
agatttgatcccaacgaaaacgcgtcttcatcttcctcctcctcctttcttttctctcgattttggctgaaagcagctttgtcttttttactacaaccaaatatggatgactgggaggatgaacaaattgcaccacttccagcaaaagttgtgcttaaaagcaactgggatgatgaagatgtagatgagaatgagattaaggactcatgggaggatgatgatgacgaacaacctgctcctccgcctccggtaaagcctgctcctccgaagaaagctgttgagaaaaagggcaaagcggctgaggctccaaaagaagaacctttagatcctctctctgagaaacttcgcatgcagaggcttgttgaagaagcggactacagggcaactgccgaactctttggaacgaagggtgaagagaaaagccttgacatgttcatccccaagtctgaatctgattttttggaatatgctgaaatgatttctcataggcttacaccatatgagaaaagttatcactatatcgcattgctgaaagctgtcatgagactttcggtgaccaacatgaaggcagcagatgttaaagatgttgcttcgtccgttacagcaattgcaaatgaaaagcttaaggctgagaaagaagctgctgctggtagaaagaagacgggtggcaagaagaaacagcttattgtagataaggccgatgacgatctagtagctggtccttatgatgccatggacgattttgacttcatgtagattacaagagctttgtgattgtgagggaatacagtttcgattgcctggcgtctgtttcatcattatctctcgggaagaagagcaaaagtttcttagttctgggatatatatagttggaacaaagaagtcttgctttatgggttttggtctgtttggtctggagacattctctaaagagtcatgttttgtttcttttctgttggttaaaaagctaatactttaatcaattctcgtgtaatggtaatacaaatgtcttatctttgctc

SEQ ID NO: 36951 - protein, 251 aa, Zea mays subsp. mays
RFDPNENASSSSSSSFLFSRFWLKAALSFLLQPNMDDWEDEQIAPLPAKVVLKSNWDDEDVDENEIKDSWEDDDDEQPAPPPPVKPAPPKKAVEKKGKAAEAPKEEPLDPLSEKLRMQRLVEEADYRATAELFGTKGEEKSLDMFIPKSESDFLEYAEMISHRLTPYEKSYHYIALLKAVMRLSVTNMKAADVKDVASSVTAIANEKLKAEKEAAAGRKKTGGKKKQLIVDKADDDLVAGPYDAMDDFDFM

SEQ ID NO: 36952 - protein, 217 aa, Zea mays subsp. mays
MDDWEDEQIAPLPAKVVLKSNWDDEDVDENEIKDSWEDDDDEQPAPPPPVKPAPPKKAVEKKGKAAEAPKEEPLDPLSEKLRMQRLVEEADYRATAELFGTKGEEKSLDMFIPKSESDFLEYAEMISHRLTPYEKSYHYIALLKAVMRLSVTNMKAADVKDVASSVTAIANEKLKAEKEAAAGRKKTGGKKKQLIVDKADDDLVAGPYDAMDDFDFM

SEQ ID NO: 36953 - protein, 135 aa, Zea mays subsp. mays
MQRLVEEADYRATAELFGTKGEEKSLDMFIPKSESDFLEYAEMISHRLTPYEKSYHYIALLKAVMRLSVTNMKAADVKDVASSVTAIANEKLKAEKEAAAGRKKTGGKKKQLIVDKADDDLVAGPYDAMDDFDFM

SEQ ID NO: 36954 - DNA, 604 bp, Zea mays subsp. mays
acaaagatctcattatctaactcagatcatctatctgaaaggcttctcaattttggttcatcttatattgtagccatgtctcagactgtggtcctcaaagtaggtatgtcatgccaaggctgcgttggtgccgtcaatagagtcttgggcaaaatggaaggggttgagtcatttgacattgatataaaggagcaaaaggtgacagtgaaaggtaatgtggagcctgaagcagtttttcaaacagtttcaaagactggcaagaagacttcttactggcctgtggaggctgaggctgagcctaaagctgaggccgagcctaaggctgaggccgtgactgagactaaaaccgaggctgagactaaaaccgaggctgagactaagattgaggctaaggttgatgcaaaggctgatgttgaaccaaaactcgcagaagctgagactaagccatcagaagtttaagtactaaagatgaaaatggggctttttatctgtatttgaattgtttcttattgtctttgaatcgtgtgttgttgtaagactaaaaaatttatgctttatcgacgtacctaacattttcaagttttgataacaagatgttggaccc

SEQ ID NO: 36955 - protein, 152 aa, Zea mays subsp. mays
TKISLSNSDHLSERLLNFGSSYIVAMSQTVVLKVGMSCQGCVGAVNRVLGKMEGVESFDIDIKEQKVTVKGNVEPEAVFQTVSKTGKKTSYWPVEAEAEPKAEAEPKAEAVTETKTEAETKTEAETKIEAKVDAKADVEPKLAEAETKPSEV

SEQ ID NO: 36956 - protein, 127 aa, Zea mays subsp. mays
MSQTVVLKVGMSCQGCVGAVNRVLGKMEGVESFDIDIKEQKVTVKGNVEPEAVFQTVSKTGKKTSYWPVEAEAEPKAEAEPKAEAVTETKTEAETKTEAETKIEAKVDAKADVEPKLAEAETKPSEV

SEQ ID NO: 36957 - protein, 117 aa, Zea mays subsp. mays
MSCQGCVGAVNRVLGKMEGVESFDIDIKEQKVTVKGNVEPEAVFQTVSKTGKKTSYWPVEAEAEPKAEAEPKAEAVTETKTEAETKTEAETKIEAKVDAKADVEPKLAEAETKPSEV

SEQ ID NO: 36958 - DNA, 576 bp, Zea mays subsp. mays
ttttttagtttctctccgacgagatttgagatggcactaagaggagtatggcagctccagaagctggtagtgagctactgtaattggggtggcagcagcagaggcataagagcctttatggaatcagagttacctgctctgatcgagaagaatccgcagctcgaagtggtaacggagctctcaaggggacaacatccttacctcaagggcatttacaggaatagaaatgaaagagtggtgtgtgttaagaacatggatcctgatcaagtgcttttgaatgcaacgaggcttaggaactctcttggaaggaaagtggtgaagctgcggactaggcatgtgaccaaacatcccagtgttcaaggcacttggacaaccgctgtcaagttctgacaacctttgcgggtcttttgttcttcttcttattcgttgctgtaatgttgcaatatcaggattcttcctttgttaccaatatttgcaataccaagttgtttccactacttgttctctctggttcgttcctttttttcttacaacaatgttctgtcttgttttggatccggttaatgtctgggaaac

SEQ ID NO: 36959 - protein, 129 aa, Zea mays subsp. mays
FFSFSPTRFEMALRGVWQLQKLVVSYCNWGGSSRGIRAFMESELPALIEKNPQLEVVTELSRGQHPYLKGIYRNRNERVVCVKNMDPDQVLLNATRLRNSLGRKVVKLRTRHVTKHPSVQGTWTTAVKF

SEQ ID NO: 36960 - protein, 119 aa, Zea mays subsp. mays
MALRGVWQLQKLVVSYCNWGGSSRGIRAFMESELPALIEKNPQLEVVTELSRGQHPYLKGIYRNRNERVVCVKNMDPDQVLLNATRLRNSLGRKVVKLRTRHVTKHPSVQGTWTTAVKF

SEQ ID NO: 36961 - protein, 90 aa, Zea mays subsp. mays
MESELPALIEKNPQLEVVTELSRGQHPYLKGIYRNRNERVVCVKNMDPDQVLLNATRLRNSLGRKVVKLRTRHVTKHPSVQGTWTTAVKF

SEQ ID NO: 36962 - DNA, 735 bp, Zea mays subsp. mays
ctaacccaacgaccagacgcaacacgacggcgacggccatggcttcgccggacctcgccgccggcgacggcagctacgactttcaccttcgctctctctccgcggcctcacgggactccgctgcggcctccgaccccgcctctgaccccaacctcctccaatctgttaggagggtgtgcgagatgtgccgaacggcgaaggaagcgaaggacgagatggtggcgcgggcgttccccgtgatgggcaagctatttcagcgatgcgccgccgctcccacgcaggccgttgcctccaccggcgtgctgctcctcaccattttgcaattcttcttggattttggggaggctgttttgcatgatgctgatggtagcttgaaaaccttcttccgctcttgcttaagtagggagtttgcagatcctattgttgcagagcgcacagttgaattccttgtaacaaacaagacaaagatccttagctcctttcccaatttgattccacaggaggctgtaggccaaaaaggtagagaaaaaacagaaaaaaccatatttgtatgataagctactcaaccaatcttttgtaagattctttatagaatatctctcttctcttcctattttccatattcgacttaatcttgttaacacatgccaatgcttgtgtatccttgtttatacacagttctatccattgttgataaagcttatcgataccgtcgacctcgagggggcgtccggt

SEQ ID NO: 36963 - protein, 183 aa, Zea mays subsp. mays
NPTTRRNTTATAMASPDLAAGDGSYDFHLRSLSAASRDSAAASDPASDPNLLQSVRRVCEMCRTAKEAKDEMVARAFPVMGKLFQRCAAAPTQAVASTGVLLLTILQFFLDFGEAVLHDADGSLKTFFRSCLSREFADPIVAERTVEFLVTNKTKILSSFPNLIPQEAVGQKGREKTEKTIFV

SEQ ID NO: 36964 - protein, 171 aa, Zea mays subsp. mays
MASPDLAAGDGSYDFHLRSLSAASRDSAAASDPASDPNLLQSVRRVCEMCRTAKEAKDEMVARAFPVMGKLFQRCAAAPTQAVASTGVLLLTILQFFLDFGEAVLHDADGSLKTFFRSCLSREFADPIVAERTVEFLVTNKTKILSSFPNLIPQEAVGQKGREKTEKTIFV

SEQ ID NO: 36965 - protein, 123 aa, Zea mays subsp. mays
MCRTAKEAKDEMVARAFPVMGKLFQRCAAAPTQAVASTGVLLLTILQFFLDFGEAVLHDADGSLKTFFRSCLSREFADPIVAERTVEFLVTNKTKILSSFPNLIPQEAVGQKGREKTEKTIFV

SEQ ID NO: 36966 - DNA, 576 bp, Zea mays subsp. mays
acaacacaacacatatcttttagtaacctttcaataggcgtcccccaagaactagtaaacatggcaaaactgttgagcctgttcttagccctctcctttgtagcagctatgtttgccataggctctcatgctgatggagactgtgagaatgacctccaaagcctgataagtgactgcaagacatacgtgatgttcccagctaatccaaaggtccctccttcggatgcttgctgtggtgtcatcaagaaggcaaacgtttcttgcttgtgctccaaggtcaccaaagaaactgagaaggttgtgtgcatggagaaggttgtgtatgttgctgagcagtgtaagaggccatttgagcatggcttccagtgcggaagctacaaggttccagcaaactgatgatatcgcaagagggaagcgcttgacgtagtctttagatttcaattgttgcagccgatcaaccttcttagggttgtataatatgaagtcaatgttgagactaatgtgaggtgggagaggcctattgatgcatcaaaagtattatgagctaataataaagccttctccacagattttatg

SEQ ID NO: 36967 - protein, 131 aa, Zea mays subsp. mays
TTQHISFSNLSIGVPQELVNMAKLLSLFLALSFVAAMFAIGSHADGDCENDLQSLISDCKTYVMFPANPKVPPSDACCGVIKKANVSCLCSKVTKETEKVVCMEKVVYVAEQCKRPFEHGFQCGSYKVPAN

SEQ ID NO: 36968 - protein, 111 aa, Zea mays subsp. mays
MAKLLSLFLALSFVAAMFAIGSHADGDCENDLQSLISDCKTYVMFPANPKVPPSDACCGVIKKANVSCLCSKVTKETEKVVCMEKVVYVAEQCKRPFEHGFQCGSYKVPAN

SEQ ID NO: 36969 - protein, 95 aa, Zea mays subsp. mays
MFAIGSHADGDCENDLQSLISDCKTYVMFPANPKVPPSDACCGVIKKANVSCLCSKVTKETEKVVCMEKVVYVAEQCKRPFEHGFQCGSYKVPAN

SEQ ID NO: 36970 - DNA, 1061 bp, Zea mays subsp. mays
acaaccaggaaagcaaagcgcttcgcaagcacaggcagtgatcggcaaccaaatccggacagtcttgagctctctcagtctcagcatttcagttcccagattcacatagccccagccccacaagtagcgaaatggcagctgctccgttcgcgattgccggccggctctcccccgttgcgcgcctcccggtccgcgcctggaggccggcgcacgggtttgcgtcgtccgggagagcccgctcgctcgccgtggcgtccgcggcgcaggagaacagggacaacagtgtcgacgtacaggttagccagaacggcggcaacaggcagcagggcaacgccgtgcagcgccgcccgcgccgcgcgacagcgctcgacatctccccatccccgttcgggttagttgatccgatgtcgccgatgcggacgatgcggcagatgctggacacgatggacaggctgttcgacgacgccgtggggttccccatggggacacggaggtccccggcgaccaccggcgacgtacgcctgccgtgggacatcgtggaggacgagaaggaggtgaagatgcggatcgacatgccgggcctcgcgcgcgacgaggtgaaggtgatggtggaggacgacacgctggtcatccgaggggagcacaagaaggaggagggcgcggagggcggcagcggtggcgacggcgacgggtggtggaagcagcgcagcgtgagctcctacgacatgcggctggcgctgccggatgagtgcgacaagagcaaggtgcgggccgagctcaagaacggcgtgctcctcgtcaccgtgcccaagaccgaggtggagcgcaaggtcatcgacgtgcaggtccagtagacaaactgagctgtcacgacgggtctttgtgtagcactagcgtgggttgggctcttcgcgccgaccgtatcagtactcgtgacccaacgtgtggaataatgtgaataaataaacgcttcaattctgctattccaagaatctagctcaatatagctatgggaaaaattattaaaaaaaaaaaaaaaaaagcttatcgataccgtcgac

SEQ ID NO: 36971 - protein, 240 aa, Zea mays subsp. mays
MAAAPFAIAGRLSPVARLPVRAWRPAHGFASSGRARSLAVASAAQENRDNSVDVQVSQNGGNRQQGNAVQRRPRRATALDISPSPFGLVDPMSPMRTMRQMLDTMDRLFDDAVGFPMGTRRSPATTGDVRLPWDIVEDEKEVKMRIDMPGLARDEVKVMVEDDTLVIRGEHKKEEGAEGGSGGDGDGWWKQRSVSSYDMRLALPDECDKSKVRAELKNGVLLVTVPKTEVERKVIDVQVQ

SEQ ID NO: 36972 - protein, 149 aa, Zea mays subsp. mays
MSPMRTMRQMLDTMDRLFDDAVGFPMGTRRSPATTGDVRLPWDIVEDEKEVKMRIDMPGLARDEVKVMVEDDTLVIRGEHKKEEGAEGGSGGDGDGWWKQRSVSSYDMRLALPDECDKSKVRAELKNGVLLVTVPKTEVERKVIDVQVQ

SEQ ID NO: 36973 - protein, 146 aa, Zea mays subsp. mays
MRTMRQMLDTMDRLFDDAVGFPMGTRRSPATTGDVRLPWDIVEDEKEVKMRIDMPGLARDEVKVMVEDDTLVIRGEHKKEEGAEGGSGGDGDGWWKQRSVSSYDMRLALPDECDKSKVRAELKNGVLLVTVPKTEVERKVIDVQVQ

SEQ ID NO: 36974 - DNA, 976 bp, Zea mays subsp. mays
atctttcattcgtgcctgaagcagcagccattgcccattgctaacgagagtggagtggtagagcagttcgagtttgcctttctctcttgcttgattggttgatcggtgactcgatccatcgtcggaggtacatatagttagcgaggaattctccggccggccaccggcgacgacgaccgcaagtgatccgtgaggatggtgaacacgacggcggctatggtgagcggcggcaagggcggcgtgctgccgctggcgtccctgaaccacatcagcatagtgtgcaagtcggtggaggagtcgctcgacttctacatgaacgtcctcgggttcacccccatccgccggcccggctccttcgacttcgacggcgcatggctgttcaactacgggatcggcatccacctgctgcagtcggagcgtcccgacagcttaccagcgaagaaggagatcaaccccaaggataaccacatctccttccagtgcgagagcatggtggcggtggagcggcggctcaaggagctgggcattccatacatccagcggtgcgtggaggagggcggcatctacgtggaccagatcttcttccacgaccccgacggcttcatgatcgagatctgcaactgcgacaacctcccggtcgtcccgctcgccgaccagaccttcgccatggccgcctgcaagagggtcgcctccgtcaagcagtagcaggtgcccatgccggtcgcacaagtagcgcaagcaacccctgctcccacggcggccgcggcttcgcagtgcattcccgcgccgaacccggccttgcagcgcgtcggcggcgaggaggcggcgcatatctcgtgcgcgtgagaggtgggaggccggggtagccaggccgcccaactggtggcgcgctccgtggagtcgtggtttttgtatattgtgatataacagtgtgcgtatgaataaagtgaggggagcagagtgtggtttcagctcc

SEQ ID NO: 36975 - protein, 169 aa, Zea mays subsp. mays
MVNTTAAMVSGGKGGVLPLASLNHISIVCKSVEESLDFYMNVLGFTPIRRPGSFDFDGAWLFNYGIGIHLLQSERPDSLPAKKEINPKDNHISFQCESMVAVERRLKELGIPYIQRCVEEGGIYVDQIFFHDPDGFMIEICNCDNLPVVPLADQTFAMAACKRVASVKQ

SEQ ID NO: 36976 - protein, 162 aa, Zea mays subsp. mays
MVSGGKGGVLPLASLNHISIVCKSVEESLDFYMNVLGFTPIRRPGSFDFDGAWLFNYGIGIHLLQSERPDSLPAKKEINPKDNHISFQCESMVAVERRLKELGIPYIQRCVEEGGIYVDQIFFHDPDGFMIEICNCDNLPVVPLADQTFAMAACKRVASVKQ

SEQ ID NO: 36977 - protein, 130 aa, Zea mays subsp. mays
MNVLGFTPIRRPGSFDFDGAWLFNYGIGIHLLQSERPDSLPAKKEINPKDNHISFQCESMVAVERRLKELGIPYIQRCVEEGGIYVDQIFFHDPDGFMIEICNCDNLPVVPLADQTFAMAACKRVASVKQ

SEQ ID NO: 36978 - DNA, 751 bp, Zea mays subsp. mays
aaaaaacgtcttgatagggaacaaaaagacatggcttcttcttcttcttttttcactttctctagtcagaccacactgcattcccatcttcacagaaacacctttctcaccaaaacccaatttccagttcccacaaaatcatcagaatctaacttctttggtctcagactctctccctccacctctcgctctccgctctctccctgttctttcaaaagctcaatctttgctaaggttaacaaggggcagagtgcaccagacttcacactaaaggatcaaaatggaaagccggtgagcttgaagaagtataaagggaagcctgttgttgtatatttctaccctgccgatgaaacccctggctgcaccaagcaggcttgtgcgttcagagactcttatgagaaattcaagaaagccggcgcagaggtcattggcataagtggtgatgattctgcttctcacaaggcctttgcaagcaaatacaagcttccttacacattgttgagtgacgaagggaatagggtgaggaaagattggggagtgccaggagatttatttggggcattgccagggagacagacttatgttctcgacaaaaacggtgtcgttcagctcatctacaacaaccagttccagcctgagaaacacattgatgagaccttaaagttcctcaaagctgcttgatcttgtattcttctcttcttcctcatctggatgactggatatttacaacaacaattcatgacgttcctct

SEQ ID NO: 36979 - protein, 226 aa, Zea mays subsp. mays
KKRLDREQKDMASSSSFFTFSSQTTLHSHLHRNTFLTKTQFPVPTKSSESNFFGLRLSPSTSRSPLSPCSFKSSIFAKVNKGQSAPDFTLKDQNGKPVSLKKYKGKPVVVYFYPADETPGCTKQACAFRDSYEKFKKAGAEVIGISGDDSASHKAFASKYKLPYTLLSDEGNRVRKDWGVPGDLFGALPGRQTYVLDKNGVVQLIYNNQFQPEKHIDETLKFLKAA

SEQ ID NO: 36980 - protein, 216 aa, Zea mays subsp. mays
MASSSSFFTFSSQTTLHSHLHRNTFLTKTQFPVPTKSSESNFFGLRLSPSTSRSPLSPCSFKSSIFAKVNKGQSAPDFTLKDQNGKPVSLKKYKGKPVVVYFYPADETPGCTKQACAFRDSYEKFKKAGAEVIGISGDDSASHKAFASKYKLPYTLLSDEGNRVRKDWGVPGDLFGALPGRQTYVLDKNGVVQLIYNNQFQPEKHIDETLKFLKAA

SEQ ID NO: 36981 - DNA, 620 bp, Zea mays subsp. mays
ataggtatcgccgacgagtgaactgctacaaaagatctcacaatggaacaaactttcatcatgatcaagccagacggcgtccagaggggtctggtcggtgaaatcatctgcaagttcgaaaagaagggtttcactttgaaaggtctaaagctgatcactgtggaccgtccttttgctgagaaacactaccaagacttgtctgccaagcccttcttcaacagccttgtcgattacataatctctggaccagtcgttgctatgatctgggaggggaagaacgttgttttgacaggaaggaagatcattggagcaactaaccctgcggcttctgagccaggaaccatccgtggcgattttgctattgacattggcaggaacgtgatccatgggagcgactcagtggagagtgctaacaaggaagctgcgttgtggttccctgacggacctgtgaactggcagagcagccttcattcttggatctacgaatgattctaacgcgtgtggttgtttgttaccctttttatcctttggttatgaatcgaaacatgtctctccgttgttctttttgttagctttgttgcttgtcttcttccctgggaatctatgaaaacctatcttgc

SEQ ID NO: 36982 - protein, 148 aa, Zea mays subsp. mays
MEQTFIMIKPDGVQRGLVGEIICKFEKKGFTLKGLKLITVDRPFAEKHYQDLSAKPFFNSLVDYIISGPVVAMIWEGKNVVLTGRKIIGATNPAASEPGTIRGDFAIDIGRNVIHGSDSVESANKEAALWFPDGPVNWQSSLHSWIYE

SEQ ID NO: 36983 - protein, 142 aa, Zea mays subsp. mays
MIKPDGVQRGLVGEIICKFEKKGFTLKGLKLITVDRPFAEKHYQDLSAKPFFNSLVDYIISGPVVAMIWEGKNVVLTGRKIIGATNPAASEPGTIRGDFAIDIGRNVIHGSDSVESANKEAALWFPDGPVNWQSSLHSWIYE

SEQ ID NO: 36984 - protein, 76 aa, Zea mays subsp. mays
MIWEGKNVVLTGRKIIGATNPAASEPGTIRGDFAIDIGRNVIHGSDSVESANKEAALWFPDGPVNWQSSLHSWIYE

SEQ ID NO: 36985 - DNA, 672 bp, Zea mays subsp. mays
agatctcccccatttctcctccacgctgccccctccgcatttcccgtgctcctctcgttccggcatggcggagcagacgcagccacaaggggaaggcggcgctagccccaagcacgagtccctgatggagaagctcgccgacaagctccacgtcggcggcggcaaggccgactcctcctcctcctcggactccgacagtgacgagcggccccgcccctcggcaccgcctgccgacgagctcaagcagccctccttctccgacgccgccgccacggcggccgccgaggccaaagccaaggtgttccgccttttcggccgcgagcagcccatccacaaggccctcggtggcggcaagcgtatggttctgtttcccacgctcccgatgctgcttgctattaggcttgagatttctagatcggatctgggtgggcctcggtgctcgggttgcgggctactagatctgactgctggagtacgttttatggaatgcgctagctagggtgttaagaacgaactggccgtttggatcacagattgggatcttgcctgctttgacaaatggaggcgactagtatgcttgatcactctaacgcttgcttcaaatttgatcaatccaagtcagtgcacttgggtacttatctgaactgtatgctgctaatatttctcaatgtt

SEQ ID NO: 36986 - protein, 165 aa, Zea mays subsp. mays
DLPHFSSTLPPPHFPCSSRSGMAEQTQPQGEGGASPKHESLMEKLADKLHVGGGKADSSSSSDSDSDERPRPSAPPADELKQPSFSDAAATAAAEAKAKVFRLFGREQPIHKALGGGKRMVLFPTLPMLLAIRLEISRSDLGGPRCSGCGLLDLTAGVRFMECAS

SEQ ID NO: 36987 - protein, 144 aa, Zea mays subsp. mays
MAEQTQPQGEGGASPKHESLMEKLADKLHVGGGKADSSSSSDSDSDERPRPSAPPADELKQPSFSDAAATAAAEAKAKVFRLFGREQPIHKALGGGKRMVLFPTLPMLLAIRLEISRSDLGGPRCSGCGLLDLTAGVRFMECAS

SEQ ID NO: 36988 - protein, 124 aa, Zea mays subsp. mays
MEKLADKLHVGGGKADSSSSSDSDSDERPRPSAPPADELKQPSFSDAAATAAAEAKAKVFRLFGREQPIHKALGGGKRMVLFPTLPMLLAIRLEISRSDLGGPRCSGCGLLDLTAGVRFMECAS

SEQ ID NO: 36989 - DNA, 1048 bp, Zea mays subsp. mays
actttcgccgctgctctccgctttcatagggtttatctctttcctcttcccctctcgcgcacggcagccggattccctaccgcaggcgagccaccacgccggccggagctcggagataaggtagttgtttagcaagcaatcgagaatgtcgtcggtgcagctctccggtgccggtgttgccacggtggccttcaacaacactggtctgcgcccctctcaggcgtcagcagtcagagtgtgctcatcgaggcgctcatctcgtagcctcgttgtcagggctgccactgtcgtcaccccgaagtatacatcactcaagcctctgggagacagagtgcttgtgaagcttagcgcagctgaggagaagaccattggtggaattttgcttccatcctccgcgcagtccaagcctcagggaggcgagattgttgctgttggagggggtagaaccattggggataagaaggtggaggtcagcataccgactggatctcaagttgtatattcaaagtatgctggtactgaggttgaatacaacaactccaagcatcttattatgaaagaggatgacatcataggtattcttgaatctgatgatgtcaaagacatgaagcctctcaatgaccggattctcatcaaggttgcagaggcttcagacaagactgaagctggtcttatcctcaccgagacaaccaaggagaagccatccattggaacagtcgtagctgttggtccgggctctcttgacgaggaaggcaagaggcagccattgccagtgtcaccaggcagcaccgtgctgtactccaagtacgcaggcggcgagttcaagggagctgatggcacgaactacattgtgttgagagtgtctgatgtgatggctgagctctcttaagtgtgtggtttattactttgtttcagttttgagttcacgatataggctagcatgagtggtaagattgctatgtgataaccacttgatgctgtttcggatgattacggaattgtacgagcaaacctgttgtctgggataaaaacatttactgaatttgtt

SEQ ID NO: 36990 - protein, 247 aa, Zea mays subsp. mays; identical to SEQ ID NO: 16602

SEQ ID NO: 36991 - DNA, 654 bp, Zea mays subsp. mays
ctcaccctccctcgccgtccaaacccaatcagaaatctcaagcttagcacagcaccaatggcgtcggagcagaccttcatcatgatcaagcctgatggcgtccagaggggcctcatcggtgaggtcatcagccgcttcgagaagaagggcttctacctcaaaggtctgaagctccagaacgtggagaagtcgttcgccgagcagcactacgccgatctgtcctccaagcccttcgctgggctcgtggagtacatcgtctccggccctgtcgtcgctatggtctgggagggcaagagcgtcgtctccactggacgcaagataattggcgccaccaaccccctggcctctgagcccggcaccatccgtggtgactttgccgtcgacatcggcaggaacgtcatccatggaagcgactcagttgagagtgcgaggaaggagatcgccctgtggttccctgagggcattgcagagtggaggagcagccagcacaactggatctatgaggcctaagatgtgtcatgagtggttgagtgcaggtttcattaagcatctaccaaactagtctttggttgtttacagttttgagatttgtatcttgggaaccttgtttgtgtgaactgaagttatctccttgtgcttgggcatccaagcggt

SEQ ID NO: 36992 - protein, 169 aa, Zea mays subsp. mays
LTLPRRPNPIRNLKLSTAPMASEQTFIMIKPDGVQRGLIGEVISRFEKKGFYLKGLKLQNVEKSFAEQHYADLSSKPFAGLVEYIVSGPVVAMVWEGKSVVSTGRKIIGATNPLASEPGTIRGDFAVDIGRNVIHGSDSVESARKEIALWFPEGIAEWRSSQHNWIYEA

SEQ ID NO: 36993 - protein, 150 aa, Zea mays subsp. mays
MASEQTFIMIKPDGVQRGLIGEVISRFEKKGFYLKGLKLQNVEKSFAEQHYADLSSKPFAGLVEYIVSGPVVAMVWEGKSVVSTGRKIIGATNPLASEPGTIRGDFAVDIGRNVIHGSDSVESARKEIALWFPEGIAEWRSSQHNWIYEA

SEQ ID NO: 36994 - protein, 142 aa, Zea mays subsp. mays
MIKPDGVQRGLIGEVISRFEKKGFYLKGLKLQNVEKSFAEQHYADLSSKPFAGLVEYIVSGPVVAMVWEGKSVVSTGRKIIGATNPLASEPGTIRGDFAVDIGRNVIHGSDSVESARKEIALWFPEGIAEWRSSQHNWIYEA

SEQ ID NO: 36995 - DNA, 493 bp, Zea mays subsp. mays
cttcccatcctgctctgctcagcgcctctactgcttcccctccgtccaccgatcgagtgaaaaagctctccgttcgccggaagatccacgaccatggcgggcacggccaactgcatcgacatcatcctcgccatcatcctcccgcccctcggcgtcttcctcaagttcggatgcgggcacgagttctggatctgcctcttgctgaccttcctcgggtacatcccgggtatcatctacgccatctacgccatcaccaagtaaactagcaagccgtcccgagtgttccgcgacacaatattttcaggatgatttgatctgtctagtccctccttgcctgtgtgggttcttttaattcttttccgtgtgcgttgatgatgcgaattcctctgtggtttccatggaccatgtgaagagcatcagcttctgtatgtatatgtactagtatgatatatgggagtttatatatgcttcccgagtgggaatacttcttgct

SEQ ID NO: 36996 - protein, 87 aa, Zea mays subsp. mays
SHPALLSASTASPPSTDRVKKLSVRRKIHDHGGHGQLHRHHPRHHPPAPRRLPQVRMRARVLDLPLADLPRVHPGYHLRHLRHHQVN

SEQ ID NO: 36997 - protein, 67 aa, Zea mays subsp. mays
FPSCSAQRLYCFPSVHRSSEKALRSPEDPRPWRARPTASTSSSPSSSRPSASSSSSDAGTSSGSASC

SEQ ID NO: 36998 - protein, 55 aa, Zea mays subsp. mays; identical to SEQ ID NO: 28903

SEQ ID NO: 36999 - DNA, 699 bp, Zea mays subsp. mays
aaaaacacacaaagctcatcgagagaagattcagacatttcatagcttctttattccttcccgaaggggtaccctgagatcacaaaggataacaaacaatgggcaagggagttgcagtcttgaacagcagtgagggtgttaaggggactatcttcttcacccaggaaggagacggtgtgaccactgtgactggaacagtttctggacttaaacctggtctacatggtttccatgtccatgctcttggtgacaccactaacggttgcatgtccaccggtccacatttcaaccctgatggtaaacaacacggtgccccagaggatgctaatcgtcatgctggagatctaggaaacatcattgttggagatgatggaactgccaccttcacaatcactgactgccagattcctcttagtggaccaaactctattgtcggaagggctgttgttgtccacgcagaccctgatgacctcggaaagggaggccatgaactcagcttggctaccggaaacgcaggcgggcgtgttgcttgtggtattattggtcttcagggctaagtaagctgttacttatcgaggaagggagtgatgcaataaggaggtcatatacctctagacctggctagtttgtgtgtgtatctgtgtgtactgtgtgtgtggctataatctctcctttgtggctcaatacattttatttaag

SEQ ID NO: 37000 - protein, 152 aa, Zea mays subsp. mays
MGKGVAVLNSSEGVKGTIFFTQEGDGVTTVTGTVSGLKPGLHGFHVHALGDTTNGCMSTGPHFNPDGKQHGAPEDANRHAGDLGNIIVGDDGTATFTITDCQIPLSGPNSIVGRAVVVHADPDDLGKGGHELSLATGNAGGRVACGIIGLQG

SEQ ID NO: 37001 - protein, 96 aa, Zea mays subsp. mays
MSTGPHFNPDGKQHGAPEDANRHAGDLGNIIVGDDGTATFTITDCQIPLSGPNSIVGRAVVVHADPDDLGKGGHELSLATGNAGGRVACGIIGLQG

SEQ ID NO: 37002 - DNA, 1314 bp, Zea mays subsp. mays
accaggatcagcaaagagacatccaagaactccaatggctgatgagtcatggaggctgccgagttcagtgcagcaactggctgccagcatacaggagccaccaaggcagtacttgctcagagagcaagaaccgcttggtgggaacctggctggtacggagatgccggaccccattccaacaatcgatctcggcctgctgtctgcatccaacgacgcggaggaagccgccaagctgcggtcggcactgcagacctggggattcttcaaggtttctaaccatggaatggagacctctctgatggattctgtgatgaccgcatcaagggatttcttccgcctaccgcttgaagagaagagaaagtacagtaacataataggtgggaaacatttccagatggaagggtatggaactgaccaggtgaaaactcaagaccaaaggctggactggtccgatcgactgcatcttaaagtggagccagaggacgagagaaaccttgccctttggcccatacatccaaaatctttcagggatgacctgcatgagtacacattgaggagcaagagaattaaagacgacatccttcgggcaatggccaagctactggagctcgatgaagattgcctagttaaccagtttagcgacagggctctcacttatgctagattcaattactatcctccatgtccaaggcctgatcttgtcttgggcatcaagcctcactctgatgtctacgctcttacggttcttctaatggacaaagatgtcgctgggctgcagtttctcagagatggaacgtggtacaatgtcccatctgcgtctaactacaccttgctgatcaacgttggtgttacaatggagataatgaccaacgggatatttaaagggccagtacatagggttgtgactaattctgagaaagagaggatgtcagtggccgtgttctatggcctggatcctgaaagagagattggaccgatagctcagatgttgactgaggaccaaccggcgcgatacaggaaaatgaaggtcaaggatttcctggtcgcgcaccttgagcatttctctcgaggagaaagagtcgtcgattcgttaaggatatgatcaaggtgagtttgctttggtgctgcaatacccatggaataaagaatttgtgacttgcctattcgttaaggatataaacgaggcgactttacttctataaggcgatgaatctggtgaaaataaataatttcatcgtatttatgttgcattttgggtttgttctgtggtagatgtggctctatggacacctttgtattctcttacctcaagtg

SEQ ID NO: 37003 - protein, 366 aa, Zea mays subsp. mays
PGSAKRHPRTPMADESWRLPSSVQQLAASIQEPPRQYLLREQEPLGGNLAGTEMPDPIPTIDLGLLSASNDAEEAAKLRSALQTWGFFKVSNHGMETSLMDSVMTASRDFFRLPLEEKRKYSNIIGGKHFQMEGYGTDQVKTQDQRLDWSDRLHLKVEPEDERNLALWPIHPKSFRDDLHEYTLRSKRIKDDILRAMAKLLELDEDCLVNQFSDRALTYARFNYYPPCPRPDLVLGIKPHSDVYALTVLLMDKDVAGLQFLRDGTWYNVPSASNYTLLINVGVTMEIMTNGIFKGPVHRVVTNSEKERMSVAVFYGLDPEREIGPIAQMLTEDQPARYRKMKVKDFLVAHLEHFSRGERVVDSLRI

SEQ ID NO: 37004 - protein, 355 aa, Zea mays subsp. mays
MADESWRLPSSVQQLAASIQEPPRQYLLREQEPLGGNLAGTEMPDPIPTIDLGLLSASNDAEEAAKLRSALQTWGFFKVSNHGMETSLMDSVMTASRDFFRLPLEEKRKYSNIIGGKHFQMEGYGTDQVKTQDQRLDWSDRLHLKVEPEDERNLALWPIHPKSFRDDLHEYTLRSKRIKDDILRAMAKLLELDEDCLVNQFSDRALTYARFNYYPPCPRPDLVLGIKPHSDVYALTVLLMDKDVAGLQFLRDGTWYNVPSASNYTLLINVGVTMEIMTNGIFKGPVHRVVTNSEKERMSVAVFYGLDPEREIGPIAQMLTEDQPARYRKMKVKDFLVAHLEHFSRGERVVDSLRI

SEQ ID NO: 37005 - protein, 313 aa, Zea mays subsp. mays
MPDPIPTIDLGLLSASNDAEEAAKLRSALQTWGFFKVSNHGMETSLMDSVMTASRDFFRLPLEEKRKYSNIIGGKHFQMEGYGTDQVKTQDQRLDWSDRLHLKVEPEDERNLALWPIHPKSFRDDLHEYTLRSKRIKDDILRAMAKLLELDEDCLVNQFSDRALTYARFNYYPPCPRPDLVLGIKPHSDVYALTVLLMDKDVAGLQFLRDGTWYNVPSASNYTLLINVGVTMEIMTNGIFKGPVHRVVTNSEKERMSVAVFYGLDPEREIGPIAQMLTEDQPARYRKMKVKDFLVAHLEHFSRGERVVDSLRI

SEQ ID NO: 37006 - DNA, 851 bp, Zea mays subsp. mays
accataccacaccattgacgcggcaagtcggcagaaactcatcaaaagcgcacaagctcgagccagaacacgagcccacgatggccggcattcgccgcgcccccgcgctcctcctgctgctcgccctcgcgtgcacccccgccctggccgcgcgcgacgtctccagcagcgccgccaaggcgaagaccaagtacccctcgggcccggcgcccggcaagaagccggccaagccgtacgtgccaccagccaccaagccccccgggtcgggcgccgtcgacggaggcgggatgcccgccatccccggcttcggcaccatccccgggttcaccgtgcccgggatggggggcgggtggggcgggggctacggcgggcccgacggcgggtactcgcgcggcggcgtggcggcctccaccaccgtctgctccgagaagggcccctgctacaagaagaagctgacgtgccccaagaagtgcttctcctcctacagcggcgccggcaaggggtacggcggcggcggcggcgggggcggctgcaccgtcgactgcaagaccaagtgcatcgcctactgctgagtgctgatcgatcgtacgtacgtacggggagctcggcggctccttggcttccatggtcatcgatggcgccggtgagcaccacattatacgtagctatcttgcgtgatacgcagaggaggcgcatacggctgtatgtttcctccccgatgtcgttctagtcggctgtaatatcgtcgcctcatgggtgtcagaattgctatgaactatgaagtgtatgagcaaataaacatagagatattactcttgggtcttgctgtttcttcaaatgcagtacatttc

SEQ ID NO: 37007 - protein, 242 aa, Zea mays subsp. mays
PYHTIDAASRQKLIKSAQARARTRAHDGRHSPRPRAPPAARPRVHPRPGRARRLQQRRQGEDQVPLGPGARQEAGQAVRATSHQAPRVGRRRRRRDARHPRLRHHPRVHRARDGGRVGRGLRRARRRVLARRRGGLHHRLLREGPLLQEEADVPQEVLLLLQRRRQGVRRRRRRGRLHRRLQDQVHRLLLSADRSYVRTGSSAAPWLPWSSMAPVSTTLYVAILRDTQRRRIRLYVSSPMSF

SEQ ID NO: 37008 - protein, 189 aa, Zea mays subsp. mays
HTTPLTRQVGRNSSKAHKLEPEHEPTMAGIRRAPALLLLLALACTPALAARDVSSSAAKAKTKYPSGPAPGKKPAKPYVPPATKPPGSGAVDGGGMPAIPGFGTIPGFTVPGMGGGWGGGYGGPDGGYSRGGVAASTTVCSEKGPCYKKKLTCPKKCFSSYSGAGKGYGGGGGGGGCTVDCKTKCIAYC

SEQ ID NO: 37009 - protein, 163 aa, Zea mays subsp. mays
MAGIRRAPALLLLLALACTPALAARDVSSSAAKAKTKYPSGPAPGKKPAKPYVPPATKPPGSGAVDGGGMPAIPGFGTIPGFTVPGMGGGWGGGYGGPDGGYSRGGVAASTTVCSEKGPCYKKKLTCPKKCFSSYSGAGKGYGGGGGGGGCTVDCKTKCIAYC

SEQ ID NO: 37010 - DNA, 1106 bp, Zea mays subsp. mays
attatctatcttcgttaataatatcgacgcggttaattgattctctctctctggaagcaaaagaaaacaaaaagacatggattcgttctcgtccttcttcgattctcagccaggcagcagaagctggagctatgattctctcaagaacctccatcagatctccccgtccgtccagaatcatctcaagcgggtttacctcactttatgctatgcccttgttgcgtctgcctttggagcttacctccacgtgctctggaacatcggtggtattctcacaaccattgcatgttgtggaaccatgatttggcttctctcatgccctccttatgaacaacaaaagaggctctcacttctcttcatgtctgccgttcttgaaggtgcctctgttggccccttgatcaaagtggctgttgattttgacccaagcatccttatcactgcgtttgtcggaactgcgatagcgtttatctgtttctcaggagcagcgatgctggcaagacgcagagagtatctctacctcggaggacttctctcttctggcttgtccatgcttatgtggcttcagtttgcttcttccatctttggtggctctgcgtccatctttaagttcgagctctactttggactcttgatctttgtgggatacatggtggtggacacacaagagattatagagaaagcacacctaggggacatggactatgtgaaacatgcattgacccttttcaccgattttgtggctgtgtttgtccgtgttctcatcataatgctgaagaactcggcagataaagaggagaagaagaagaagaggagaaactgaaactaaaagtgacaaggaaagctaataagagtgggtgttttaaataacatgaaagcgttggtgtttttacgtgttaggacgtacttttggtttgcgtatgcctcttatcgcacgcgattgtaaatggatcaagtagttttcgtttttatctcgactctcgttcactttcgtattgttcgaagtgtttcctctactgtttaatcactttgagatgagaattagcagggtaataattaagtaattggaccaaaaaaaaaaaaaaaaaagcttatcgataccgtcgacc

SEQ ID NO: 37011 - protein, 247 aa, Zea mays subsp. mays
MDSFSSFFDSQPGSRSWSYDSLKNLHQISPSVQNHLKRVYLTLCYALVASAFGAYLHVLWNIGGILTTIACCGTMIWLLSCPPYEQQKRLSLLFMSAVLEGASVGPLIKVAVDFDPSILITAFVGTAIAFICFSGAAMLARRREYLYLGGLLSSGLSMLMWLQFASSIFGGSASIFKFELYFGLLIFVGYMVVDTQEIIEKAHLGDMDYVKHALTLFTDFVAVFVRVLIIMLKNSADKEEKKKKRRN

SEQ ID NO: 37012 - protein, 173 aa, Zea mays subsp. mays
MIWLLSCPPYEQQKRLSLLFMSAVLEGASVGPLIKVAVDFDPSILITAFVGTAIAFICFSGAAMLARRREYLYLGGLLSSGLSMLMWLQFASSIFGGSASIFKFELYFGLLIFVGYMVVDTQEIIEKAHLGDMDYVKHALTLFTDFVAVFVRVLIIMLKNSADKEEKKKKRRN

SEQ ID NO: 37013 - protein, 153 aa, Zea mays subsp. mays
MSAVLEGASVGPLIKVAVDFDPSILITAFVGTAIAFICFSGAAMLARRREYLYLGGLLSSGLSMLMWLQFASSIFGGSASIFKFELYFGLLIFVGYMVVDTQEIIEKAHLGDMDYVKHALTLFTDFVAVFVRVLIIMLKNSADKEEKKKKRRN

SEQ ID NO: 37014 - DNA, 739 bp, Zea mays subsp. mays
acgaccatcggaccaaagaatcatacccctcctttctagccattcaaactagtaaacaatggggatactcaggaagaaaaaacacgagcgaaagccgtcgtttaagagtgttttaaccgcaatattagctacacatgccgcaacattcctcttgttgatcgccggtgtatccctcgccggcacagccgccgcatttatcgctaccatgccactattcgtagtattcagtccgattctcgtaccagctggtattaccactggtttactgactacgggtttagcagccgccggtggcgccggcgcaactgctgtcaccatcatcctgtggctctacaagcgagcaacgggcaaggcgccgccaaaagtcctagaaaaagtcttgaaaaagataataccaggtgctgcagctgcaccagcagccgctccaggagccgctccagcagcggcgccagcagccgcaccagctgcggcgccagcagccgcaccagctgctgcgccagcacctaagccagcagccccaccagcacctaagccagcagccccaccgagtatatgaaaagaagtggtgggcatgagtaaaggttgatatggaaaactggatacatggaaaaaagagtaatccaacttttaaaaaataaataacaacttcacgtggggatagaaaaattttcaaatattattttactaatggatgtcgcggtacaaaataataacaaatgtaagcctttttattgtatag

SEQ ID NO: 37015 - protein, 165 aa, Zea mays subsp. mays
MGILRKKKHERKPSFKSVLTAILATHAATFLLLIAGVSLAGTAAAFIATMPLFVVFSPILVPAGITTGLLTTGLAAAGGAGATAVTIILWLYKRATGKAPPKVLEKVLKKIIPGAAAAPAAAPGAAPAAAPAAAPAAAPAAAPAAAPAPKPAAPPAPKPAAPPSI

SEQ ID NO: 37016 - protein, 116 aa, Zea mays subsp. mays
MPLFVVFSPILVPAGITTGLLTTGLAAAGGAGATAVTIILWLYKRATGKAPPKVLEKVLKKIIPGAAAAPAAAPGAAPAAAPAAAPAAAPAAAPAAAPAPKPAAPPAPKPAAPPSI

SEQ ID NO: 37017 - DNA, 553 bp, Zea mays subsp. mays
aaaagccctcgttccccaaagccagatttcttctccagcctttcatcgcacgaaaggcatcaatggcggcggcgggcccagccaagacggaggtgctgtccctcttccgcgccttcctccgcacggcgaggcagttctccgactacaacatccgcgagtacacgcggcgccgcgcggcggacgccttccgcgagaaccgcgccctcgccgacgcgccggccgcggcggcggctttcgcggacgggaagcagcagctggaggtggccaagcggcaagtgctggtgtactctctgtacgcgcccaaggccaagagcgttgtggagatgaagattcagtgagcgacaccagggagaggtttcacgcccgccatctcctcctttttcccctttcgggtctgggctcttttatgtactgttagtagggttattatggagatctgacgctgatagaaattctgccgttactatgtttgctggataattgccatgatacggtggttgctattgttcaataagttcgcaaattaatgatcatgatactatgcgtttcgcgc

SEQ ID NO: 37018 - protein, 138 aa, Zea mays subsp. mays
KALVPQSQISSPAFHRTKGINGGGGPSQDGGAVPLPRLPPHGEAVLRLQHPRVHAAPRGGRLPREPRPRRRAGRGGGFRGREAAAGGGQAASAGVLSVRAQGQERCGDEDSVSDTRERFHARHLLLFPLSGLGSFMYC

SEQ ID NO: 37019 - protein, 111 aa, Zea mays subsp. mays
KPSFPKARFLLQPFIARKASMAAAGPAKTEVLSLFRAFLRTARQFSDYNIREYTRRRAADAFRENRALADAPAAAAAFADGKQQLEVAKRQVLVYSLYAPKAKSVVEMKIQ

SEQ ID NO: 37020 - protein, 108 aa, Zea mays subsp. mays
KSPRSPKPDFFSSLSSHERHQWRRRAQPRRRCCPSSAPSSARRGSSPTTTSASTRGAARRTPSARTAPSPTRRPRRRLSRTGSSSWRWPSGKCWCTLCTRPRPRALWR

SEQ ID NO: 37021 - protein, 91 aa, Zea mays subsp. mays; identical to SEQ ID NO: 25775

SEQ ID NO: 37022 - DNA, 686 bp, Zea mays subsp. mays
ccattacctagaacatcctaatcgaaaaaaaacccactcacacactgtgacgctgctgatgcgcctcatcgtccccgtccccccggcagagcccacccaccctccactccaacccacgccggcgaacccagccagccgcccacgtcgcctcccggtcccggcttagaccagactcagattcagatgcacctgctcgacgacctccgccaagaccgcggcggcgcggccgcccacaccggcagccgcagtcgcaagccgcccccgccccttgccgccgccgccgccgccgccgcgggggtcccggcgggctcctccaccgccgccaccgccacccacctgggcccggaggcggcggcgctgctggcgtgcgtcacggccacgctgctgctgcttccgctggtcctgccgcccctgccgccgccgccgccgctcctcctcctcgtgcccgtcgccatcttcgccgtcctgctactcctcgtgctcctcccctccgacgcccgcgccgccgtcgccacgcccacctcctccgcctcctacttgtagcagtagcttatacgtcttgttgtacagggtactggtacctagctagctgatcgagtgagttgagtgacagagtgagtagagtggattttggtaggcgtgcatgcaaaatgtaaataaaaccaaaccccagcgcggattcttct

SEQ ID NO: 37023 - protein, 119 aa, Zea mays subsp. mays
MHLLDDLRQDRGGAAAHTGSRSRKPPPPLAAAAAAAAGVPAGSSTAATATHLGPEAAALLACVTATLLLLPLVLPPLPPPPPLLLLVPVAIFAVLLLLVLLPSDARAAVATPTSSASYL

SEQ ID NO: 37024 - DNA, 731 bp, Zea mays subsp. mays
aaagcaggttccctctcttctagccattcaaaaatagtgagaatggggttgttgaagaaaaaacacgagaaacattcacatccgacatttaagggtttcttaacggccgttttagctaccatagccgcaatgttcctcttattgctcgccggtttatccctcgctggcacagccgtggcatttatcgccactatgccgctattcgtcgtattcagtccggttctcgtaccagctggtattaccactggtttgctagctatgggtttagccacctcgggcggctccggtttgacggctctcagcatcatgtcgtggctcaagaaattaacggttaaggagctgctaaaaattccgggtcaaacgctcgtcacaggtgttcactcccaaattttgttctccaggtggccatggatcgcactgaataaatgaaaagaagccgtgggcatagccaaatgatgatatgaaataattgatatatagttattataatttcctaaattaaatctagttaacccaacttttcttagtaataattattacgtgggggtggaactagagttttcaaatagcatcttattaatgtatgtcgtggtacacaataatgaaaaatgtatgcgttttcgctacctactgctatactgtactctacaactatgcaagtattgtatatgatatctaatggtatatcattttgaaaacgaaataatgtcattaatatttacctttagacc

SEQ ID NO: 37025 - protein, 142 aa, Zea mays subsp. mays
KAGSLSSSHSKIVRMGLLKKKHEKHSHPTFKGFLTAVLATIAAMFLLLLAGLSLAGTAVAFIATMPLFVVFSPVLVPAGITTGLLAMGLATSGGSGLTALSIMSWLKKLTVKELLKIPGQTLVTGVHSQILFSRWPWIALNK

SEQ ID NO: 37026 - protein, 128 aa, Zea mays subsp. mays
MGLLKKKHEKHSHPTFKGFLTAVLATIAAMFLLLLAGLSLAGTAVAFIATMPLFVVFSPVLVPAGITTGLLAMGLATSGGSGLTALSIMSWLKKLTVKELLKIPGQTLVTGVHSQILFSRWPWIALNK

SEQ ID NO: 37027 - protein, 99 aa, Zea mays subsp. mays
MFLLLLAGLSLAGTAVAFIATMPLFVVFSPVLVPAGITTGLLAMGLATSGGSGLTALSIMSWLKKLTVKELLKIPGQTLVTGVHSQILFSRWPWIALNK

SEQ ID NO: 37028 - DNA, 1001 bp, Zea mays subsp. mays
acatcctaatcgaaaaaatcgcttcttccaaacatcgaatggcttctcacaccttcctctccttctcatcgcctccgcgcctcctcgtttcccctccctccactctccgttcccctttcgtcggcgtctctctcaacctccaccgtccccagtccgtttccttctccgcctcgaagaaatcgctgacagtcgtttccgccgcgaagaaagctgtcgctgtgctcaagggtaactccgacgtcgaaggagttgttactttgacacaagatgactcaggtccgacaaaagtgagtgttcgtatcaccggtctcacgccagggcctcatggctttcacctccatgagtttggtgatacaacaaatggatgcatctcaacagggccacatttcaaccctaacaacatgacacacggagctcctgaagacgagatccgtcatgcgggtgacctgggaaacattattgccaacgccgatggcgtggcagaaacaacacttgtggacaatcagattcctctgactggtcctaactctgttgttgaaagagcctttgtggttcacgagcttaaggatgacctcggaaagggtgggcatgagcttagcctgaccactggaaacgcaggcgggagattggcatgcggtgtggttggtttgacgccgctctaagtctgggctaagtaagtactttggtgtctactgtgttggtcgtcttgtctgttgaatcagatgtcaaataaagttggctgaataagctattgatgtttatgttcctagcatcaaactctctttctggagttgtgcctttgtaaacgtgtttgttacttttggtttaaatctgcattcgatcgtttgttttgctattactttccttttaccaagcttagattttggttttaggtaaagaggtaaactgattttaagagagttaaaaaaaaaaaaaccaaaaaaaaaaaaaaaaaagcttatcgattgtttaaacacaataaagttggaactggagggggg

SEQ ID NO: 37029 - protein, 219 aa, Zea mays subsp. mays
ILIEKIASSKHRMASHTFLSFSSPPRLLVSPPSTLRSPFVGVSLNLHRPQSVSFSASKKSLTVVSAAKKAVAVLKGNSDVEGVVTLTQDDSGPTKVSVRITGLTPGPHGFHLHEFGDTTNGCISTGPHFNPNNMTHGAPEDEIRHAGDLGNIIANADGVAETTLVDNQIPLTGPNSVVERAFVVHELKDDLGKGGHELSLTTGNAGGRLACGVVGLTPL

SEQ ID NO: 37030 - protein, 207 aa, Zea mays subsp. mays
MASHTFLSFSSPPRLLVSPPSTLRSPFVGVSLNLHRPQSVSFSASKKSLTVVSAAKKAVAVLKGNSDVEGVVTLTQDDSGPTKVSVRITGLTPGPHGFHLHEFGDTTNGCISTGPHFNPNNMTHGAPEDEIRHAGDLGNIIANADGVAETTLVDNQIPLTGPNSVVERAFVVHELKDDLGKGGHELSLTTGNAGGRLACGVVGLTPL

SEQ ID NO: 37031 - DNA, 670 bp, Zea mays subsp. mays
aaaaatctcaatctcgatttgagacgaaaaggaagagaagctgaagctaaagatgggtcaaggagaagaagacaaaagcaaaggcttcgctgatgaagcaggcacccatcatcagtacggtacgtttcaaggcgtttccaattaccctcctccgcggcctcagaactctcctccggtcactgggtttcctcagccttctgctccgcctcgagtctacgattccgcccctcctcattacgcccatggttatcaaaccgttccggtacatggtattgctgaaggaagacctgtgcatgtgcgacaacgccgccttccttgctgtggaattggtcttggatggttcctgttcatagttgggtttttccttggagcaatcccttggtacgtcggaatgttcatcatgatagttggaaggaggattgaccacagggagaagccaggatacattgcttgcaccatcgctgctatacttgcaacaattgctgtgattcttggtgtaactaaaggagcagaagactggtgatcaatcaaaactatctttgtggtcaagtcagaacgtttgtataggtgtcagacaaacatttcgtcttgtattttattatattcgtgctgcttgaagaaagacaaaaaggtgtaaacttaataaaaagatatgagttaagttatttgc

SEQ ID NO: 37032 - protein, 156 aa, Zea mays subsp. mays
MGQGEEDKSKGFADEAGTHHQYGTFQGVSNYPPPRPQNSPPVTGFPQPSAPPRVYDSAPPHYAHGYQTVPVHGIAEGRPVHVRQRRLPCCGIGLGWFLFIVGFFLGAIPWYVGMFIMIVGRRIDHREKPGYIACTIAAILATIAVILGVTKGAEDW

SEQ ID NO: 37033 - protein, 86 aa, Zea mays subsp. mays
MKQAPIISTVRFKAFPITLLRGLRTLLRSLGFLSLLLRLESTIPPLLITPMVIKPFRYMVLLKEDLCMCDNAAFLAVELVLDGSCS

SEQ ID NO: 37034 - DNA, 664 bp, Zea mays subsp. mays
atccttaaaaatccgacgattcagaaccctaagcggtggatcctcaacaactatggctgaacaaccacagcagcagcgagaatccgattcttcccctcctcagctgaagttaccttctttcgtcgttaacttgttcccctttctccaacccaagtctccttctcccgctaacggcgccgatggtgctcctaaacccgcgggaggagtctccaaggacaaggagactcagaactcgacggtctctttcccttacaatcctcccaagagcacagagccactcaagcttgaagccgaacctagctccggaagcacttccaactccctcgtcatttggcaggtatatgcacttggagggtttctggtcctgaagtgggcttgggcgagatggaatgagaggaaccagacaagtgacaaaaaggaggatgatgatgctgatggtgatgatcaagctcctcatccggaagatgattgatgatgaaggctgctagtcatatttgcacgaagacgatgaatctgttgcccccattttggttctgtatagcaaaaactccctttcagattttcttatattcccattgtatctactcaagactgtcttgagttccttctacttctgtaatgacactacttttctcctctcccaatgcagtttttttctcttttc

SEQ ID NO: 37035 - protein, 156 aa, Zea mays subsp. mays
SLKIRRFRTLSGGSSTTMAEQPQQQRESDSSPPQLKLPSFVVNLFPFLQPKSPSPANGADGAPKPAGGVSKDKETQNSTVSFPYNPPKSTEPLKLEAEPSSGSTSNSLVIWQVYALGGFLVLKWAWARWNERNQTSDKKEDDDADGDDQAPHPEDD

SEQ ID NO: 37036 - protein, 139 aa, Zea mays subsp. mays
MAEQPQQQRESDSSPPQLKLPSFVVNLFPFLQPKSPSPANGADGAPKPAGGVSKDKETQNSTVSFPYNPPKSTEPLKLEAEPSSGSTSNSLVIWQVYALGGFLVLKWAWARWNERNQTSDKKEDDDADGDDQAPHPEDD

SEQ ID NO: 37037 - DNA, 1494 bp, Zea mays subsp. mays
ccttgttctctcccctctccctctccccccctccgcctccgcctccgcctctcgaactcgtcgagcgccgcgaccgacgcacgcgcgcgcggcggcgagatgaaggtctccgtgaagacgctcaagggctccaaattcgagatcgaagtgaaccccgccgacaaggtttctgatgtaaagaagctcattgagacttcacaagggcagaatgtgtacccagctgatcaacaaatgctcatataccaagggtcagttcttaaggacgagactatgctggaggaaaacaaagttgttgaaaacaactttcttgtgataatgcttagacagaataagggctcatcaagtgcagctccagctaaatccaaggaaccctcaaatcaggcaccccctactcagacagtgcctgctactcctgcctctcaagcaccagccacaccagcacctcaagcagtggctgcgccagcacctattgtacctgtcagtgctcctggtccagctgccaccgcctccccagctcctgctgttgctgtctccactgaagcagaaacttatggtcaggctgcttcaaaccttgtcgcaggaggcaccctagaggcaacaattcagtcaattcttgaaatgggtggtggaacatgggacagagacactgtgctgcgtgccctacgtgctgcattcaacaacccggagcgggctgttgagtatttatattctggtattcctgagccgatggagattcctgcaccaccaccaagtgcccagccagctgatcctgccctggcttcgcaagcagctcaacctgcagttgcctcttccggtcctaatgctagccccttggacctcttccctcaagccctgccaaatgcttcagcaaatgctgctggtgaaggaaatctggatgttttgcgtaacaatgcacaattccgaagcttactttctttagtgcaggccaaccctcaaatcttacagccattgcttcaagagctgggaaagcaaaaccctcagattttgcagctgattcaggacaaccaagcagagttccttcgtttaatcaatgagccagctgagggcgatgaagacgagaatctcctagagcagttttgctgagggtgtgcctcagaccatagctgtcactcctgaggagaatgaagctatacttcgtcttgaaggaatgggctttgaccgggcgcttgttctggaggtgtacttcgcctgcaacaaggacgagaccctggccgcaaactacctgttagaccacatgaacgagtttgacgacggagcgccgcagtaagacaaagcaggttgtttctgaatacatgcacaagcccatgggaacaagggtgtggggagactgatactcctgcactcgcagggcaggccttagagatctttttgagattttgtctcgtcctttagtttgtaattcttttctgccttgctattagtacatactctagattgtctttaaatgttaattcacagacttaacgacagcgt

SEQ ID NO: 37038 - protein, 367 aa, Zea mays subsp. mays
PCSLPSPSPPLRLRLRLSNSSSAATDARARGGEMKVSVKTLKGSKFEIEVNPADKVSDVKKLIETSQGQNVYPADQQMLIYQGSVLKDETMLEENKVVENNFLVIMLRQNKGSSSAAPAKSKEPSNQAPPTQTVPATPASQAPATPAPQAVAAPAPIVPVSAPGPAATASPAPAVAVSTEAETYGQAASNLVAGGTLEATIQSILEMGGGTWDRDTVLRALRAAFNNPERAVEYLYSGIPEPMEIPAPPPSAQPADPALASQAAQPAVASSGPNASPLDLFPQALPNASANAAGEGNLDVLRNNAQFRSLLSLVQANPQILQPLLQELGKQNPQILQLIQDNQAEFLRLINEPAEGDEDENLLEQFC

SEQ ID NO: 37039 - protein, 334 aa, Zea mays subsp. mays
MKVSVKTLKGSKFEIEVNPADKVSDVKKLIETSQGQNVYPADQQMLIYQGSVLKDETMLEENKVVENNFLVIMLRQNKGSSSAAPAKSKEPSNQAPPTQTVPATPASQAPATPAPQAVAAPAPIVPVSAPGPAATASPAPAVAVSTEAETYGQAASNLVAGGTLEATIQSILEMGGGTWDRDTVLRALRAAFNNPERAVEYLYSGIPEPMEIPAPPPSAQPADPALASQAAQPAVASSGPNASPLDLFPQALPNASANAAGEGNLDVLRNNAQFRSLLSLVQANPQILQPLLQELGKQNPQILQLIQDNQAEFLRLINEPAEGDEDENLLEQFC

SEQ ID NO: 37040 - protein, 290 aa, Zea mays subsp. mays
MLIYQGSVLKDETMLEENKVVENNFLVIMLRQNKGSSSAAPAKSKEPSNQAPPTQTVPATPASQAPATPAPQAVAAPAPIVPVSAPGPAATASPAPAVAVSTEAETYGQAASNLVAGGTLEATIQSILEMGGGTWDRDTVLRALRAAFNNPERAVEYLYSGIPEPMEIPAPPPSAQPADPALASQAAQPAVASSGPNASPLDLFPQALPNASANAAGEGNLDVLRNNAQFRSLLSLVQANPQILQPLLQELGKQNPQILQLIQDNQAEFLRLINEPAEGDEDENLLEQFC

SEQ ID NO: 37041 - DNA, 1140 bp, Zea mays subsp. mays
aataagcatttcacgcttcaccaatggcttctctcatgctcaacggggccatcaccttccccaagggattaggcttccccgcttccaatctacacgccagaccaagtcctccgctgagtctcgtctcaaacacagccacgcggagactctccgtggcgacaagatgcagcagcagcagcagcgtgtcggcgtcaaggccatctgcgcagcctaggttcatccagcacaagaaagaggcctactggttctacaggttcctgtccatcgtgtacgaccacatcatcaatcccggccactggacggaggatatgagggacgacgctctcgagcctgcggatctgagccatccggacatgcgagttgtcgacgtcggaggcggaacgggtttcaccacgctgggaatcgtcaagacggtgaaggctaagaacgtgacgattctggaccagtcgccgcatcagctggcaaaggcgaagcagaaggagccgttgaaggagtgcaagatcgtggaaggagatgcggaggatctcccttttcctactgattatgctgacagatacgtctctgctggaagcattgagtactggcccgacccgcagaggggtataagggaagcgtacagagttctcaagatcggtgggaaagcatgtctcattggccctgtccacccgacgttttggctttcacgcttctttgcagatgtgtggatgcttttccccaaggaggaggagtacattgagtggttcaagaatgctggtttcaaggacgttcagcttaagaggattggccccaagtggtaccgtggtgttcgcaggcacggacttatcatgggatgctctgttactggtgtcaaacctgcctctggagactctcctctccagcttggaccaaaggaagaggacgtggagaagcctgtaaacaatcctttctccttcttgggacgcttcctcttgggtaccctagcggctgcctggtttgtgttaatcccaatctacatgtggatcaaggatcagatcgttcccaaagaccaacccatctgataacaacttgtgatttgtaatacactcctatgttagacgcttttttttttgtcctcgtgactatgttgagcccttttcaaaaatatatctatcactctattcc

SEQ ID NO: 37042 - protein, 337 aa, Zea mays subsp. mays
MASLMLNGAITFPKGLGFPASNLHARPSPPLSLVSNTATRRLSVATRCSSSSSVSASRPSAQPRFIQHKKEAYWFYRFLSIVYDHIINPGHWTEDMRDDALEPADLSHPDMRVVDVGGGTGFTTLGIVKTVKAKNVTILDQSPHQLAKAKQKEPLKECKIVEGDAEDLPFPTDYADRYVSAGSIEYWPDPQRGIREAYRVLKIGGKACLIGPVHPTFWLSRFFADVWMLFPKEEEYIEWFKNAGFKDVQLKRIGPKWYRGVRRHGLIMGCSVTGVKPASGDSPLQLGPKEEDVEKPVNNPFSFLGRFLLGTLAAAWFVLIPIYMWIKDQIVPKDQPI

SEQ ID NO: 37043 - protein, 333 aa, Zea mays subsp. mays
MLNGAITFPKGLGFPASNLHARPSPPLSLVSNTATRRLSVATRCSSSSSVSASRPSAQPRFIQHKKEAYWFYRFLSIVYDHIINPGHWTEDMRDDALEPADLSHPDMRVVDVGGGTGFTTLGIVKTVKAKNVTILDQSPHQLAKAKQKEPLKECKIVEGDAEDLPFPTDYADRYVSAGSIEYWPDPQRGIREAYRVLKIGGKACLIGPVHPTFWLSRFFADVWMLFPKEEEYIEWFKNAGFKDVQLKRIGPKWYRGVRRHGLIMGCSVTGVKPASGDSPLQLGPKEEDVEKPVNNPFSFLGRFLLGTLAAAWFVLIPIYMWIKDQIVPKDQPI

SEQ ID NO: 37044 - protein, 242 aa, Zea mays subsp. mays
MRDDALEPADLSHPDMRVVDVGGGTGFTTLGIVKTVKAKNVTILDQSPHQLAKAKQKEPLKECKIVEGDAEDLPFPTDYADRYVSAGSIEYWPDPQRGIREAYRVLKIGGKACLIGPVHPTFWLSRFFADVWMLFPKEEEYIEWFKNAGFKDVQLKRIGPKWYRGVRRHGLIMGCSVTGVKPASGDSPLQLGPKEEDVEKPVNNPFSFLGRFLLGTLAAAWFVLIPIYMWIKDQIVPKDQPI

SEQ ID NO: 37045 - DNA, 721 bp, Zea mays subsp. mays
atatacatatattaacattttcatacacctaaaaatatatccaaacccatttgatctaatagtaaatacataatttatttggtgaagctagaagaatgggtgcatttgattatatatctagcttttgttcatatacatactctaatgccaaaaccaagcgtaagccattgcagacagtggaaatcaaggtcaaaatggactgtgacggctgtgaaagaaaacttagaaacgtggttcgtcgcatgaaaggcgtgaaaacggtggaggtgaaccggaaacagagccggctaacggtgaacggtcacgtggacccaaacaaggtgttgaagagagtgaagagcacagggaagaaggcagagttttggccttacatacctcagcatatggtctattaccctttcgcgcctggcatgtacgacaaacgtgcgcctgcaggccacatccgcaaccctacacaagcgtttccagccgcaaacgcacctggtgaaaactacgtttccctcttcagcgacgacaacgtccacgccgcttgttccatcatgtgaaatatgtaagaagcagaatataatataataatctatattttcttctttgtgtacacatctacttttgcaagttgcaactattctcataatacagaaaaggtcatgtataaactatgtaataaattatagagacatattttcacaaaaaaaaaaaaaaaaaagcttatcgataccgt

SEQ ID NO: 37046 - protein, 149 aa, Zea mays subsp. mays
MGAFDYISSFCSYTYSNAKTKRKPLQTVEIKVKMDCDGCERKLRNVVRRMKGVKTVEVNRKQSRLTVNGHVDPNKVLKRVKSTGKKAEFWPYIPQHMVYYPFAPGMYDKRAPAGHIRNPTQAFPAANAPGENYVSLFSDDNVHAACSIM

SEQ ID NO: 37047 - protein, 116 aa, Zea mays subsp. mays
MDCDGCERKLRNVVRRMKGVKTVEVNRKQSRLTVNGHVDPNKVLKRVKSTGKKAEFWPYIPQHMVYYPFAPGMYDKRAPAGHIRNPTQAFPAANAPGENYVSLFSDDNVHAACSIM

SEQ ID NO: 37048 - protein, 100 aa, Zea mays subsp. mays
MKGVKTVEVNRKQSRLTVNGHVDPNKVLKRVKSTGKKAEFWPYIPQHMVYYPFAPGMYDKRAPAGHIRNPTQAFPAANAPGENYVSLFSDDNVHAACSIM

SEQ ID NO: 37049 - DNA, 758 bp, Zea mays subsp. mays
gtccaaacaagaagtgatgaactattttcagttagaacatagaagatagcattatcttaataggttccacgtggcatttcctaactggcacaagaaaatctccaagaggagttctcagtttgccacgtcagacgaagatcagaatccactcatttaggctaaaggctatctcttcaaacaaatttcaaatcacccaacaacacaaaatagtgatcaaagctcatggcgtctcttgcaactgtcgccgccgtgaaaccatccgtggccgtaaaaggccttggcggaagctcactcgccggagccaagctctccttcaagccttcccgcctaagcatcaaaaccaaatcaatccggtctggtggtgtggtggctaagtatggagacaaaagtgtctactttgacttagaagatttgggaaacacaacaggtcaatgggatctatacggctctgatgctccttctccttacaaccctcttcagagcaagttctttgagacattcgccgcaccattcacaaagagaggactgctcctcaagttcttgatcctcggaggaggatctttgcttacttatgtcagcgcttcctccaccggtgatgttcttcccatcaagagaggtcctcaggagaagcctaagctcggtcctcgcggcaaactttgatttagatttatgcatgttcgttaccttctctccctctttataatcccataaaacatttctcaatgctacaatctcttcaaatgatttttgatttgtgt

SEQ ID NO: 37050 - protein, 145 aa, Zea mays subsp. mays
MASLATVAAVKPSVAVKGLGGSSLAGAKLSFKPSRLSIKTKSIRSGGVVAKYGDKSVYFDLEDLGNTTGQWDLYGSDAPSPYNPLQSKFFETFAAPFTKRGLLLKFLILGGGSLLTYVSASSTGDVLPIKRGPQEKPKLGPRGKL

SEQ ID NO: 37051 - DNA, 842 bp, Zea mays subsp. mays
atatcaagctactgagttctgactatccaacttaaaattatattatcttttcgacttcagattctcctctatttcactcaaacactaaagcttcagaaaatggcaatggcgtcgtttaacatgcagtcagtcttcgccggtggactgaccactcgcaagatcaacacgaacaagctttgctttgccggaaacttccataatctcaagaggaattgtcccgtgggagtgagatgtatggctgagggagaaccaatgaaagatgagtctgcaccttcgacctcggcgtctcagcctttgcccaagtcatcgtcgccaccaccacctcctcctactaaacctaaggtgagcacaaagtttagcgacttgctagcgttcagcggtccagcaccggaaagaataaacggtcgtttagctatggttggattcgtggctgcgttggcggttgaactttccaagggtgaaaacgttttagctcagatctccgacggtggtgtctcgtggttcctcggtacggcggcgatcttgacgcttgcgtcgcttgtgccccttttcaagggcataacagccgagtccaagtccaaaggttttatgacgtcagacgctgagctttggaatgggcgttttgcgatgcttggtttgttcgcgctggcgttcactgagtttgtcaagggtgggactctcgtttgagaaagaagagattgtgtattgcaaaatttgcccctgaatcctgtatagtattctggcttgttttaggcctactctgtgtcttttacatatggattagtgacatttgaaactttgggttaaaacactttgagtttagttaaagcagtggtaatggt

SEQ ID NO: 37052 - protein, 195 aa, Zea mays subsp. mays
MAMASFNMQSVFAGGLTTRKINTNKLCFAGNFHNLKRNCPVGVRCMAEGEPMKDESAPSTSASQPLPKSSSPPPPPPTKPKVSTKFSDLLAFSGPAPERINGRLAMVGFVAALAVELSKGENVLAQISDGGVSWFLGTAAILTLASLVPLFKGITAESKSKGFMTSDAELWNGRFAMLGLFALAFTEFVKGGTLV

SEQ ID NO: 37053 - protein, 193 aa, Zea mays subsp. mays
MASFNMQSVFAGGLTTRKINTNKLCFAGNFHNLKRNCPVGVRCMAEGEPMKDESAPSTSASQPLPKSSSPPPPPPTKPKVSTKFSDLLAFSGPAPERINGRLAMVGFVAALAVELSKGENVLAQISDGGVSWFLGTAAILTLASLVPLFKGITAESKSKGFMTSDAELWNGRFAMLGLFALAFTEFVKGGTLV

SEQ ID NO: 37054 - protein, 188 aa, Zea mays subsp. mays
MQSVFAGGLTTRKINTNKLCFAGNFHNLKRNCPVGVRCMAEGEPMKDESAPSTSASQPLPKSSSPPPPPPTKPKVSTKFSDLLAFSGPAPERINGRLAMVGFVAALAVELSKGENVLAQISDGGVSWFLGTAAILTLASLVPLFKGITAESKSKGFMTSDAELWNGRFAMLGLFALAFTEFVKGGTLV

SEQ ID NO: 37055 - DNA, 753 bp, Zea mays subsp. mays
cttcttcctctccgcattccatcagtgtttgtttttgggtgaaactgacaaagagtgcgagaaaaatgagcggagccgggaagaaagtggcggatgtggcgttcaaagcgtcgaggacaatagattgggaagggatggcaaaggtccttgtcaccgatgaggctcgaagagagttctctaacctccgtcgcgctttcgacgaggtcaacactcagctccaaaccaagttcagccaggagcctgaacccattgattgggatttttacagaaagggtattggctctggcattgttgacatgtacaaggaagcttacgacagcgttgagattcccaagtacgtggacaatgttacccctgaatacaagccaaagtttgatgctttgttggtggaactgaaagaagcagaacagaaatctctcaaggagtctgaacggctagagaaagaaattattgatgtccaggagataagcaaaaagctcagcaccatgactgcagatgagtactttgagaagcaccccgaactcaagaagaagtttgatgacgagatccggaacgactactggggatactgattcatcatatttcttgtatctccggtctggaaatgaaactctctcttctctttttcttttgatgtgattttgtgagtgtcaaccataacataataaggaccactccatttacttaagcagtgtgttgagatattcattggagatccaatgagacaatgacgataaaaacccatttggttcc

SEQ ID NO: 37056 - protein, 189 aa, Zea mays subsp. mays
SSSPHSISVCFWVKLTKSARKMSGAGKKVADVAFKASRTIDWEGMAKVLVTDEARREFSNLRRAFDEVNTQLQTKFSQEPEPIDWDFYRKGIGSGIVDMYKEAYDSVEIPKYVDNVTPEYKPKFDALLVELKEAEQKSLKESERLEKEIIDVQEISKKLSTMTADEYFEKHPELKKKFDDEIRNDYWGY

SEQ ID NO: 37057 - protein, 168 aa, Zea mays subsp. mays
MSGAGKKVADVAFKASRTIDWEGMAKVLVTDEARREFSNLRRAFDEVNTQLQTKFSQEPEPIDWDFYRKGIGSGIVDMYKEAYDSVEIPKYVDNVTPEYKPKFDALLVELKEAEQKSLKESERLEKEIIDVQEISKKLSTMTADEYFEKHPELKKKFDDEIRNDYWGY

SEQ ID NO: 37058 - protein, 145 aa, Zea mays subsp. mays
MAKVLVTDEARREFSNLRRAFDEVNTQLQTKFSQEPEPIDWDFYRKGIGSGIVDMYKEAYDSVEIPKYVDNVTPEYKPKFDALLVELKEAEQKSLKESERLEKEIIDVQEISKKLSTMTADEYFEKHPELKKKFDDEIRNDYWGY

SEQ ID NO: 37059 - DNA, 1243 bp, Zea mays subsp. mays
agaagaccactatattctgcctctccgttctgttcttgccgtgttctatttttccgctctgctgtacatggcgtcggttgcaggcgaggggaggagccgggtgctggtgataggcggcacgggctacataggccgcttcatcgtcgccgccagcgcacgcgagggccaccccaccgccgtcctcgtccgcgacgccgcgcccgccgacccagccaaggccgccgtcctccagggattccgggatgccggcgtcaccatcgtcaagggtgatatgtatgatcatgagagcctggtgacagccattaaatcagcagatgttgtgatctcggccgtgggttatcaacagctaccggatcaaactctcattatctcggcaattaaggaagttgggcatgtaaagagattcttcccatcagagtatggtaatgatgtggatcgtaaccatgcagttgaacctgcaaagacagtattcggtgggaaagctcatataaggcgtgccattgaggctgaggggattccctacacatatgtctcttccaacttctttgctggtcgtttcttgcgaagccttgcgcagattggggtcacggagcctccaaccgagaaggttctcattatgggtgatggaaatgtaaaaggaatctttgcggcggaggaagacgtgggaacctacactattaaagctgtagatgatccaaggaccctgaacaaaatcctatatctgaggccaccaagtaacactttgtcccataatgagcttgtctcactctgggagaagaaacttggtaagacacttgagagggtgtacctcccagaggacgaactcctgaagaagattcgagagtcatcagcgccgctgaatgtagcactggcaatcagccactctgtctggttgaagggggaccacactaactttgagatcgacccatcatttggagttgaagccactcagctttaccctgatgtgccttacattaccgtggatgaatacctaaataggttcctttaaactcctaaatcctatcgtcgccaatattcatatactttgaataaatgttggaggttatgtatttttactagaatggcacgtgaattacgtaatcagagtgtgagacctcaatcatgtgaggaatgcatcttgcattcccttgagcttagaatatataaactgaggttgtataaatttggaaattttagcttgatggaacatgataccgtatgtaacagcccgggggtttacgcc

SEQ ID NO: 37060 - protein, 335 aa, Zea mays subsp. mays
EDHYILPLRSVLAVFYFSALLYMASVAGEGRSRVLVIGGTGYIGRFIVAASAREGHPTAVLVRDAAPADPAKAAVLQGFRDAGVTIVKGDMYDHESLVTAIKSADVVISAVGYQQLPDQTLIISAIKEVGHVKRFFPSEYGNDVDRNHAVEPAKTVFGGKAHIRRAIEAEGIPYTYVSSNFFAGRFLRSLAQIGVTEPPTEKVLIMGDGNVKGIFAAEEDVGTYTIKAVDDPRTLNKILYLRPPSNTLSHNELVSLWEKKLGKTLERVYLPEDELLKKIRESSAPLNVALAISHSVWLKGDHTNFEIDPSFGVEATQLYPDVPYITVDEYLNRFL

SEQ ID NO: 37061 - protein, 313 aa, Zea mays subsp. mays
MASVAGEGRSRVLVIGGTGYIGRFIVAASAREGHPTAVLVRDAAPADPAKAAVLQGFRDAGVTIVKGDMYDHESLVTAIKSADVVISAVGYQQLPDQTLIISAIKEVGHVKRFFPSEYGNDVDRNHAVEPAKTVFGGKAHIRRAIEAEGIPYTYVSSNFFAGRFLRSLAQIGVTEPPTEKVLIMGDGNVKGIFAAEEDVGTYTIKAVDDPRTLNKILYLRPPSNTLSHNELVSLWEKKLGKTLERVYLPEDELLKKIRESSAPLNVALAISHSVWLKGDHTNFEIDPSFGVEATQLYPDVPYITVDEYLNRFL

SEQ ID NO: 37062 - protein, 245 aa, Zea mays subsp. mays
MYDHESLVTAIKSADVVISAVGYQQLPDQTLIISAIKEVGHVKRFFPSEYGNDVDRNHAVEPAKTVFGGKAHIRRAIEAEGIPYTYVSSNFFAGRFLRSLAQIGVTEPPTEKVLIMGDGNVKGIFAAEEDVGTYTIKAVDDPRTLNKILYLRPPSNTLSHNELVSLWEKKLGKTLERVYLPEDELLKKIRESSAPLNVALAISHSVWLKGDHTNFEIDPSFGVEATQLYPDVPYITVDEYLNRFL

SEQ ID NO: 37063 - DNA, 613 bp, Zea mays subsp. mays
aacaaaagaagaagcttagaacgcaaaagcaaagtgtctctcttttcttagcacacacaaaaagaagagaaaagcaagagacaatggtttcggcactgagattcttcacatgtcttgtcttggcagtgtgcatagttgcctcagtagatgcagcaatctcatgtaacacagtggtaggtagcttgggtacttgttacgtttacctaaggcaaggcgggattgtgccgccttcatgctgtaggggagtaagaaatttgaacggtatggctcaaaccacaccagatcgtcaacaagcatgcaaatgcgtacagtcctttacaaaatctgtccctggtctcaaccaaaatttagcatctgggcttcctggaaagtgcggtgttagccttccctatcccatctccattagcatgaactgcgacaacgtcaagttaagcggaactcatatatcatcgtgaggatgaagagtatggtctacaataagtaaaacgaattaatggtttacatactcgctgattcatcatctccgacttgtcttgtttttatattgttgttgaaaaagtttgtttatgttactttgtaatattttgctctacattgtatcttaattatgttt

SEQ ID NO: 37064 - protein, 150 aa, Zea mays subsp. mays
QKKKLRTQKQSVSLFLAHTKRREKQETMVSALRFFTCLVLAVCIVASVDAAISCNTVVGSLGTCYVYLRQGGIVPPSCCRGVRNLNGMAQTTPDRQQACKCVQSFTKSVPGLNQNLASGLPGKCGVSLPYPISISMNCDNVKLSGTHISS

SEQ ID NO: 37065 - protein, 123 aa, Zea mays subsp. mays
MVSALRFFTCLVLAVCIVASVDAAISCNTVVGSLGTCYVYLRQGGIVPPSCCRGVRNLNGMAQTTPDRQQACKCVQSFTKSVPGLNQNLASGLPGKCGVSLPYPISISMNCDNVKLSGTHISS

SEQ ID NO: 37066 - DNA, 544 bp, Zea mays subsp. mays
aattcggaagttctccttctccaagcaaaaatcagagggttttagggttctagaacgagcgggtcggcgagaacagccatggacgcctcccccgagctgcaacagttcctggagcaagagaagcagaagatggtgatgagtgagatggtaaccaagttgacaaatgtgtgctgggacaaatgcatcaccagcaccccaggaagcaagttcagctccggtgaaactacctgcctgaccaattgtgctcagaggtatcttgacatgagcatgataattgcgaagaggttccagatgcagtagggcgtctccagctgcagctggttgcgtcatcaaaaaaattccaaactctgaacatgccaacaatggccagttgtaacagtgaaaatatttaatcttctgtcgtaaacgcttggttagtactcagtgtagttgcatctgtggtgaacctttggttagctttcttgtgaagctactgtcattttattctccaatcacttagttggtttcgtttcaagtcaatctatatgaagtctgccaaattttc

SEQ ID NO: 37067 - protein, 73 aa, Zea mays subsp. mays; identical to SEQ ID NO: 27076

SEQ ID NO: 37068 - protein, 56 aa, Zea mays subsp. mays; identical to SEQ ID NO: 27077

SEQ ID NO: 37069 - protein, 54 aa, Zea mays subsp. mays; identical to SEQ ID NO: 27078

SEQ ID NO: 37070 - DNA, 591 bp, Zea mays subsp. mays
accaagcaagcacaccagcctcctcagtcctcacagcatcctctcagtccttagcttccttccctcgccgccacccaccaaggaaaggaggatgtcttgctgcggcggcaactgcgggtgcggcgccggctgcaagtgcggcaacggctgcggcgggtgcaagatgttccccgacgtggaggccaccgccggcgccgccgccatggtcatgcccaccgcctcccacaaggggagctccggcgggttcgagacggccggggagaccggcggctgcgactgcaccacctgcaagtgcggcaccgcgtgcggctgctcctgctgcagctgcaactgagccggcgcccaggaggccggccggcagaggcgagcacgaggatgaggaggacaagcaagcaagcaccatcaccaccagttcaccaccacccagcgtatcatcaccagccgccgcatgcgctcgcgcgcgcgcgcgctgaataaaataaaaccaccgttcgtgttccgtagttctgtatgcccctgtcgcgtgtgttcgaccagtactgtccttcctcatgcctccacttctaatgaatatatggcgcctcaactttg

SEQ ID NO: 37071 - protein, 156 aa, Zea mays subsp. mays
QASTPASSVLTASSQSLASFPRRHPPRKGGCLAAAATAGAAPAASAATAAAGARCSPTWRPPPAPPPWSCPPPPTRGAPAGSRRPGRPAAATAPPASAAPRAAAPAAAATEPAPRRPAGRGEHEDEEDKQASTITTSSPPPSVSSPAAACARARAR

SEQ ID NO: 37072 - protein, 110 aa, Zea mays subsp. mays
PSKHTSLLSPHSILSVLSFLPSPPPTKERRMSCCGGNCGCGAGCKCGNGCGGCKMFPDVEATAGAAAMVMPTASHKGSSGGFETAGETGGCDCTTCKCGTACGCSCCSCN

SEQ ID NO: 37073 - protein, 80 aa, Zea mays subsp. mays; identical to SEQ ID NO: 25963

SEQ ID NO: 37074 - DNA, 610 bp, Zea mays subsp. mays; identical to SEQ ID NO: 30440

SEQ ID NO: 37075 - protein, 118 aa, Zea mays subsp. mays; identical to SEQ ID NO: 30441

SEQ ID NO: 37076 - protein, 104 aa, Zea mays subsp. mays; identical to SEQ ID NO: 30442

SEQ ID NO: 37077 - DNA, 933 bp, Zea mays subsp. mays
aacaatggcagttcctccacttctcctcctcacactcctctccctcccttctcttctcatccacgccgccatctccgatgcttaccccaccattcccggaaccgctccgatcgacggaggtttctccgatgaactcaaacccatccgccgtgaggtctacggcgaaggcaaaatcttcgacatcagccaccgctacacgccggagatgccggcgtgggagtcaaaagaaggaatcggacggtttctatggctagccgcgagcatgaagaacgggtcgctcgctaacaactccgagatgaagatcccgactcacactgggacccacgtcgattcgcctggacacgtgtacgatgagtattacgacgctgggttcgatgtagactcgcttgatctccaagtcttaaacggtcctgcgttgttggttgatgttccaaggaacaagaacataactgccgaagtgatgaagtctcttaacataccaagaggagtccgtcgtgtgcttttcagaacattgaatactgacaggcgtctgatgttcaagaaggagtttgatacaagctatgtcggattcatgaaggacggcgcacaatggttggtagacaacactgacatcaaacttgttggggttgattatctatcagtagctgcatatgatgatctgattccgtcccacctagtattcctaaaaggccgagagactatactggtggagggattgaagctggatgatgtgaaggcaggagtctactctgttcattgcttacctctaagacttgttggagcagaagggtctccaattcgctgcatcctcatcagttgatttcttcctccaaaacttggagttgtctgtatgcaagttaacctttcgtatctttacttcaagatcttatgcttgacaaaaaaaaaaagtaaaataaataaggaaacttggcg

SEQ ID NO: 37078 - protein, 272 aa, Zea mays subsp. mays
TMAVPPLLLLTLLSLPSLLIHAAISDAYPTIPGTAPIDGGFSDELKPIRREVYGEGKIFDISHRYTPEMPAWESKEGIGRFLWLAASMKNGSLANNSEMKIPTHTGTHVDSPGHVYDEYYDAGFDVDSLDLQVLNGPALLVDVPRNKNITAEVMKSLNIPRGVRRVLFRTLNTDRRLMFKKEFDTSYVGFMKDGAQWLVDNTDIKLVGVDYLSVAAYDDLIPSHLVFLKGRETILVEGLKLDDVKAGVYSVHCLPLRLVGAEGSPIRCILIS

SEQ ID NO: 37079 - protein, 271 aa, Zea mays subsp. mays
MAVPPLLLLTLLSLPSLLIHAAISDAYPTIPGTAPIDGGFSDELKPIRREVYGEGKIFDISHRYTPEMPAWESKEGIGRFLWLAASMKNGSLANNSEMKIPTHTGTHVDSPGHVYDEYYDAGFDVDSLDLQVLNGPALLVDVPRNKNITAEVMKSLNIPRGVRRVLFRTLNTDRRLMFKKEFDTSYVGFMKDGAQWLVDNTDIKLVGVDYLSVAAYDDLIPSHLVFLKGRETILVEGLKLDDVKAGVYSVHCLPLRLVGAEGSPIRCILIS

SEQ ID NO: 37080 - protein, 204 aa, Zea mays subsp. mays
MPAWESKEGIGRFLWLAASMKNGSLANNSEMKIPTHTGTHVDSPGHVYDEYYDAGFDVDSLDLQVLNGPALLVDVPRNKNITAEVMKSLNIPRGVRRVLFRTLNTDRRLMFKKEFDTSYVGFMKDGAQWLVDNTDIKLVGVDYLSVAAYDDLIPSHLVFLKGRETILVEGLKLDDVKAGVYSVHCLPLRLVGAEGSPIRCILIS

SEQ ID NO: 37081 - DNA, 851 bp, Zea mays subsp. mays
ctcacaacgatcggaccaaagaatcatacccatctcttttgaccattcaaactagtgaaaaatgggggtactcagaaagaaacacaataaaaaatccagaaggccgtcgtttaagagtgttttaacctcaatattagctacacaagccgcaatatttctcttattgctcgccggtgtttccctcgctggcacagccgtcgcatttatcgctagcatgccactattcgtagtattcagtccgattctcgtaccagcgggtgttgccactggtttactggccacgggtttagcagccgccggtagctccggtgcaatggctgtctccctcatcctttgggtcttcaagcgagtaacggggaaggagccgccaaaaatcatgtcaaaagtcttgaaaaaggtgtttcctggtggaggtgctgcagctaaactggcagcaaaaccagaagccgacccagcggccgcaccagcggcagcaccatcagccgcaccagcagctgcaccgagtacatgaaagcggtgggtaataagcaaaggatgatagataaataatccaactttaaaaaataaataataatatttacgtggggatggaagttaaattttcaaatatcactatactaatggatatcgtggaacaaaatagtaacaaatgtaagcatttttattgtataacattttaagaacgaagcgaagtgtcgttgacgttaattttattcaagttcaactaaaatgttattcaagttcttgttcaccaacgttgtcaaacgagacaatctataggcctcaaggaaccattgtaagttacatgtaaaatggggccataataattatggtcaagtaatgcccttttc

SEQ ID NO: 37082 - protein, 149 aa, Zea mays subsp. mays
MGVLRKKHNKKSRRPSFKSVLTSILATQAAIFLLLLAGVSLAGTAVAFIASMPLFVVFSPILVPAGVATGLLATGLAAAGSSGAMAVSLILWVFKRVTGKEPPKIMSKVLKKVFPGGGAAAKLAAKPEADPAAAPAAAPSAAPAAAPST

SEQ ID NO: 37083 - protein, 98 aa, Zea mays subsp. mays
MPLFVVFSPILVPAGVATGLLATGLAAAGSSGAMAVSLILWVFKRVTGKEPPKIMSKVLKKVFPGGGAAAKLAAKPEADPAAAPAAAPSAAPAAAPST

SEQ ID NO: 37084 - DNA, 1267 bp, Zea mays subsp. mays
tacctagaacatcctaatcgaaaactctctctctctctagcctctccattccgtgtggcgaccgagcgaaccctagccgagattagactaccatccccaatctaccggaggaggacgaggacgacgccgacgagatgctgagggttgcggggaggaggctctcgtcttcgctctcctggcgccccgtggcgaccgtcggagccaggggcccgctcgctggcgccggcggccctgggagagacgacgacgacggttcggcctaccagcggcggttcgccatcgagtcccccttcttcaccgccgcgagaggcttttcttcagctgaaacacttgttccacggaaccaagatgctgggttggctgaactcccagccactgttgctgcactgaagaaccccaactcaaaaatcctttatgaccagtacaaccatgaaagatatcctcctggagatcccagcaagcgtgcctttgcctactttgttctgagtggtgggagattcgtatatgcatcactgctgcgtctccttgtcttgaagtttgtcttgagcatgtcagcaagtaaggatgtgcttgcacttgcttcccttgaggttgatctatccagcattgaacccggtagcacagtgactgtcaagtggcgtggaaagccagtcttcatcaggcgacggacagacgatgacatcaagctggccaacagcgtggatgttgcatccctgcgccacccagagcaagacgctgagcgtgtgaagaacccagagtggctggtggttattggtgtctgcactcatcttggttgcattccccttcccaactctggagactttggtggctggttctgcccgtgccatggctcccactatgacatctctggcagaatccgcaagggccctgccccgtacaaccttgaggtgcccacctacagtttcttggaagataacaagatgctcataggctaagagcctaaaaccagtacctaccgacatatattatccacaggagtgaattcctgttgcgctgttattttgttttcaatgtggctaggagtttttgtttcaggactattgcaacggtgatccactgttacctactgaagttcatttgcagtgcgaaataattatttctcctatgttgctactggattgcaagttgttttgtactgattttctgagaccctatcggaaggatattgtatacctcttctggtccttgctacctatatatttgttaaataagcaaacatactattcttctaaaaaaaaaaaaaaaa

SEQ ID NO: 37085 - protein, 273 aa, Zea mays subsp. mays
MLRVAGRRLSSSLSWRPVATVGARGPLAGAGGPGRDDDDGSAYQRRFAIESPFFTAARGFSSAETLVPRNQDAGLAELPATVAALKNPNSKILYDQYNHERYPPGDPSKRAFAYFVLSGGRFVYASLLRLLVLKFVLSMSASKDVLALASLEVDLSSIEPGSTVTVKWRGKPVFIRRRTDDDIKLANSVDVASLRHPEQDAERVKNPEWLVVIGVCTHLGCIPLPNSGDFGGWFCPCHGSHYDISGRIRKGPAPYNLEVPTYSFLEDNKMLIG

SEQ ID NO: 37086 - DNA, 692 bp, Zea mays subsp. mays
aatcgaaaagttttcctccgcctcgccctcgttcttcctcccttcctcgatcgccgctccggccatggcgaacgacgggtcgcagagcgcgcgcggcggcggcggcggcaggaggtgctgctgcggcgccctcacgcgcgtggacctcctggtcttcctcctcgccgcggcgctctgctccgcgtcctactgcctcggggtatggcacaacagccgcggcgccgcggacagccgggtcctggcgccgagcgccggcgccaacacctactgcggggacgacgcccgcgagccgctcgacttcgagacgcgccacgccgccgaggacgccgggctctccgcgcctactactacggcggcggcggcggggacgacgagcacccggcgggcgttgcgcggcgccgcggacggcggcgtccgcgtccggctcacgggcgccgtcgccgtccgagcgtaggtccgcgccatgtgcacgtggcctcggcgcgcgtcgctccggacgtcggagttggagcccccccaccccacgccgtgttcccggctccggcgctcgatcccaatgaagttccggggtcgtctgttgcatttggtggggcgcgagtttaccgtctagtccttcttggctgtttttcagagttttcgatcattccaggggatttatgtgaacatttccttttccgtgaaaaaaaaaaaaa

SEQ ID NO: 37087 - protein, 230 aa, Zea mays subsp. mays
NRKVFLRLALVLPPFLDRRSGHGERRVAERARRRRRQEVLLRRPHARGPPGLPPRRGALLRVLLPRGMAQQPRRRGQPGPGAERRRQHLLRGRRPRAARLRDAPRRRGRRALRAYYYGGGGGDDEHPAGVARRRGRRRPRPAHGRRRRPSVGPRHVHVASARVAPDVGVGAPPPHAVFPAPALDPNEVPGSSVAFGGARVYRLVLLGCFSEFSIIPGDLCEHFLFREKKK

SEQ ID NO: 37088 - protein, 185 aa, Zea mays subsp. mays
SKSFPPPRPRSSSLPRSPLRPWRTTGRRARAAAAAAGGAAAAPSRAWTSWSSSSPRRSAPRPTASGYGTTAAAPRTAGSWRRAPAPTPTAGTTPASRSTSRRATPPRTPGSPRLLLRRRRRGRRAPGGRCAAPRTAASASGSRAPSPSERRSAPCARGLGARRSGRRSWSPPTPRRVPGSGARSQ

SEQ ID NO: 37089 - protein, 163 aa, Zea mays subsp. mays
MAQQPRRRGQPGPGAERRRQHLLRGRRPRAARLRDAPRRRGRRALRAYYYGGGGGDDEHPAGVARRRGRRRPRPAHGRRRRPSVGPRHVHVASARVAPDVGVGAPPPHAVFPAPALDPNEVPGSSVAFGGARVYRLVLLGCFSEFSIIPGDLCEHFLFREKKK

SEQ ID NO: 37090 - DNA, 852 bp, Zea mays subsp. mays
atctctcttcatttccctctctcgaacaagaagacaacaactcaaaacgcagagaagatctccagaacgacaccgtttcgtagcaaagatgctttcttcgtctccaacctccttcactcatccattcctctccacgtctccgcctctctcccccatatctccgccgtctcgctcacctcgcctcccgcctcctctcgtctccgcctcttgctcctacacctgcacggaggatccgccgaggctgcaccagatcccgcggcgaacgacgccggcgaacgcttcgctctacgagattctagaggttcctcgcggcgcgacgagccaggatatcaaatcggcttaccggaggttggctaggatctgccaccccgacgtggcggcgggaaccgatcggagtaactcttcggcggatgagttcatgaagatccacgcggcgtactgtacgctctctgatcctgacaaacgctctgtttacgatcggaggatgcttcgtcggagccgtccgttgaccgtcagcacctccgggatgggcagttacgttggacggaactgggaaaccgatcagtgctggtagcgagttgactcggtgaccgagttagctcgagttaattcgaattaataaaacacggttgtaaaaataggaagcgataaaagctggggttagcgatgtaattaacagtagtattagtgtgctaacatacgccaagagctaaacgtacgctccctctccctgcccacggccacgggcgatcagcgccgtttgcatcgtgttacgtaggatctacgtgtgttttttttttaccttctgaatcctgtaatacttatcaatgaaaacaaaataaacactgttat

SEQ ID NO: 37091 - protein, 190 aa, Zea mays subsp. mays
SLFISLSRTRRQQLKTQRRSPERHRFVAKMLSSSPTSFTHPFLSTSPPLSPISPPSRSPRLPPPLVSASCSYTCTEDPPRLHQIPRRTTPANASLYEILEVPRGATSQDIKSAYRRLARICHPDVAAGTDRSNSSADEFMKIHAAYCTLSDPDKRSVYDRRMLRRSRPLTVSTSGMGSYVGRNWETDQCW

SEQ ID NO: 37092 - protein, 161 aa, Zea mays subsp. mays
MLSSSPTSFTHPFLSTSPPLSPISPPSRSPRLPPPLVSASCSYTCTEDPPRLHQIPRRTTPANASLYEILEVPRGATSQDIKSAYRRLARICHPDVAAGTDRSNSSADEFMKIHAAYCTLSDPDKRSVYDRRMLRRSRPLTVSTSGMGSYVGRNWETDQCW

SEQ ID NO: 37093 - protein, 118 aa, Zea mays subsp. mays
ISLHFPLSNKKTTTQNAEKISRTTPFRSKDAFFVSNLLHSSIPLHVSASLPHISAVSLTSPPASSRLRLLLLHLHGGSAEAAPDPAANDAGERFALRDSRGSSRRDEPGYQIGLPEVG

SEQ ID NO: 37094 - DNA, 744 bp, Zea mays subsp. mays
atcgagagcagaaaacaaagatcgatccatcgagaccgaccgagagcaggattgaagttgaaaggaccgtccgtacgggttacttctccagtcagtctccggtgcgccttcttcgccgatcagcgcgactgctgcttgtacatggccacgagagcggcgctcgtcgccggccgccgtgcggccggtcaggacgggctcgcccttctctcctcgggctgcaggcgcgaaggagctcgtccgagctccccccacaagagcagcagcgccaccgagcgggagggccacggcgacgcgacggcggcgcaggtggaggcggcgctgaaccgcaagaacgcggacgtggtcgacgtcgaccgctccggctccgcgacgctggtcccggccgacgcgcggcgcggcgcgggcgacgagtgggtgcccgaccaggagacgggcgtctttgtcccggccgacgaggagtcgtccgggcccggcgacgggggcgtggccgacgtcggcggcgcgcgcgggcaagccccgtcggtgctggaccaggcggtgttcgtccgcgaggagcacatggaggacgtcgagaggcccgccgtcggcgtggacgatgccggcgccgcctgagcgcggggaccgtgtcctcgggcggcccgccgctgcgaccagcaggcagagtagctgtagcctgtagggcaagcaaagcaaggttttctttgttctagcttccggatcgatagaataatgaagtcagatctc

SEQ ID NO: 37095 - protein, 235 aa, Zea mays subsp. mays
REQKTKIDPSRPTESRIEVERTVRTGYFSSQSPVRLLRRSARLLLVHGHESGARRRPPCGRSGRARPSLLGLQARRSSSELPPQEQQRHRAGGPRRRDGGAGGGGAEPQERGRGRRRPLRLRDAGPGRRAARRGRRVGARPGDGRLCPGRRGVVRARRRGRGRRRRRARASPVGAGPGGVRPRGAHGGRREARRRRGRCRRRLSAGTVSSGGPPLRPAGRVAVACRASKARFSLF

SEQ ID NO: 37096 - protein, 203 aa, Zea mays subsp. mays
IESRKQRSIHRDRPRAGLKLKGPSVRVTSPVSLRCAFFADQRDCCLYMATRAALVAGRRAAGQDGLALLSSGCRREGARPSSPHKSSSATEREGHGDATAAQVEAALNRKNADVVDVDRSGSATLVPADARRGAGDEWVPDQETGVFVPADEESSGPGDGGVADVGGARGQAPSVLDQAVFVREEHMEDVERPAVGVDDAGAA

SEQ ID NO: 37097 - protein, 156 aa, Zea mays subsp. mays
MATRAALVAGRRAAGQDGLALLSSGCRREGARPSSPHKSSSATEREGHGDATAAQVEAALNRKNADVVDVDRSGSATLVPADARRGAGDEWVPDQETGVFVPADEESSGPGDGGVADVGGARGQAPSVLDQAVFVREEHMEDVERPAVGVDDAGAA

SEQ ID NO: 37098 - DNA, 894 bp, Zea mays subsp. mays
aaaacacaaaaccagacctcaacttcaaacagcttctgaacaactcttgaaaccaaaaacttctctaatgccggaagaaatacgagagcacggtggtcacaccgatcctaaaccttctccaccaccgccaaaacgtggcctcatcagccgcaagagacagctcgtgtttctctccttcatgattctactagctgctaaaggactcgttggtatcggagaagtagcgtttgtaatactgtcttatatatacttgtacgagttcatctccaggtttgccttcccacgcaagcaaaacgagcagaggaggagactctcaaaccctaaaaacaaactctttcaagcttacttcctcgccactgccatcatcggcctactcttcccgatttgctacatcggagatggactataccggggagacatccacggtgttagagctgcagctccacatcttttcctcctctccggtcaagccttcaccgaaccaattggtttctccgaccggtttgcaacacccattggtattctcggaccggttttctacaacgctcgtcgtatcttcgctctgttggattgggttaaagccgagttcgcagatattcagcgtccaggtggtccaataagattgtacggaggaagagctatagcgtcggttaacaccgtcatgtggttttacaatctgtttggtctcttgttgcctgtgtttcttcctcggtcttgtgagatttacttctcagccgacgacaacaaagtagattaagtaacctcccgtctactttctactttagaatctcttatgttgtgtttgtgtcagtgcttggtaaagattattgttaataaaagcgacagtttatgactgcaaaaaaaaaaaaaaaaaagcttatcgataccgtcgac

SEQ ID NO: 37099 - protein, 251 aa, Zea mays subsp. mays
KHKTRPQLQTASEQLLKPKTSLMPEEIREHGGHTDPKPSPPPPKRGLISRKRQLVFLSFMILLAAKGLVGIGEVAFVILSYIYLYEFISRFAFPRKQNEQRRRLSNPKNKLFQAYFLATAIIGLLFPICYIGDGLYRGDIHGVRAAAPHLFLLSGQAFTEPIGFSDRFATPIGILGPVFYNARRIFALLDWVKAEFADIQRPGGPIRLYGGRAIASVNTVMWFYNLFGLLLPVFLPRSCEIYFSADDNKVD

SEQ ID NO: 37100 - protein, 229 aa, Zea mays subsp. mays
MPEEIREHGGHTDPKPSPPPPKRGLISRKRQLVFLSFMILLAAKGLVGIGEVAFVILSYIYLYEFISRFAFPRKQNEQRRRLSNPKNKLFQAYFLATAIIGLLFPICYIGDGLYRGDIHGVRAAAPHLFLLSGQAFTEPIGFSDRFATPIGILGPVFYNARRIFALLDWVKAEFADIQRPGGPIRLYGGRAIASVNTVMWFYNLFGLLLPVFLPRSCEIYFSADDNKVD

SEQ ID NO: 37101 - protein, 192 aa, Zea mays subsp. mays
MILLAAKGLVGIGEVAFVILSYIYLYEFISRFAFPRKQNEQRRRLSNPKNKLFQAYFLATAIIGLLFPICYIGDGLYRGDIHGVRAAAPHLFLLSGQAFTEPIGFSDRFATPIGILGPVFYNARRIFALLDWVKAEFADIQRPGGPIRLYGGRAIASVNTVMWFYNLFGLLLPVFLPRSCEIYFSADDNKVD

SEQ ID NO: 37102 - DNA, 881 bp, Zea mays subsp. mays
attcccccctcccccgccgtctcgtcccagctcgccctccagaggttttagtcttccttcatggcggccctcatcaagctcggaagccttcttaggcagagtgctgtggcgagcagtgcctcgaccggctcggctcctgccctgttcaacgctgcccgcttcatgtgcgccggccagcctgctgatggctccaagcttttcgttggcggtcttgcctgggctactgatgatcattcgctgaaggaggcgtttcaaagctttggtgaggtcgttgaagcacgtgttatcactgacagggagactggaaggtctagagggtttggttttgtgagcttcgccagtggcgaggatgcaaagagtgctgcagaaaacatggacggcaaggagcttgctgggaggaacgtccgtgtgaactttgccaacgagcgaccttcgggtggtggcggcggtggcttctctcgtggcggcggtggctatggaggtggtggcggcggctacggcggcggtggctacggtggtggcggtggatacggcggcggccgtggtggtggtggaggtggctatggtggtgaccatgagtcctactaagaagagcactggctatcaaatttaaaataatgaagtttttaggacagtgtcttgattatgtggaacctaatgttacgtcgttctatgttctttttggttttggtttgtttcttgatagtgcaagagttaatttgtgtatgctgcttcgaggctcggatgagtctcaaggaagttcatgcattttgccgtatattgcactgtacttgtagagaatgatcgcgtatgttagtgtgatcataaattctcttcgaattacattcaaatatattgagatcttcgctagaaatttggtg

SEQ ID NO: 37103 - protein, 175 aa, Zea mays subsp. mays
MAALIKLGSLLRQSAVASSASTGSAPALFNAARFMCAGQPADGSKLFVGGLAWATDDHSLKEAFQSFGEVVEARVITDRETGRSRGFGFVSFASGEDAKSAAENMDGKELAGRNVRVNFANERPSGGGGGGFSRGGGGYGGGGGGYGGGGYGGGGGYGGGRGGGGGGYGGDHESY

SEQ ID NO: 37104 - protein, 141 aa, Zea mays subsp. mays
MCAGQPADGSKLFVGGLAWATDDHSLKEAFQSFGEVVEARVITDRETGRSRGFGFVSFASGEDAKSAAENMDGKELAGRNVRVNFANERPSGGGGGGFSRGGGGYGGGGGGYGGGGYGGGGGYGGGRGGGGGGYGGDHESY

SEQ ID NO: 37105 - DNA, 750 bp, Zea mays subsp. mays
ctcattagacttttctactacacattcccatttcccacatcagacaacattctctccctcagagggaaagcatctcctcttcttgattcacattttgaactttaaccttctcaaactatctccaacaaaaccaaatccaagttattaaaaatgacaaagataggaggtattcttgtttgtttagtcatcgtgggattagatgtggctgctgcaatcctcggaatccaagcagaagtcgctcagaatcaggtgaagcacatgaggctttggctatttgagtgcagagagccaagccaggacgcgtacaggttaggtctaggtgcagccgcggtattggtaatggctcatgtactcatcaatttggtcggaggctgtctctgtatttgctctcaagacgagtttcaaagatcttcttccacaaagcaaatctcaatggcttgtctcgttctcacttggatcgtattcgccgttggatttggggctttagtgattgggacgatgtccaacaacaagtcaagatcctcttgtggattcacacatcaccattttctctccattggagggatcttgtgttttctacatgccctcttttgtgtcgcttattacgtttctgccacagcggctaaagacgcagctgctaagtgacaaagccatgataaggatgggtgaacacaggtgggtggtccttgtacttgactatatattccaatggtaattgtgtaacatttcatatctattaacataacatag

SEQ ID NO: 37106 - protein, 164 aa, Zea mays subsp. mays
MTKIGGILVCLVIVGLDVAAAILGIQAEVAQNQVKHMRLWLFECREPSQDAYRLGLGAAAVLVMAHVLINLVGGCLCICSQDEFQRSSSTKQISMACLVLTWIVFAVGFGALVIGTMSNNKSRSSCGFTHHHFLSIGGILCFLHALFCVAYYVSATAAKDAAAK

SEQ ID NO: 37107 - protein, 128 aa, Zea mays subsp. mays
MRLWLFECREPSQDAYRLGLGAAAVLVMAHVLINLVGGCLCICSQDEFQRSSSTKQISMACLVLTWIVFAVGFGALVIGTMSNNKSRSSCGFTHHHFLSIGGILCFLHALFCVAYYVSATAAKDAAAK

SEQ ID NO: 37108 - protein, 101 aa, Zea mays subsp. mays
MAHVLINLVGGCLCICSQDEFQRSSSTKQISMACLVLTWIVFAVGFGALVIGTMSNNKSRSSCGFTHHHFLSIGGILCFLHALFCVAYYVSATAAKDAAAK

SEQ ID NO: 37109 - DNA, 1005 bp, Zea mays subsp. mays
atttaacgccgcggtcactacttaactcattaactggatcccagcacaaccatggaagcgtacgacaagacctaccactaccagtgctcctccatttcaccgtgctcttctcaaccgctgcgtgcagcgtgctcctagtcatagcgcccccgcccactagctgagccaccgacttgttccgggccgccgcggggcagggcatgaaagcgacgacgtggcgcggcgcgccggggaccctaccggccgccagcgccaaggagaagaggaggaagcaaaaaacgcccgcgccgcgcggcttgatgtgcggctgcggcagcaccaggtcggtctccgtcgacatctccgccgctgtcacgacggcggcgcggacgaggcgacgcgtttccacggcgggggagccagcatctgcggcaaagacgacgacgacgacaggctgcggccgcggcgctgacgaagcgagcgccaatggcacgcccagcgtggactcgcttctgcggcagctgcgggagctggagcgcggcgtccgcgcgctgggcctgggcgtccgggaacgggaggagggcggcggcgcggcatcagggacggcgacgaccgcggaaacggcggcaaggccccgccggcacgcgcggagcgcgagcgtcgtggagcggctggactacgggagcgtggcggtggtgacggagtcggcggacccgctgcgcgacttccggcgctcgatggcgcagatgatcgtggagaacggcatcaccggcggcgccgagctgcgcgagctcctgcgccggttcctcgcgctcaacgccgcgtgccaccaccacctcatcctccgcgccttcggcgacgtctgggaggagatcttcgccgccgccgccgccggccgcgatggcggtagagctagcaaacggccacgcggtcgcgctggcgctggcgctgacactctaagctagccacccacagtcgtctgtcgtctcgtccatcctactactacaataatacttactctcctcg

SEQ ID NO: 37110 - protein, 247 aa, Zea mays subsp. mays
MKATTWRGAPGTLPAASAKEKRRKQKTPAPRGLMCGCGSTRSVSVDISAAVTTAARTRRRVSTAGEPASAAKTTTTTGCGRGADEASANGTPSVDSLLRQLRELERGVRALGLGVREREEGGGAASGTATTAETAARPRRHARSASVVERLDYGSVAVVTESADPLRDFRRSMAQMIVENGITGGAELRELLRRFLALNAACHHHLILRAFGDVWEEIFAAAAAGRDGGRASKRPRGRAGAGADTLS

SEQ ID NO: 37111 - protein, 214 aa, Zea mays subsp. mays
MCGCGSTRSVSVDISAAVTTAARTRRRVSTAGEPASAAKTTTTTGCGRGADEASANGTPSVDSLLRQLRELERGVRALGLGVREREEGGGAASGTATTAETAARPRRHARSASVVERLDYGSVAVVTESADPLRDFRRSMAQMIVENGITGGAELRELLRRFLALNAACHHHLILRAFGDVWEEIFAAAAAGRDGGRASKRPRGRAGAGADTLS

SEQ ID NO: 37112 - DNA, 702 bp, Zea mays subsp. mays
agaacatcctaatcgaaaagtattactttttctcaatgacgacgatgtacgttactccggcgacgcttaacgccggaaaaccgtcagcagtcttctctccggttacttcaaacctccagagatcatcatctttcttgccgtattactcgttgaggatactcgacaacaacaagacgaagtctctttcgaaatcttcattatcctcctctgctccaagattctctatgcgtgtctcctccaagcaagcctatatctgccgtgactgcgggtatatatacaatgacagaactccattcgataagttgcctgacaattacttctgtccagtgtgtgctgctcctaaacggcggtttagaccgtacatgcctgatgtgagcaagaacgtcaacgacaaggatgtgagaaaggctagaaaagctgagctccaacgtgacgaagccattgggaaggctttgcctatagcaattgctgttggggttctagctttagcagctctttacttgtatgtcaacaataccgcatgagtggctacattatttgtttcgtttttgtattaacaagtcatctctgcgttgttagacattataaatgtaagtaaaatgttgagctttctatgtacaaaaacggtattcaatgttgttgagatgaaattaaaagacaaaaaaaaaaaaaaaaaagcttatcgataccgtcgacctcgag

SEQ ID NO: 37113 - protein, 173 aa, Zea mays subsp. mays
NILIEKYYFFSMTTMYVTPATLNAGKPSAVFSPVTSNLQRSSSFLPYYSLRILDNNKTKSLSKSSLSSSAPRFSMRVSSKQAYICRDCGYIYNDRTPFDKLPDNYFCPVCAAPKRRFRPYMPDVSKNVNDKDVRKARKAELQRDEAIGKALPIAIAVGVLALAALYLYVNNTA

SEQ ID NO: 37114 - protein, 162 aa, Zea mays subsp. mays
MTTMYVTPATLNAGKPSAVFSPVTSNLQRSSSFLPYYSLRILDNNKTKSLSKSSLSSSAPRFSMRVSSKQAYICRDCGYIYNDRTPFDKLPDNYFCPVCAAPKRRFRPYMPDVSKNVNDKDVRKARKAELQRDEAIGKALPIAIAVGVLALAALYLYVNNTA

SEQ ID NO: 37115 - protein, 159 aa, Zea mays subsp. mays
MYVTPATLNAGKPSAVFSPVTSNLQRSSSFLPYYSLRILDNNKTKSLSKSSLSSSAPRFSMRVSSKQAYICRDCGYIYNDRTPFDKLPDNYFCPVCAAPKRRFRPYMPDVSKNVNDKDVRKARKAELQRDEAIGKALPIAIAVGVLALAALYLYVNNTA

SEQ ID NO: 37116 - DNA, 789 bp, Zea mays subsp. mays
gaattacgcatgcatacatacgtatacgtacgcgtattaccatatactacactatccttttacaaattaaacgtactaccagtctatcacagctgtacgttgcggcttgtatgtattttacacgttgacgaagggcgcgccggtaaggtactcggtgacggcgagcgcgacgaggccgagcatggcgaggcggccgttccagagctcggcgtcggcggtcatgaaccggccgctcctgccctcggcgctctccccctggagcagcggcaccagggacgcggcggacaggacggcggcggtgtacgcgaaccacgcgaggccggcgccgttgccggcctgcgagaggatgccgtcgccgcgggtggcctcgacggcgagcgcggacacgaagcccaccatcgccagccgcccgttgatccgctccggcgcgggcccgctgaacgccagcgcgtcccagagccccagcttccgagcagccggtgccgcgctcgcgctcgtgtcggcggcagcgtcatcggcctgctgggaggccctggcgagcagcacgaggcggcgcggcggcgcggcgacacggccgcggaaccccgccggaagccgggcggcgcgcctggcgcgcgcgccgggggcggagaaggcgggggagctcgcggtcgcggaggccatcaccgtggtcgccatcggaagcgcacgttcgtacgtacgggtagttgctgggtgctgggctgctggctagctattagctgtgactgtgatactcagatcggagtagttgcggcctgcggctttttt

SEQ ID NO: 37117 - protein, 263 aa, Zea mays subsp. mays
ELRMHTYVYVRVLPYTTLSFYKLNVLPVYHSCTLRLVCILHVDEGRAGKVLGDGERDEAEHGEAAVPELGVGGHEPAAPALGALPLEQRHQGRGGQDGGGVREPREAGAVAGLREDAVAAGGLDGERGHEAHHRQPPVDPLRRGPAERQRVPEPQLPSSRCRARARVGGSVIGLLGGPGEQHEAARRRGDTAAEPRRKPGGAPGARAGGGEGGGARGRGGHHRGRHRKRTFVRTGSCWVLGCWLAISCDCDTQIGVVAACGFF

SEQ ID NO: 37118 - protein, 260 aa, Zea mays subsp. mays
MHTYVYVRVLPYTTLSFYKLNVLPVYHSCTLRLVCILHVDEGRAGKVLGDGERDEAEHGEAAVPELGVGGHEPAAPALGALPLEQRHQGRGGQDGGGVREPREAGAVAGLREDAVAAGGLDGERGHEAHHRQPPVDPLRRGPAERQRVPEPQLPSSRCRARARVGGSVIGLLGGPGEQHEAARRRGDTAAEPRRKPGGAPGARAGGGEGGGARGRGGHHRGRHRKRTFVRTGSCWVLGCWLAISCDCDTQIGVVAACGFF

SEQ ID NO: 37119 - protein, 183 aa, Zea mays subsp. mays
MARRPFQSSASAVMNRPLLPSALSPWSSGTRDAADRTAAVYANHARPAPLPACERMPSPRVASTASADTKPTIASRPLIRSGAGPLNASASQSPSFRAAGAALALVSAAASSACWEALASSTRRRGGAATRPRNPAGSRAARLARAPGAEKAGELAVAEAITVVAIGSARSYVRVVAGCWAAG

SEQ ID NO: 37120 - DNA, 939 bp, Zea mays subsp. mays
ttgcttatctctaggatatgcttcttgccctccaagtcatgtactcctatatattctccctagaggcttaatgcaatacatcccacacattatacgcattctctccttcaggttctggtccagtatctgaaattgcaaccctgagtattataaaagaattgatatatgagtcatgacatttttctttttaatgagtgtgccttctatcattggccaatcaattgttgaggcacttgtagctttaaagattggagctaagggtcaaatgtggaatctggagacagatgggtcatacagtctttgatggtacatcgctaattatagtttttatttcatgttcaaggttcgtcttatcaaggagctctacgggaaccaaattggcgagctgttccatagtcttccttataatatgatagagtttgtattggaggattttgagtgcaaggttacaatcagtatccgatattcggatctactgcagaccctgccgagtcaggcaagggtcttggcttggccacttcgctcggccaagaaaatatctacaagaagcagcagtgcatcagctgcgcaaccagtaccctttcacctttcatatgccgaggaagcactcaaaaccttgtgtctaccagaagcatacgcagacattgtgctggagctaccccatgctttgaagaggattttatcctctcgggacagtgactaaatcgtgacctcaagatgtccagttttgttgtgcataagattcacatcttaatcgtggggcatgtttttgaagatattgttcagaatcttgtggtagtatagcctgcagttgtggactgcaattcctgtgaaagcaaggcagacatttgcgtgggccgctcgaaatattccggctacagttcctgttaaaagaatcaaaatcctaggaaggccttatggtcgaggcataatcttgcc

SEQ ID NO: 37121 - protein, 122 aa, Zea mays subsp. mays
MFKVRLIKELYGNQIGELFHSLPYNMIEFVLEDFECKVTISIRYSDLLQTLPSQARVLAWPLRSAKKISTRSSSASAAQPVPFHLSYAEEALKTLCLPEAYADIVLELPHALKRILSSRDSD

SEQ ID NO: 37122 - protein, 97 aa, Zea mays subsp. mays
MIEFVLEDFECKVTISIRYSDLLQTLPSQARVLAWPLRSAKKISTRSSSASAAQPVPFHLSYAEEALKTLCLPEAYADIVLELPHALKRILSSRDSD

SEQ ID NO: 37123 - DNA, 1325 bp, Zea mays subsp. mays
cactcgtcacgctccagctgccggccgcgacacgctccgcacgcgatctccactcgctccgtccatccggatccccttcctccctccccagccagccagcggccatgtcgtcctcgtcggacaaccccaacacggtcaccgaccgcggcctcttcagcaagagcagcaaggacgacggcgccgacaagaagaagaagcaggaggagaagaaagaggatggggaggagggcggcggcgggttcatcgacaaggtcaaggacttcatccacgacatcggggagaagatcgaggaggcggtggggttcggcaagcccagcgccgacgtggcccggatccacgtgccccacatcggcctccaccgcgccgacctcgtcgtcgacgtgctcatcaagaaccccaacccggtgcccatcccgctcgtcgacatcgactacctcatcgacagcgacggccggaagctcgtcgcggggctcatcccggacgccggcaccatccgcgcgcacggcgaggagacggtcaaggtgcccatcacgctcgacttcgacgacatccggagcacctacgcggacatcaagccgggcagcatcatcccctacctgctccgggtcatcttcctcgtggacgtgcccgtcttcggccgcatcaagatcccgctggacaagtccggggagatccccatcccgtacaagcccgacgtggacgtggacaagatcaagttccaccacttctccttcgaggagaccacggccaccatccacctgagcctggagaacaagaacgacttcgacctcgggctcaacctgctccagtacgagatgtggctcggcgacgacagcgtggtggaggcggagctcaccgactccaccaggatcgagaagcaggggatcaccaagatgcagatccccttcaccttcaggcccaaggacctgggatctgccgtctgggacatgatcaggggcaggggcaccggctacagcatcaagggcaagatcgatgtcgacaccccctttggcaacatgaagctgcccatcgacaaagtcggcggaaccactcgcctcaagaaggacgacgacgatgacgatgagtgaagtgctgttactgaacatacaagatagtcaagcagggagccagggaggatccagctgaactctttactctagcttatggtatctttgttgatggcatcatccgaacatcgtcagcgtttttatgtttcggtgctcagtgttctttgcgggaactcatccagtgtgtattctttctgtgttaactttgtcaagtggaaacagacctgaaaataaattccatcgcccctttcttgtttg

SEQ ID NO: 37124 - protein, 361 aa, Zea mays subsp. mays
LVTLQLPAATRSARDLHSLRPSGSPSSLPSQPAAMSSSSDNPNTVTDRGLFSKSSKDDGADKKKKQEEKKEDGEEGGGGFIDKVKDFIHDIGEKIEEAVGFGKPSADVARIHVPHIGLHRADLVVDVLIKNPNPVPIPLVDIDYLIDSDGRKLVAGLIPDAGTIRAHGEETVKVPITLDFDDIRSTYADIKPGSIIPYLLRVIFLVDVPVFGRIKIPLDKSGEIPIPYKPDVDVDKIKFHHFSFEETTATIHLSLENKNDFDLGLNLLQYEMWLGDDSVVEAELTDSTRIEKQGITKMQIPFTFRPKDLGSAVWDMIRGRGTGYSIKGKIDVDTPFGNMKLPIDKVGGTTRLKKDDDDDDE

SEQ ID NO: 37125 - protein, 358 aa, Zea mays subsp. mays
TRHAPAAGRDTLRTRSPLAPSIRIPFLPPQPASGHVVLVGQPQHGHRPRPLQQEQQGRRRRQEEEAGGEERGWGGGRRRVHRQGQGLHPRHRGEDRGGGGVRQAQRRRGPDPRAPHRPPPRRPRRRRAHQEPQPGAHPARRHRLPHRQRRPEARRGAHPGRRHHPRARRGDGQGAHHARLRRHPEHLRGHQAGQHHPLPAPGHLPRGRARLRPHQDPAGQVRGDPHPVQARRGRGQDQVPPLLLRGDHGHHPPEPGEQERLRPRAQPAPVRDVARRRQRGGGGAHRLHQDREAGDHQDADPLHLQAQGPGICRLGHDQGQGHRLQHQGQDRCRHPLWQHEAAHRQSRRNHSPQEGRRR

SEQ ID NO: 37126 - protein, 327 aa, Zea mays subsp. mays
MSSSSDNPNTVTDRGLFSKSSKDDGADKKKKQEEKKEDGEEGGGGFIDKVKDFIHDIGEKIEEAVGFGKPSADVARIHVPHIGLHRADLVVDVLIKNPNPVPIPLVDIDYLIDSDGRKLVAGLIPDAGTIRAHGEETVKVPITLDFDDIRSTYADIKPGSIIPYLLRVIFLVDVPVFGRIKIPLDKSGEIPIPYKPDVDVDKIKFHHFSFEETTATIHLSLENKNDFDLGLNLLQYEMWLGDDSVVEAELTDSTRIEKQGITKMQIPFTFRPKDLGSAVWDMIRGRGTGYSIKGKIDVDTPFGNMKLPIDKVGGTTRLKKDDDDDDE

SEQ ID NO: 37127 - DNA, 698 bp, Zea mays subsp. mays
acttccactttcttctctttcgcttttgctctgttcactcagagcataaaccctaaaaagagaggagcaagaaactaaaaaaacacgaacatgatgttgttggggaagagacagagaccagagataaagagaaccacgagcctgtcggagataaaattcgatttgaacctaccttgcgaaccagaggagccgtccgatcatcaacatgttcagacgttgagtccaaggaaaagtaagctcgtgaccgttgatgaacatcgccaggttcatcatggactgttagatcaacggctcttagcgatggtctcgccgagaggtacacaaaggagacactcagaagattactccactcacgccggggattttctgaggtgttgctctctctgtaaacgtaatcttgttcccggccgagacatctatatgtatagaggagatagggcgttttgtagcttagagtgcaggcaacagcagattacggtggacgagaggaaagagaagggcttggttaggtccaccgtcgccgccggatccggcaaaggagagagagtttccgccgccgtgtaggtcacctttacaactatatatatttatatccgtatgttgtatatggttattattattatgtctaaacgcacattgaccgtgattaacctttgttaatcatcttaagctttgcttttaaacttaatttaagagtt

SEQ ID NO: 37128 - protein, 157 aa, Zea mays subsp. mays
MMLLGKRQRPEIKRTTSLSEIKFDLNLPCEPEEPSDHQHVQTLSPRKSKLVTVDEHRQVHHGLLDQRLLAMVSPRGTQRRHSEDYSTHAGDFLRCCSLCKRNLVPGRDIYMYRGDRAFCSLECRQQQITVDERKEKGLVRSTVAAGSGKGERVSAAV

SEQ ID NO: 37129 - protein, 156 aa, Zea mays subsp. mays
MLLGKRQRPEIKRTTSLSEIKFDLNLPCEPEEPSDHQHVQTLSPRKSKLVTVDEHRQVHHGLLDQRLLAMVSPRGTQRRHSEDYSTHAGDFLRCCSLCKRNLVPGRDIYMYRGDRAFCSLECRQQQITVDERKEKGLVRSTVAAGSGKGERVSAAV

SEQ ID NO: 37130 - protein, 87 aa, Zea mays subsp. mays
MVSPRGTQRRHSEDYSTHAGDFLRCCSLCKRNLVPGRDIYMYRGDRAFCSLECRQQQITVDERKEKGLVRSTVAAGSGKGERVSAAV

SEQ ID NO: 37131 - DNA, 943 bp, Zea mays subsp. mays
aaaaaccactttcatcgcaactcagccagccagagcttaggcgagagagacagagacagaagatggcgtacagcgcgtgtttcctacatcagagcgcactggcctcctccgccgctcgatcatcatcttcctcctcatcccagcgctacgtttcactctccaaacccgtccaggtagtgtgtaaagctcaacagtctcatgaagacgataatcccgccgtctctcgccgtctcgccctcacactcctcgtcggcgccgccgccgttggttccaaagtgtctcctgccgatgccgcctatggtgaagctgcaaatgtgtttgggaagccaaagaaaaacacagacttcacgccatacaatggagatggattccaagtgcaggttccagctaaatggaacccaagcagagaggtagagtatccaggacaagtccttaggtacgaagacaactttgatgctactagcaatctcaatgtcatggtcactcctaccgacaagaagtccatcactgattacggctctcctgaagagttcctctctcaggtcaactaccttcttgggaaacaagcttacttcggtgagactgcctccgagggaggctttgacaacaatgcagtggcaacagcaaacattctggagacaaatgttcaggacgttggtgggaaaccatactactacttgtccgtgttgacaagaacggccgatggagatgaaggtggtaagcatcagctgatcacagccaccgtgaacggaggcaagctttacatctgcaaagcacaagctggagacaagaggtggttcaagggagccaacaaatttgtcgagaaagcagccacttctttcagtgttgcttgaatcaaagcaacacaaacagaacaatgctctgctttctttttttttcatttgtctcttgtaaaaaaatggaaaatgaaactaagcttttg

SEQ ID NO: 37132 - protein, 283 aa, Zea mays subsp. mays
KPLSSQLSQPELRRERQRQKMAYSACFLHQSALASSAARSSSSSSSQRYVSLSKPVQVVCKAQQSHEDDNPAVSRRLALTLLVGAAAVGSKVSPADAAYGEAANVFGKPKKNTDFTPYNGDGFQVQVPAKWNPSREVEYPGQVLRYEDNFDATSNLNVMVTPTDKKSITDYGSPEEFLSQVNYLLGKQAYFGETASEGGFDNNAVATANILETNVQDVGGKPYYYLSVLTRTADGDEGGKHQLITATVNGGKLYICKAQAGDKRWFKGANKFVEKAATSFSVA

SEQ ID NO: 37133 - protein, 263 aa, Zea mays subsp. mays
MAYSACFLHQSALASSAARSSSSSSSQRYVSLSKPVQVVCKAQQSHEDDNPAVSRRLALTLLVGAAAVGSKVSPADAAYGEAANVFGKPKKNTDFTPYNGDGFQVQVPAKWNPSREVEYPGQVLRYEDNFDATSNLNVMVTPTDKKSITDYGSPEEFLSQVNYLLGKQAYFGETASEGGFDNNAVATANILETNVQDVGGKPYYYLSVLTRTADGDEGGKHQLITATVNGGKLYICKAQAGDKRWFKGANKFVEKAATSFSVA

SEQ ID NO: 37134 - DNA, 683 bp, Zea mays subsp. mays
aaatcacaccaaaaccctaatctctcccaaagcttctctcccaaacacaaaatggttaaccctaaagtttacttcgacatgaccgtcggcgacaaagccgccggacgcatcgtcatggagctttacgccgacacagtccccgagacggccgagaacttccgtgccctctgcaccggcgagaaaggaatcggcaaatccgggaagccgctccactacaagggctcggctttccaccgcgtgatccccaagttcatgtgccagggaggagatttcaccgccgggaacggaaccggaggagagtcgatctacggcatgaagttcaaagacgagaactttgtcaagaagcacaccggtccgggtattctctccatggccaacgctggttcgaacacgaacggatctcagtttttcatttgcactgagaagacatcgtggctcgacgggaagcatgttgtgttcggtcaagttgtcgaagggatggatgtcgttagagacattgagaaggttggatctgacagtggaaggacttctaagaaggttgtgatcgctgactgtggtcagctttagatctgatgagggagaaaagagagaggttgttgatccaatggtagctttgtgttcttttctgttgtgttttttttttgttctggttttctccgtgttctatggctaccatgaataat

SEQ ID NO: 37135 - protein, 188 aa, Zea mays subsp. mays
KSHQNPNLSQSFSPKHKMVNPKVYFDMTVGDKAAGRIVMELYADTVPETAENFRALCTGEKGIGKSGKPLHYKGSAFHRVIPKFMCQGGDFTAGNGTGGESIYGMKFKDENFVKKHTGPGILSMANAGSNTNGSQFFICTEKTSWLDGKHVVFGQVVEGMDVVRDIEKVGSDSGRTSKKVVIADCGQL

SEQ ID NO: 37136 - protein, 171 aa, Zea mays subsp. mays
MVNPKVYFDMTVGDKAAGRIVMELYADTVPETAENFRALCTGEKGIGKSGKPLHYKGSAFHRVIPKFMCQGGDFTAGNGTGGESIYGMKFKDENFVKKHTGPGILSMANAGSNTNGSQFFICTEKTSWLDGKHVVFGQVVEGMDVVRDIEKVGSDSGRTSKKVVIADCGQL

SEQ ID NO: 37137 - protein, 162 aa, Zea mays subsp. mays
MTVGDKAAGRIVMELYADTVPETAENFRALCTGEKGIGKSGKPLHYKGSAFHRVIPKFMCQGGDFTAGNGTGGESIYGMKFKDENFVKKHTGPGILSMANAGSNTNGSQFFICTEKTSWLDGKHVVFGQVVEGMDVVRDIEKVGSDSGRTSKKVVIADCGQL

SEQ ID NO: 37138 - DNA, 1190 bp, Zea mays subsp. mays
ggtatggcatccacattgtttacttgaggtacaagcaaaacgtctaagctcgtcgacctcctcttaatggcttcaagttcaacttcattcccgttaaccaccgcgccaccgcagggtgtcaggtttaaccggagaaaaccgaggttaaccgtgtgggctaagcaaacggcgtttcaactcgggaaaacgaagggtgatgatgactcggaggggaaacaaaaagggaacaacccgttcagtttgatttcggtaagttaccggacatgaagtcactgataccggttgtgacgaatccttctactggtttagtgtttggtaataacagaaagaaagatcctggtactatttttgtggctggtgctacgggacaagctggtatacgcatagctcaaacgctcttacaacgaggattcagtgttcgagccggtgttcctgaccttggagctgcccaggacctagctcgtgtcgcggctacttacaagattttatcaaatgatgaagtcaagaggctaaacgcagttcaatcccccttccaagacgctgaatcaatagcaaaagcgattggaaacgcgaccaaagttgttgttacggtcggggcaacagagaatggtccggacgcccaagtctcgacctcagacgcattgctcgtggtccaagcagctgagctagccggcgtaagccacgtggcgatagtctacgacggcaccatcagcgggtctacatacaacgtgctcgacgggattacttcgtttttcggcaatcttttcgcaaaatctcagccattgactatctctgacctcatcgagaaagtagctcaaaccgacgtggcctacacactcataaagacgagtttgacggaggatttctctccggagaaagcttataacgtcgtcgtttcagctgaagggagtaacagcggcagtggcagtagttcgtccgaggcctacaaagttccgaagttgaagattgcgtcgctggtagcagacatttttgcgaatacggccgtggcagaaaataaggtggtggaagtttctacagatccatcagcaccatcgcggccagtggacgagcttttcagtgtaatcccggaagatgggaggagaaaagtgtacgcagatgcgatcgcaagggaaagagcagaggaagaagctaaagttgcagctgacaaagctcgagggggggcccggtac

SEQ ID NO: 37139 - protein, 309 aa, Zea mays subsp. mays
MKSLIPVVTNPSTGLVFGNNRKKDPGTIFVAGATGQAGIRIAQTLLQRGFSVRAGVPDLGAAQDLARVAATYKILSNDEVKRLNAVQSPFQDAESIAKAIGNATKVVVTVGATENGPDAQVSTSDALLVVQAAELAGVSHVAIVYDGTISGSTYNVLDGITSFFGNLFAKSQPLTISDLIEKVAQTDVAYTLIKTSLTEDFSPEKAYNVVVSAEGSNSGSGSSSSEAYKVPKLKIASLVADIFANTAVAENKVVEVSTDPSAPSRPVDELFSVIPEDGRRKVYADAIARERAEEEAKVAADKARGGARY

SEQ ID NO: 37140 - DNA, 2018 bp, Zea mays subsp. mays
atttgggtgtgggatcagaccgcgatgaccttgtactccctgtgcggctcgtcgacgttgctccagcactggcgatggagccgggcttgccgcgcctggtggttctcgtccgcccacggcccccgattagcatgagcctccgcgccagtatcattggtcttcctaatgttggcaagtcaaacctcttcaacgccattgttgtgcgatgctttgaggatgacgatatagttcatgtcaatggaagggtcgagcccggatcagacattgatgtcattaacctagagctgatattttcagatctttaacaggtaatttggtcaacggatttcactttgtcttgctatcacgcatttcaaaagaaacttctttgctacctgtgtaataaccgtagatagagaagaggttagataagcttaacaagagcgatacacaagtaaaagtgaaggtaagacatacaaattctttcgttctgatgacctttttgttctatgtgctaattgattgcaccacttaggaacaagcagagaaatcaggattggaaaaaattcagtaggcacttatggaaggaaagcctgcaagatcggtcgatttggctgagcatgagaaagaagttataaaacatctttatctgctaactatgaaacctgtcatttctgttgctaatgtaatagaatctgatcttgctgaacctgatatcaatcctcgtgtcaaagaggtggctaaagcagcatcatatttgcagtatggtatggttacaatactagctcaggtttgttgtatacatcgaagtacaagaacctttgaagaaatttctgctaaataattttatattttttatgttgcctacccatatgtgtccacctatgctaacaaaatcatggaatgtataaaaagattgaaactgaactcgctgagctaccattggaagagagagtagagtatttaaaatctcttggtgttgctgaaagtggactaggaaatttggtaaaagcaacatataatctattggggttaagaacttatttcacaaccggagacaaggtgcatcatttgtgctgttaaagttttttccccgtcagttaaaagaaactgacagacctttaactgtgtccttttaggaaacaaaagctcagactattttttcaggcccttcttcctcacaattatttctactgtaatatttgaagaggtttttgtaatcattataactgcatgtgattctacatataggcgtgactgcgccacaagcagctggagttattcatagcgactttcagaaaggatttattagagttgaaactgtaagctgtacataacgatgagaattgaatgacgaagtttcagatttcggtttacatgttatgatatttctcagatacaatggcaatacttcacctctacggaatttggatataccgttacctgcttttttatgtttgatatttattaatcgtacactcattaataccatacctcaggtatcctacgatgattttgttgcagctggttttcttggagtagcaagggagaaaggactggaaaaatttcaaaaacatcgagtcaagaagttttggcagcactttcatttcatccttattgcagtgcctcgacagtagacataattaagttctgtccatgagtgggatttggggctttggttggcttgcgtgcccactcggtaatcaccatgaagcagaggatggaccgtgtcatctggagcagcaacagcaacagagtgtgggctatccatttgttgtagatgaattatgcgatttacatgcacaattctttgcataaataaaatatagtacacactaattcaactcaattttatctcaattctcatcggtttaatctctggtgacatgttgtactcgtacaatatttagagaagacgagattgtgtgtcattgcaacacacagacattatactatattttattaaaaaaaaaaaaaaaaaaaaaaaaaaaaaaaaaaagaaaaaaaaaaaaaaaaaaactcgagggggggcccggtac

SEQ ID NO: 37141 - protein, 100 aa, Zea mays subsp. mays
LGVGSDRDDLVLPVRLVDVAPALAMEPGLPRLVVLVRPRPPISMSLRASIIGLPNVGKSNLFNAIVVRCFEDDDIVHVNGRVEPGSDIDVINLELIFSDL

SEQ ID NO: 37142 - protein, 87 aa, Zea mays subsp. mays
MEGKPARSVDLAEHEKEVIKHLYLLTMKPVISVANVIESDLAEPDINPRVKEVAKAASYLQYGMVTILAQVCCIHRSTRTFEEISAK

SEQ ID NO: 37143 - protein, 84 aa, Zea mays subsp. mays
MIFLRYNGNTSPLRNLDIPLPAFLCLIFINRTLINTIPQVSYDDFVAAGFLGVAREKGLEKFQKHRVKKFWQHFHFILIAVPRQ

SEQ ID NO: 37144 - protein, 76 aa, Zea mays subsp. mays
MEPGLPRLVVLVRPRPPISMSLRASIIGLPNVGKSNLFNAIVVRCFEDDDIVHVNGRVEPGSDIDVINLELIFSDL

SEQ ID NO: 37145 - DNA, 1237 bp, Zea mays subsp. mays
tcactagtccccccccccccccctttgtatttccgcctcccccgagaaaacgaaaaccctagtttcagaggcatctccagacaccgaaaatggcggaaggactcgttttgaagggcaccatgcgtgcacacactgacatggtgacggcaatcgccaccccaatcgataacgcagacatcatcgtctcagcttcccgcgacaaatccatcattttgtggaaactcaccaaggacgacaaagcctacggtgtagctcagaggcgtctcactggtcactctcacttcgttgaggatgttgttctctcctccgatggacaattcgcgctttccggcagctgggacggcgagctccgtctttgggatcttgctgctggtgtctccactcgtagattcgttggacacaccaaggacgtgctctccgtcgccttctcactcgacaaccgtcagatcgtctctgcatctcgtgaccgtacgatcaagctgtggaacactcttggtgagtgcaagtacaccatttcagaaggtggtgagggacaccgtgattgggttagctgcgtcagattcagccctaacacgcttcagccgacgattgtatctgcttcgtgggacaagaccgtgaaagtgtggaacctttcgaactgcaagctcagatcgactcttgctggtcacaccggttacgtgagcactgtggctgtatcacctgatggttctctttgtgcaagtggaggcaaagacggtgttgttttgctgtgggatttggctgaggggaagaagctttactctcttgaagctaactctgtgatccatgctctttgcttcagtcccaacaggtactggctctgtgctgcaactgaacatggtattaagatttgggaccttgagagcaagagcattgttgaggatttgaaggttgatctcaaggctgaggctgaaaaggctgacaacagtggtcctgctgccaccaagaggaaggttatttactgcacaagccttaactggagcgctgatggaagcaccctcttcagtggttacaccgatggagtcattagagtttggggtattggtcgttactagtaatctcatcacttgtgctgtcgttgctctctgctatctgcttgttggtttcatctatcacttatgtttttatcgacaactcatgaagtaccttgaggtttttggaaggatgtttgttttcttgtcaaaaaaaaaaaaaaaaaactcgagggggggcccggtac

SEQ ID NO: 37146 - protein, 327 aa, Zea mays subsp. mays
MAEGLVLKGTMRAHTDMVTAIATPIDNADIIVSASRDKSIILWKLTKDDKAYGVAQRRLTGHSHFVEDVVLSSDGQFALSGSWDGELRLWDLAAGVSTRRFVGHTKDVLSVAFSLDNRQIVSASRDRTIKLWNTLGECKYTISEGGEGHRDWVSCVRFSPNTLQPTIVSASWDKTVKVWNLSNCKLRSTLAGHTGYVSTVAVSPDGSLCASGGKDGVVLLWDLAEGKKLYSLEANSVIHALCFSPNRYWLCAATEHGIKIWDLESKSIVEDLKVDLKAEAEKADNSGPAATKRKVIYCTSLNWSADGSTLFSGYTDGVIRVWGIGRY

SEQ ID NO: 37147 - protein, 317 aa, Zea mays subsp. mays
MRAHTDMVTAIATPIDNADIIVSASRDKSIILWKLTKDDKAYGVAQRRLTGHSHFVEDVVLSSDGQFALSGSWDGELRLWDLAAGVSTRRFVGHTKDVLSVAFSLDNRQIVSASRDRTIKLWNTLGECKYTISEGGEGHRDWVSCVRFSPNTLQPTIVSASWDKTVKVWNLSNCKLRSTLAGHTGYVSTVAVSPDGSLCASGGKDGVVLLWDLAEGKKLYSLEANSVIHALCFSPNRYWLCAATEHGIKIWDLESKSIVEDLKVDLKAEAEKADNSGPAATKRKVIYCTSLNWSADGSTLFSGYTDGVIRVWGIGRY

SEQ ID NO: 37148 - protein, 311 aa, Zea mays subsp. mays
MVTAIATPIDNADIIVSASRDKSIILWKLTKDDKAYGVAQRRLTGHSHFVEDVVLSSDGQFALSGSWDGELRLWDLAAGVSTRRFVGHTKDVLSVAFSLDNRQIVSASRDRTIKLWNTLGECKYTISEGGEGHRDWVSCVRFSPNTLQPTIVSASWDKTVKVWNLSNCKLRSTLAGHTGYVSTVAVSPDGSLCASGGKDGVVLLWDLAEGKKLYSLEANSVIHALCFSPNRYWLCAATEHGIKIWDLESKSIVEDLKVDLKAEAEKADNSGPAATKRKVIYCTSLNWSADGSTLFSGYTDGVIRVWGIGRY

SEQ ID NO: 37149 - DNA, 543 bp, Zea mays subsp. mays
ggtccgactcccagccgtcgtctgctgcggactccgcctccagtttggtctgtttcttgcaagttgatcttgtggtagttcccccaactgtcaccatgcagaacgaggagggtaagactgtggacctctatgtccccaggaagtgctcggccacaaacaggatcatcactgccaaggaccatgcctctgtccagatcaacattggccacttggatgcgaatggcctgtatgatggtcacttcacaacgtttgctctctctgggtttgtccgtgctcagggcgacgcagacagctccttggacaggctgtggcagaagaagaaggctgatatcaagcagtagattttacatctagtttaccaagaattggacactgccttagctatgttttgaattcatgtcactatatgcaatgttgtgatttcagctggtaccttaaatctgaagatttagtatctttgttgggttccttctgaaaaaaaaaaaaaaaaaaaaaaaaaaaaaaagaaaaaaaaaaaaaaaaaaaactcgagggggggcccgg

SEQ ID NO: 37150 - protein, 112 aa, Zea mays subsp. mays
SDSQPSSAADSASSLVCFLQVDLVVVPPTVTMQNEEGKTVDLYVPRKCSATNRIITAKDHASVQINIGHLDANGLYDGHFTTFALSGFVRAQGDADSSLDRLWQKKKADIKQ

SEQ ID NO: 37151 - protein, 81 aa, Zea mays subsp. mays
MQNEEGKTVDLYVPRKCSATNRIITAKDHASVQINIGHLDANGLYDGHFTTFALSGFVRAQGDADSSLDRLWQKKKADIKQ

SEQ ID NO: 37152 - protein, 74 aa, Zea mays subsp. mays
MSPGSARPQTGSSLPRTMPLSRSTLATWMRMACMMVTSQRLLSLGLSVLRATQTAPWTGCGRRRRLISSSRFYI

SEQ ID NO: 37153 - DNA, 2117 bp, Zea mays subsp. mays
agagagagagagctcactagtccccccccccccccggctctctctttcgccttctcttagcctaccctttttccttcctcctctccgattcttcctccgtcagtaaaagaaaatcaaaatggcttcacacattgttggatacccacgtatgggccctaagagagagctcaagtttgcattggaatctttctgggatggtaagagcactgctgaggatcttcagaaggtgtctgctgatctcaggtcatccatctggaaacagatgtctgccgctgggactaagttcatccctagcaacacctttgctcactacgaccaggttcttgacaccaccgccatgctcggtgctgttccacctaggtatggatacactggtggtgagatcggccttgatgtttacttctccatggctagaggaaatgcctctgtgcctgccatggaaatgaccaagtggttcgacaccaactaccattacatcgtccctgagttgggccctgaggtcaacttctcttacgcatcccacaaggccgtgaatgagtacaaggaggccaaggctcttggtgttgacaccgtccctgtacttgttggtccagtctcttacttgctgctttccaaggctgccaagggtgttgacaagtcattcgaacttctttctcttctccctaaaattctcccgatctacaaggaagtgattacggagcttaaggcagctggtgccacctggattcagcttgacgagcctgtccttgttatggatcttgagggtcagaaactccaggcctttactggtgcctatgctgaacttgaatcaactctttcaggtttgaatgttcttgtcgagacctacttcgctgatatccctgctgaggcatacaagaccctaacctcattgaagggtgtgaccgcctttggatttgatttggttcgtggcaccaagacccttgatttggtcaaggcaggtttccctgagggaaagtacctctttgctggtgttgttgatggaaggaacatctgggccaacgactttgctgcgtccctaagcaccttgcaggcacttgaaggcattgttggtaaagacaagcttgtggtctcaacctcctgctctcttctccacaccgctgttgatcttatcaatgagactaagcttgatgatgaaatcaagtcatggatggcgtttgctgcccagaaggtcgttgaagtgaatgcattggccaaggctttggctggtcagaaggacgaggcccttttctctgccaatgctgcggctttggcttcaaggagatcttccccaagagtcaccaacgagggtgtccagaaggctgctgctgctttgaagggatctgaccaccgtcgtgcaaccaatgttagtgctaggctagatgctcagcagaagaagctcaatctcccaatcctaccaaccacaaccatcggatccttcccacagactgtagagctcaggagagttcgtcgtgagtacaaggccaaaaaggtctctgaggaggactacgttaaggccatcaaggaagagatcaagaaagttgttgacctccaagaggaacttgacatcgatgttcttgtccacggagagccagagagaaacgacatggttgagtacttcggtgagcagttgtctggttttgccttcactgcaaacggatgggtccaatcttatggatctcgctgtgtgaagccaccagttatctatggtgatgtgagccgtcccaaggcaatgaccgtcttctggtccgcaatggctcagagcatgacctctcgcccaatgaagggtatgcttaccggtcccgtcaccattctcaactggtcctttgtcaggaacgaccagcccaggcacgaaacctgttaccagattgctttggccatcaaggacgaagtcgaggatcttgagaaaggtggaatcggtgtcattcagattgatgaggctgcacttagagaaggactaccactcaggaaatccgagcatgctttctacttggactgggccgtccactccttcagaatcaccaactgtggagtccaagacagcacccagatccacactcacatgtgctactcccacttcaatgacatcatacactccatcatcgacatggatgctgatg

SEQ ID NO: 37154 - protein, 666 aa, Zea mays subsp. mays
MASHIVGYPRMGPKRELKFALESFWDGKSTAEDLQKVSADLRSSIWKQMSAAGTKFIPSNTFAHYDQVLDTTAMLGAVPPRYGYTGGEIGLDVYFSMARGNASVPAMEMTKWFDTNYHYIVPELGPEVNFSYASHKAVNEYKEAKALGVDTVPVLVGPVSYLLLSKAAKGVDKSFELLSLLPKILPIYKEVITELKAAGATWIQLDEPVLVMDLEGQKLQAFTGAYAELESTLSGLNVLVETYFADIPAEAYKTLTSLKGVTAFGFDLVRGTKTLDLVKAGFPEGKYLFAGVVDGRNIWANDFAASLSTLQALEGIVGKDKLVVSTSCSLLHTAVDLINETKLDDEIKSWMAFAAQKVVEVNALAKALAGQKDEALFSANAAALASRRSSPRVTNEGVQKAAAALKGSDHRRATNVSARLDAQQKKLNLPILPTTTIGSFPQTVELRRVRREYKAKKVSEEDYVKAIKEEIKKVVDLQEELDIDVLVHGEPERNDMVEYFGEQLSGFAFTANGWVQSYGSRCVKPPVIYGDVSRPKAMTVFWSAMAQSMTSRPMKGMLTGPVTILNWSFVRNDQPRHETCYQIALAIKDEVEDLEKGGIGVIQIDEAALREGLPLRKSEHAFYLDWAVHSFRITNCGVQDSTQIHTHMCYSHFNDIIHSIIDMDAD

SEQ ID NO: 37155 - protein, 656 aa, Zea mays subsp. mays
MGPKRELKFALESFWDGKSTAEDLQKVSADLRSSIWKQMSAAGTKFIPSNTFAHYDQVLDTTAMLGAVPPRYGYTGGEIGLDVYFSMARGNASVPAMEMTKWFDTNYHYIVPELGPEVNFSYASHKAVNEYKEAKALGVDTVPVLVGPVSYLLLSKAAKGVDKSFELLSLLPKILPIYKEVITELKAAGATWIQLDEPVLVMDLEGQKLQAFTGAYAELESTLSGLNVLVETYFADIPAEAYKTLTSLKGVTAFGFDLVRGTKTLDLVKAGFPEGKYLFAGVVDGRNIWANDFAASLSTLQALEGIVGKDKLVVSTSCSLLHTAVDLINETKLDDEIKSWMAFAAQKVVEVNALAKALAGQKDEALFSANAAALASRRSSPRVTNEGVQKAAAALKGSDHRRATNVSARLDAQQKKLNLPILPTTTIGSFPQTVELRRVRREYKAKKVSEEDYVKAIKEEIKKVVDLQEELDIDVLVHGEPERNDMVEYFGEQLSGFAFTANGWVQSYGSRCVKPPVIYGDVSRPKAMTVFWSAMAQSMTSRPMKGMLTGPVTILNWSFVRNDQPRHETCYQIALAIKDEVEDLEKGGIGVIQIDEAALREGLPLRKSEHAFYLDWAVHSFRITNCGVQDSTQIHTHMCYSHFNDIIHSIIDMDAD

SEQ ID NO: 37156 - protein, 618 aa, Zea mays subsp. mays
MSAAGTKFIPSNTFAHYDQVLDTTAMLGAVPPRYGYTGGEIGLDVYFSMARGNASVPAMEMTKWFDTNYHYIVPELGPEVNFSYASHKAVNEYKEAKALGVDTVPVLVGPVSYLLLSKAAKGVDKSFELLSLLPKILPIYKEVITELKAAGATWIQLDEPVLVMDLEGQKLQAFTGAYAELESTLSGLNVLVETYFADIPAEAYKTLTSLKGVTAFGFDLVRGTKTLDLVKAGFPEGKYLFAGVVDGRNIWANDFAASLSTLQALEGIVGKDKLVVSTSCSLLHTAVDLINETKLDDEIKSWMAFAAQKVVEVNALAKALAGQKDEALFSANAAALASRRSSPRVTNEGVQKAAAALKGSDHRRATNVSARLDAQQKKLNLPILPTTTIGSFPQTVELRRVRREYKAKKVSEEDYVKAIKEEIKKVVDLQEELDIDVLVHGEPERNDMVEYFGEQLSGFAFTANGWVQSYGSRCVKPPVIYGDVSRPKAMTVFWSAMAQSMTSRPMKGMLTGPVTILNWSFVRNDQPRHETCYQIALAIKDEVEDLEKGGIGVIQIDEAALREGLPLRKSEHAFYLDWAVHSFRITNCGVQDSTQIHTHMCYSHFNDIIHSIIDMDAD

SEQ ID NO: 37157 - DNA, 1857 bp, Zea mays subsp. mays
agcacaaaactcggaaccctaatctgttctgcgcacgcgcggaccgtccggcccacaggcgcggaccgtccggaccgcggaccgtccggcctcagggccggaccatccgcttgctcatttctggttcaaacacacactaaccaatgcatgtgggttgttttgaataagaatatttttaaaaggtcctcccatctctatcgtgtcatttatcttggttggatggttgcaccaatatgtatggttgtgtcatatatgtctttttttaattgctagtttgctactcacctactccacaacaaagtatttgtttctagacaacaaaacgatgattttgttatctttcactaccgttcatgtcacacacatgtgctcaatgctcacttgtagatatgtcatgcctcaagctcaaaggtttccttcacaaaataagaccaaacacaagtgagcatgactgcattgctgaaatttgtttgaaatctgatttcaagttccaattagtagattttgtacaaggacacacatttcatttatgttttcttcatattttccccaataccttctgctgtaacaaatatctcccctactcagattcatcgtctaataacagtatttacttttaatgagtagtgactgtctttcaaaactttcccatgtatgtcccttttaccggtgaacttaaattaatatatactagatgtatgtgggaaagaggtccgaagaacatctctaactcaatatatactattagttggcttcatcccctgaaatcaaacacctctaatttctaatccatcgctctggctgcaccattacaactagtttggttagacgggagttaaaggagattggggagaattaagggagaaatgaactaattttctctcaatgtccttctactaaaataatgtgagcaactagacaactatactgcgaagacctttgcagagtaagacgatgatgttgtgcgggaggagatggccctaggtggatgtcatgtacggtaagccgtacacaaggcgcaggcgcgcacgcgacatccggcgggcagcagagcgcgccaaaagtgcagcagcgccacagatggcagacactcaagtttaggaaagcagcagccacttatggcgagggataaataggaaagtatcaatttggctcttatggcaaggaataagtaggaaagtagcaatttggcacttatggcaaggaataagtaggaaagtagtattttggcagggaggataattagggagcttgctccatttgtgtggccgccggctctatatatccccaggtgcgcagcactgttgagggcaataaaatatcaagtcatttcccacctctctctctcaagcctgcggttaggaggaatactcctaccggagaagacggccgaaggctacgagttacgtagccgaggcccggcgagtcaagggttcgacgctcttgacagctcttggtatcctgagtccggagatccttgcctcacccagtcccgcccaccgatccactcaccacaccaccatccccgaccacgcccactagcggttcgccatcctccatccacatggtcgagcccactttagccgacgtcatcgagatgatgaaggccatgcaggccgacatcaccaggctgaaggagaagtctgattcctcctcctcaagcggcgcccaggccgagcgtcatcgcgacatcgatcgcccgccaaggttccagaaatgggactttccgcggtttgatggcaagaccgatccactcctcttcatcaacaaatgtgagtcgtattttcgacagcagcgtacgatggtggaggagcaagtgtggatggcctcgtataacctcgagggggggcccggtac

SEQ ID NO: 37158 - protein, 97 aa, Zea mays subsp. mays
MVEPTLADVIEMMKAMQADITRLKEKSDSSSSSGAQAERHRDIDRPPRFQKWDFPRFDGKTDPLLFINKCESYFRQQRTMVEEQVWMASYNLEGGPG

SEQ ID NO: 37159 - protein, 90 aa, Zea mays subsp. mays
STKLGTLICSAHARTVRPTGADRPDRGPSGLRAGPSACSFLVQTHTNQCMWVVLNKNIFKRSSHLYRVIYLGWMVAPICMVVSYMSFFNC

SEQ ID NO: 37160 - protein, 88 aa, Zea mays subsp. mays
MSHTCAQCSLVDMSCLKLKGFLHKIRPNTSEHDCIAEICLKSDFKFQLVDFVQGHTFHLCFLHIFPNTFCCNKYLPYSDSSSNNSIYF

SEQ ID NO: 37161 - DNA, 1116 bp, Zea mays subsp. mays
ctcactagtccccccccccccccactttgttgactcggttgcttatctgactcagtgatttgagttcatcggtgaacgagttaagagtatcctcgcacactctaggcatcttttctccacttgcgtcaatggagatggtgggaaactcgttggcttcacctttggcaacattgggttcagccaaatgcttccgccactctgcagttgatcttgtaacatacactaatgttttaccattaagattgaactcgtcgtatcatggtgttaatggaggcgtaaggacatcttcatattcgcgaagcaagtggatagtgttttgttcaacaacacaagtggaaacctctaatgaagatccaaatatatgggaagaatgcaaagaagctttgtcttgttttgatttcagtgttgaggagaaagacaagatactagggaaagcgtttggtcatatccactctccgtactggaccgaagaacgagtgaaagagaatccaaaggtggaaaatttgaatcaaatactagagttccttagaagtcttggtttatcagacgaagatcttcataaggtgatgaagaaattcccggaagtacttggttgcagtcttgaagaggagatgaaaccaaacattgggattttggaaaaccaatgggggattacgggtaagcaactacgaaatctgttgcttcggaatccgaaagtgttgggatataatgtggattgtaaaggagattgtgttgctcaatgcactcggtgttgggttcggttttagtcctttactagttcgtctattcaccattctgaatgatcgttgatattttacatatttgagtgtagcttagaaatagagcaagagctgatttgtatctagtcctccatcttcttgtttcatcacagctacttgaataaacaatcgatcatgatttaaggaccgttgtgtaggtctcggtggaaactatcacatttgaaaatatcatacaaagaaaatcattccattaaaaaaaaaaaaaaaaaaaaaaaaaaaaaaaaaaaaaaaaaaaaaaaaaaaaaagaaaaaaaaaaaaaaaaaaaactcgagggggggcccggaacccaattcgcccaatagggagccgaataac

SEQ ID NO: 37162 - protein, 212 aa, Zea mays subsp. mays
MEMVGNSLASPLATLGSAKCFRHSAVDLVTYTNVLPLRLNSSYHGVNGGVRTSSYSRSKWIVFCSTTQVETSNEDPNIWEECKEALSCFDFSVEEKDKILGKAFGHIHSPYWTEERVKENPKVENLNQILEFLRSLGLSDEDLHKVMKKFPEVLGCSLEEEMKPNIGILENQWGITGKQLRNLLLRNPKVLGYNVDCKGDCVAQCTRCWVRF

SEQ ID NO: 37163 - protein, 210 aa, Zea mays subsp. mays
MVGNSLASPLATLGSAKCFRHSAVDLVTYTNVLPLRLNSSYHGVNGGVRTSSYSRSKWIVFCSTTQVETSNEDPNIWEECKEALSCFDFSVEEKDKILGKAFGHIHSPYWTEERVKENPKVENLNQILEFLRSLGLSDEDLHKVMKKFPEVLGCSLEEEMKPNIGILENQWGITGKQLRNLLLRNPKVLGYNVDCKGDCVAQCTRCWVRF

SEQ ID NO: 37164 - DNA, 991 bp, Zea mays subsp. mays
gataactcacactctctcttcaatcctttcctttcattgtagttaaacaaagattacgattatggccacatcagctatccaacaatcctccttcgccggccaaacggctctcaagccctccagcgacctcatccaaaaggtgggcgtcttgggcggtggccgtgtgaccatgcgtcgtaccgtcaagtctactccccaaagcatttggtatggaccagaccgtcccaagtacttgggaccattctcggagaacacaccgtcttacttaactggagaataccccggagactacggttgggacaccgctggactctcggctgacccggagacattcgctaagaaccgtgagcttgaagtaatccacagcagatgggctatgttgggtgctctcggatgcacattccctgagattctctccaagaacggtgttaaattcggagaagccgtgtggttcaaggcaggctctcagattttctcagaaggaggtcttgattacctcggaaaccctaacttgatccacgcgcaaagcatcttagccatttgggctgttcaagttgtgctcatggggttcattgaaggctacagaatcggaggtggaccactcggagaaggacttgacccgctttaccccggaggtgcgttcgacccattgaacttggctgaggatccagaggctttctctgagctgaaggtgaaggagctcaagaacggtcgtcttgccatgttctctatgtttggattctttgtccaagccattgttactggtaaaggccccattgagaacttgtttgatcatttggctgatcctgtggctaacaacgcctggtcttacgctactaactttgtccccggaaagtaattatcttttatgtatttgcttaataatctctccgctttgtaaacttgtgattgtgtaatattgacgtttgatgtgaatttggcacttaatgatgaaaaaaaaaaaaaaaaaaaactcgagggggggcccggt

SEQ ID NO: 37165 - protein, 265 aa, Zea mays subsp. mays
MATSAIQQSSFAGQTALKPSSDLIQKVGVLGGGRVTMRRTVKSTPQSIWYGPDRPKYLGPFSENTPSYLTGEYPGDYGWDTAGLSADPETFAKNRELEVIHSRWAMLGALGCTFPEILSKNGVKFGEAVWFKAGSQIFSEGGLDYLGNPNLIHAQSILAIWAVQVVLMGFIEGYRIGGGPLGEGLDPLYPGGAFDPLNLAEDPEAFSELKVKELKNGRLAMFSMFGFFVQAIVTGKGPIENLFDHLADPVANNAWSYATNFVPGK

SEQ ID NO: 37166 - protein, 229 aa, Zea mays subsp. mays
MRRTVKSTPQSIWYGPDRPKYLGPFSENTPSYLTGEYPGDYGWDTAGLSADPETFAKNRELEVIHSRWAMLGALGCTFPEILSKNGVKFGEAVWFKAGSQIFSEGGLDYLGNPNLIHAQSILAIWAVQVVLMGFIEGYRIGGGPLGEGLDPLYPGGAFDPLNLAEDPEAFSELKVKELKNGRLAMFSMFGFFVQAIVTGKGPIENLFDHLADPVANNAWSYATNFVPGK

SEQ ID NO: 37167 - protein, 160 aa, Zea mays subsp. mays
MLGALGCTFPEILSKNGVKFGEAVWFKAGSQIFSEGGLDYLGNPNLIHAQSILAIWAVQVVLMGFIEGYRIGGGPLGEGLDPLYPGGAFDPLNLAEDPEAFSELKVKELKNGRLAMFSMFGFFVQAIVTGKGPIENLFDHLADPVANNAWSYATNFVPGK

SEQ ID NO: 37168 - DNA, 1402 bp, Zea mays subsp. mays
gctctctcacttcatctatggcttcttcttctctgcagtctctcttctctctgttttgccttgctctgttctctcttcctctcatcgtctcctccatcggcatcaactatggccaggtcgctaacaaccttcctccccctaaaaacgtcatccctctcctcaagtctgtgggagctacaaaagtcaagctctatgacgccgatccacaagccctacgtgccttcgccggctccggcttcgagctcaccgtggccctcggtaacgagtacctggctcagatgagcgaccctattaaagcccaaggctgggtgaaggagaacgtccaagcttacctcccaaacaccaagatcgtggccatcgtagtgggaaacgaagtcctcacctcaaaccagtcagccctcacggcagccctcttcccggctatgcaaagaatccacggtgctctggtggattgtggcctaaacaagcagatctttgtgacgacggctcactcactagccatcttggatgtatcctaccctccctcggccacttccttccgccgcgacctcctcggctccctcactcccatcttggacttccacgtcaagactggctcaccaatcctcatcaacgcctaccctttcttcgcctacgaagaaaaccccaaacacgtttctctcgacttcgtactcttccaaccaaatcaaggcttcaccgatcctggctctaatttccactacgacaacatgctcttcgctcaggtcgacgcagtctatcacgctcttgacgctgtcggcatcagctacaagaaagttcccattgtcgtctccgagaccggatggccttccaacggtgacccgcaagaagtcggagccacctgcgacaatgctcgcaagtacaatgggaatctgatcaagatgatgatgagcaagaagatgaggacgcctattcgacctgagtgcgatctcaccatcttcgtctttgctctctttaacgagaacatgaagcctggaccaacctccgagaggaactacggtctcttcaaccctgacggaactccggtttactcacttgggatcaagacctcttccactcatagtagtggtagtggtagcagcaactccactggtggtagtagcagtggcggtggcggtaacactggtggctcttccagcggtggtggcatctatcagccagtcacgggtaacccatcaccggattacatgtccatttcctccgccgggggaaaaggcagattcgttgagtgtgtgttgttcttcttcttgctttgcatcatcaagcttcggttgtaaaagcttctccactagatctcgtcggctttgtacttttacgcggttgatgacgtgatatagcccccaaatttaaaaaaaaaaaaaaaactcgagggggggcccggtac

SEQ ID NO: 37169 - protein, 430 aa, Zea mays subsp. mays
SLTSSMASSSLQSLFSLFCLALFSLPLIVSSIGINYGQVANNLPPPKNVIPLLKSVGATKVKLYDADPQALRAFAGSGFELTVALGNEYLAQMSDPIKAQGWVKENVQAYLPNTKIVAIVVGNEVLTSNQSALTAALFPAMQRIHGALVDCGLNKQIFVTTAHSLAILDVSYPPSATSFRRDLLGSLTPILDFHVKTGSPILINAYPFFAYEENPKHVSLDFVLFQPNQGFTDPGSNFHYDNMLFAQVDAVYHALDAVGISYKKVPIVVSETGWPSNGDPQEVGATCDNARKYNGNLIKMMMSKKMRTPIRPECDLTIFVFALFNENMKPGPTSERNYGLFNPDGTPVYSLGIKTSSTHSSGSGSSNSTGGSSSGGGGNTGGSSSGGGIYQPVTGNPSPDYMSISSAGGKGRFVECVLFFFLLCIIKLRL

SEQ ID NO: 37170 - protein, 425 aa, Zea mays subsp. mays
MASSSLQSLFSLFCLALFSLPLIVSSIGINYGQVANNLPPPKNVIPLLKSVGATKVKLYDADPQALRAFAGSGFELTVALGNEYLAQMSDPIKAQGWVKENVQAYLPNTKIVAIVVGNEVLTSNQSALTAALFPAMQRIHGALVDCGLNKQIFVTTAHSLAILDVSYPPSATSFRRDLLGSLTPILDFHVKTGSPILINAYPFFAYEENPKHVSLDFVLFQPNQGFTDPGSNFHYDNMLFAQVDAVYHALDAVGISYKKVPIVVSETGWPSNGDPQEVGATCDNARKYNGNLIKMMMSKKMRTPIRPECDLTIFVFALFNENMKPGPTSERNYGLFNPDGTPVYSLGIKTSSTHSSGSGSSNSTGGSSSGGGGNTGGSSSGGGIYQPVTGNPSPDYMSISSAGGKGRFVECVLFFFLLCIIKLRL

SEQ ID NO: 37171 - protein, 338 aa, Zea mays subsp. mays
MSDPIKAQGWVKENVQAYLPNTKIVAIVVGNEVLTSNQSALTAALFPAMQRIHGALVDCGLNKQIFVTTAHSLAILDVSYPPSATSFRRDLLGSLTPILDFHVKTGSPILINAYPFFAYEENPKHVSLDFVLFQPNQGFTDPGSNFHYDNMLFAQVDAVYHALDAVGISYKKVPIVVSETGWPSNGDPQEVGATCDNARKYNGNLIKMMMSKKMRTPIRPECDLTIFVFALFNENMKPGPTSERNYGLFNPDGTPVYSLGIKTSSTHSSGSGSSNSTGGSSSGGGGNTGGSSSGGGIYQPVTGNPSPDYMSISSAGGKGRFVECVLFFFLLCIIKLRL

SEQ ID NO: 37172 - DNA, 1814 bp, Zea mays subsp. mays
tagtccccccccccccccccccgaggtccagcacacgatcctaaatcctgtgagcatcgtctccatcgctggtcttccattattgacgaatctctttgcctttttttcttccttcttaaacaaacccaattcgatttcaacgaacgcctcttctctctcactctctttcgatttgttctttgccggagctcgtagtgtaagcgtgatccgcggcggagagatggctcctaatgatcctaaaaaagccgttggtggcggcggaagtggtttcttcgcctctcttgcttcgtcgatctccaatttgggatctgctatgaccaaatcagttaatggtttggttccctatgagggacttgaagttatcaatcctgaaggaagtacagatgatgctgaggaggaagcaagcagaggaagatggaagcaagaggatcgagatggctattggaagatgatgcagaagtacataggatctgatgttacatcaatggtgacccttcctgtgattatttttgaaccaatgacaatgcttcagaaaatggcggagttgatggaatactcgcatctgctagacatggcagacaaaaccgaggacccttatttgcgcatggtgtatgcatcatcgtgggctatatccgtgtattatgctttccaacgtacctggaaaccattcaatccaatccttggtgagacttatgagatggctaattacaatggtgttaacttcatatctgaacaggtcagccatcacccaccaatgagtgctggtcatgctgaaaatgagcattttacgtatgattgtacttcaaaactgaaaacaaaatttttgggcaattccattgacgtttacccagtaggaaggacacgggtgacacttaaaagagatggagttgttcttgacttggtacctcctctgaccaaagttcacaacctaatctttggacgaacttgggtcgattcgcctggggaaatgatcatgacaaatcagaccaccggtgacaaagtcgtgctttactttcaaccatgtggctggttcggatctggtcgatatgaagtggatggatatgtctataacgcctctgaggagcctaagatactcatgactggcaaatggaacgagtccatgagttatcagccgtgtgatggtgaaggtgaacctctcccaggcaccgaactgaaagaggtatggaaactcgctgatgtgccaaaggatgacaaatatcaatacactcactttgctcacaagattaatagcttcgacactgccccgaaaaagctgttgccctctgattcacggttacgacctgatagatacgcacttgagatgggcgacatgtccaaatcaggctatgagaagagcagcatggaagagagacagagagctgaaaagagaacccgcgaagagaaaggccaagcctttactccaaaatggttcgatgtaacggaagaagtcactgctacaccatggggtgatctggaagtttaccaattcaatggaaagtactcggaacatcgtgcagctgcggataactctgaagataacaccgaccctaagtcgatccaattcaacccatggcaattccaagatctgtctacttaaatgtatcgctccaaaagacagaaaagatcaaatctttttggaaacaaatgtattcttattctctcgtagttacaaaaaactttgttctacatctgctagctttcccattgctttctctagtattagtgtacaacttctactgttttgtctaaaaaaaaaaaaaaaaaaaactcgagggggggcccggtacccaattcgctgtttaaacacaataaag

SEQ ID NO: 37173 - protein, 531 aa, Zea mays subsp. mays
SPPPPPPEVQHTILNPVSIVSIAGLPLLTNLFAFFSSFLNKPNSISTNASSLSLSFDLFFAGARSVSVIRGGEMAPNDPKKAVGGGGSGFFASLASSISNLGSAMTKSVNGLVPYEGLEVINPEGSTDDAEEEASRGRWKQEDRDGYWKMMQKYIGSDVTSMVTLPVIIFEPMTMLQKMAELMEYSHLLDMADKTEDPYLRMVYASSWAISVYYAFQRTWKPFNPILGETYEMANYNGVNFISEQVSHHPPMSAGHAENEHFTYDCTSKLKTKFLGNSIDVYPVGRTRVTLKRDGVVLDLVPPLTKVHNLIFGRTWVDSPGEMIMTNQTTGDKVVLYFQPCGWFGSGRYEVDGYVYNASEEPKILMTGKWNESMSYQPCDGEGEPLPGTELKEVWKLADVPKDDKYQYTHFAHKINSFDTAPKKLLPSDSRLRPDRYALEMGDMSKSGYEKSSMEERQRAEKRTREEKGQAFTPKWFDVTEEVTATPWGDLEVYQFNGKYSEHRAAADNSEDNTDPKSIQFNPWQFQDLST

SEQ ID NO: 37174 - protein, 458 aa, Zea mays subsp. mays
MAPNDPKKAVGGGGSGFFASLASSISNLGSAMTKSVNGLVPYEGLEVINPEGSTDDAEEEASRGRWKQEDRDGYWKMMQKYIGSDVTSMVTLPVIIFEPMTMLQKMAELMEYSHLLDMADKTEDPYLRMVYASSWAISVYYAFQRTWKPFNPILGETYEMANYNGVNFISEQVSHHPPMSAGHAENEHFTYDCTSKLKTKFLGNSIDVYPVGRTRVTLKRDGVVLDLVPPLTKVHNLIFGRTWVDSPGEMIMTNQTTGDKVVLYFQPCGWFGSGRYEVDGYVYNASEEPKILMTGKWNESMSYQPCDGEGEPLPGTELKEVWKLADVPKDDKYQYTHFAHKINSFDTAPKKLLPSDSRLRPDRYALEMGDMSKSGYEKSSMEERQRAEKRTREEKGQAFTPKWFDVTEEVTATPWGDLEVYQFNGKYSEHRAAADNSEDNTDPKSIQFNPWQFQDLST

SEQ ID NO: 37175 - protein, 427 aa, Zea mays subsp. mays
MTKSVNGLVPYEGLEVINPEGSTDDAEEEASRGRWKQEDRDGYWKMMQKYIGSDVTSMVTLPVIIFEPMTMLQKMAELMEYSHLLDMADKTEDPYLRMVYASSWAISVYYAFQRTWKPFNPILGETYEMANYNGVNFISEQVSHHPPMSAGHAENEHFTYDCTSKLKTKFLGNSIDVYPVGRTRVTLKRDGVVLDLVPPLTKVHNLIFGRTWVDSPGEMIMTNQTTGDKVVLYFQPCGWFGSGRYEVDGYVYNASEEPKILMTGKWNESMSYQPCDGEGEPLPGTELKEVWKLADVPKDDKYQYTHFAHKINSFDTAPKKLLPSDSRLRPDRYALEMGDMSKSGYEKSSMEERQRAEKRTREEKGQAFTPKWFDVTEEVTATPWGDLEVYQFNGKYSEHRAAADNSEDNTDPKSIQFNPWQFQDLST

SEQ ID NO: 37176 - DNA, 689 bp, Zea mays subsp. mays
ggtcgtcgcggcggcggtggccgtgtgggcgttcccgattgcggctttggtgaactccgtagtgccagagccctacatggatgagatcttccatatttcacaagcacagcagtattgccgtggagatttctggacatgggatcccatgatcaccacccctcctggcctgtgagtttttgacaattcctcattgcttcaagctccaatttatcccatcatggatcgttgttgcaattttgcaggaattggagaaaggaaggcaactgcctacgctattcttgtagcattgtatcctgttcactggttcttcacttttctttattacactgatgttgcatcattagctgcagttcttgcagtgtacctattctgcttgaagaaacagttctggatcagcacaatgtttggtgttttttcaatactttttcgtcagacaaatgtaatatggattatattttttgctgccaatggagctatcacatacgtaaaagacttgtatcccaaggataatgcttctcatgagaacagtgaaccaatacatcagtcaaaaaaagcttctgccagggataacaaaactagtgttcaaagcttgagaagacggcgaatcaatagtcccataaataaggtcattgtttgtgaatctgctaacccttacaacagtcttacagaggaagtgtgtgacatcagct

SEQ ID NO: 37177 - protein, 157 aa, Zea mays subsp. mays
MDRCCNFAGIGERKATAYAILVALYPVHWFFTFLYYTDVASLAAVLAVYLFCLKKQFWISTMFGVFSILFRQTNVIWIIFFAANGAITYVKDLYPKDNASHENSEPIHQSKKASARDNKTSVQSLRRRRINSPINKVIVCESANPYNSLTEEVCDIS

SEQ ID NO: 37178 - protein, 96 aa, Zea mays subsp. mays
MFGVFSILFRQTNVIWIIFFAANGAITYVKDLYPKDNASHENSEPIHQSKKASARDNKTSVQSLRRRRINSPINKVIVCESANPYNSLTEEVCDIS

SEQ ID NO: 37179 - DNA, 2172 bp, Zea mays subsp. mays
gtttatctccacccatgcgtccctgctctcctctagttgagctcaatcccaagtgctcgcttaagctgtgtggccaggttccctttcctggtcgccgtcgatggaagccctgccatcgatatcgcatgatattggttgttttcttcgaccacgtcaatgcctcacaggatttggacaccttgtcgacactcgaccatgtgttcgctcgttaccacgccatcttcagcatcatggttctataaaactctgcgcactcgtcggcacccgtctgtcaatctccaccacgcagcgctgcatcggacttaccctgtatgatgttcgacgacaagcccgaaccagtatttatcagcattctcgcgagtagtgagtcacgtttgatgctggtacgataattactcgcgtgatgcggaagacgacccaagtcgaccccaagcgcgggctaatccgcaggataaagcggatgaactaatctgaagacggatagatgaaacaagtatcacaacaaggataatcatcaagtggacgtcgtctaacaacactaacctagtgttactcaggttctaactttgtgctgttgttgatggtgttaagtgccggtgggctcggccttcttataagtctaactttaccgatcacgtgcctcttccccttcttgtatttcatggtaagggacttccgcgtcgctgaaacagaggaagacatcggattctatgctggttttcttgctgcgtcgtacatggtgggcagaggcttctcttccatcttctggggcgtcatcgccgaccgcgttggacggaagcctgtcatcacgttttcgatactgtccgtggtcgtattcagcgcgctgtttggtctgagcacgacgtactggatggcgatcgccacgaggctcgtgctgggcgctctcaacggcctgctcgccccgataaaggcgtactgcgttgaagtttgccagacccagcaccaggcgcttggactctcgcttgtgaacacggcatgggctctgggtctcattgttggtccagctcttggaggctacctttcgcagccagctgagaaatatcctcacgtgttttccaaagactctgtatttggcagatttccataccttttgccctgtctaagtgtatcagcgtttgctacacttgtcctgataagctgtgagtggcttccggagactatacacaagcataaggttcccgaaatggacaccaaagcattcaaagccctgtcgtcaaaagagggctattgcgatccacctcgcaagaagaagagcttgctccagaacaggccttggatatcaaccctgctaccttactgctttttcagtcttcatgacacagcatatagtgagatactttccttatgggctgtgagcgaccggaagtatggcggccttagcttctcgactgaagatactggtcaggttcttgctatggcaggcgctagtcttctagtgtaccagcttgtcatttatcgctgggtccatagaattcttgggacagtcaactcagcacgaattgcatctgctgtgtccatacttgttcttgcaacttatccctttatgacatacctatcgggagtgaaactttccttggctctttgttccgcagccatgatgagaagtgctcttgcgatcactgtcaccacaggaatttcacttctacagaataatgctgtgtgccaagaacaaagaggcaccgcaaatggtatatcgacaactgcaatgtcattcttcaagtcaattgctccagtaggtgcaggggctctattctcatgggcacaaaaacgtcaagatgttgctttcctgccaggtgatcaagtggtgttcatggtgctgaatttggtgcagcttctcgggctgatatccacctttgagccctttctagtgttacctgcactaccagagtagtagtgtttaaggctagaagacattatgaaaataaatgtaccttggcacatagttacagttgatcgagtgcaagacagaaggaacatgattgtagccacttgttacactactaaagatgtctgattagcccaagattcaaaaagaagaatgttttattaattagcaaacttgatctattgtaatatcactgttccccaaaaaaaaaaaaaaaaaaaaaaaaaaaaaaaaaaaaaaaaaaaaacctcgggggggggcccggt

SEQ ID NO: 37180 - protein, 443 aa, Zea mays subsp. mays
MVLSAGGLGLLISLTLPITCLFPFLYFMVRDFRVAETEEDIGFYAGFLAASYMVGRGFSSIFWGVIADRVGRKPVITFSILSVVVFSALFGLSTTYWMAIATRLVLGALNGLLAPIKAYCVEVCQTQHQALGLSLVNTAWALGLIVGPALGGYLSQPAEKYPHVFSKDSVFGRFPYLLPCLSVSAFATLVLISCEWLPETIHKHKVPEMDTKAFKALSSKEGYCDPPRKKKSLLQNRPWISTLLPYCFFSLHDTAYSEILSLWAVSDRKYGGLSFSTEDTGQVLAMAGASLLVYQLVIYRWVHRILGTVNSARIASAVSILVLATYPFMTYLSGVKLSLALCSAAMMRSALAITVTTGISLLQNNAVCQEQRGTANGISTTAMSFFKSIAPVGAGALFSWAQKRQDVAFLPGDQVVFMVLNLVQLLGLISTFEPFLVLPALPE

SEQ ID NO: 37181 - protein, 416 aa, Zea mays subsp. mays
MVRDFRVAETEEDIGFYAGFLAASYMVGRGFSSIFWGVIADRVGRKPVITFSILSVVVFSALFGLSTTYWMAIATRLVLGALNGLLAPIKAYCVEVCQTQHQALGLSLVNTAWALGLIVGPALGGYLSQPAEKYPHVFSKDSVFGRFPYLLPCLSVSAFATLVLISCEWLPETIHKHKVPEMDTKAFKALSSKEGYCDPPRKKKSLLQNRPWISTLLPYCFFSLHDTAYSEILSLWAVSDRKYGGLSFSTEDTGQVLAMAGASLLVYQLVIYRWVHRILGTVNSARIASAVSILVLATYPFMTYLSGVKLSLALCSAAMMRSALAITVTTGISLLQNNAVCQEQRGTANGISTTAMSFFKSIAPVGAGALFSWAQKRQDVAFLPGDQVVFMVLNLVQLLGLISTFEPFLVLPALPE

SEQ ID NO: 37182 - protein, 391 aa, Zea mays subsp. mays
MVGRGFSSIFWGVIADRVGRKPVITFSILSVVVFSALFGLSTTYWMAIATRLVLGALNGLLAPIKAYCVEVCQTQHQALGLSLVNTAWALGLIVGPALGGYLSQPAEKYPHVFSKDSVFGRFPYLLPCLSVSAFATLVLISCEWLPETIHKHKVPEMDTKAFKALSSKEGYCDPPRKKKSLLQNRPWISTLLPYCFFSLHDTAYSEILSLWAVSDRKYGGLSFSTEDTGQVLAMAGASLLVYQLVIYRWVHRILGTVNSARIASAVSILVLATYPFMTYLSGVKLSLALCSAAMMRSALAITVTTGISLLQNNAVCQEQRGTANGISTTAMSFFKSIAPVGAGALFSWAQKRQDVAFLPGDQVVFMVLNLVQLLGLISTFEPFLVLPALPE

SEQ ID NO: 37183 - DNA, 2190 bp, Zea mays subsp. mays
tgctactcaatttgatcaaccgccatccattctcctcctccgttgcagctgcggcatccatccagtagtccgaccaatccatggcttcagcgttcgggaccgcctccacttgcggcattaaacatgcacctgccggcgttgcgcttgctgcgcccatgaagcacctttccctcgtctcgccctcgctggtttcgcttccgcgcaagatgaggccgcgaaggaagtacaacttcagggtaaacgctgcaaaggagctgcatttcaacaaggatggctcggctatcaggaaaatgcaaaatggggtcaacaagcttgcagatctcgtcggggttactcttggaccaaaggggcgaaatgtagtcctcgaaagcaagtatggctcacctaaaattgtcaatgatggtgtcactgtggcaaaggaggttgaacttgaggaccctgttgaaaatattggtgctaaattggtccgccaagctgctgctaaaacaaatgacttggctggtgatgggacaaccacttcggttgtccttgctcaagggatgattactgagggtgtaaaggttgtagctgctggtgctaatccagtgcagatcacccgtggtattgagaaaacagccaaagcactagtcagtgaactccaaaagatgtccaaggaggttgaggacagtgagcttgctgatgttgctgcagttagtgcgggaaataactatgaaattgggaatatgatagctgaggctatgaaaaaggttgggcggcagggagtggtcacacttgaagaaggaaagagtgctgaaaataacctctattctgttgagggaatgcagtttgaccgtggctatatttctccctactttgtgactgacagtgaaaaaatgacagtcgagtatgagaactgcaagcttctccttgtggacaagaaaattaacaatgccagagatcttatcactatcctggaggatgctattagaagtggatatccaattctaatagtggcagaggacattgagcaggaagctcttgcaacccttgtggttaataggcttagaggtgcattgaagattgctgctattaaggcccctggttttggagagcgcaaaagtcaatatcttgatgacattgctactctcactggaggcactgtcatcagagaagaagttggattatccttagacaaggcagacaatgcggtcctaggaactgctgctaaggttgtagttaccaaggattcaacaacaatagtgggagatggcactacacaggaggaagtgaacaaaagggtgacacaaatcaagaaccagattgaggctactgaacaagaatatgagagagaaaaactaaacgagaggatagctaaactctctggtggtgttgctgtcattcaggtaggagcacagacagaaactgagctcaaggaaaagaaattgagggttgaggatgccctgaatgctacaaaggcagcagtcgaggaaggtatcgtaggtggtggctgtacccttttgaggcttgcatcaaaagttgatgcaattatagagacccttgagaacgatgaacagaaggttggggctgaaattgtaaggaagtccttgagctatccacttaaattgattgcaaaaaatgcaggcgttaatggcagtgtggttactgagaaggttcttgccaatgagaacttcaggtatgggtacaatgcggctacaggggagtatgaggacttgatggctgctggtatcattgatcccaccaaggttgtgaggtgctgcttggagcatgctgcatcggtggcgaaaaccttcatcacctctgatgccgttgttgttgacgccaaggtggctgagcaagcaccatcatctcctgcaaacccaatggcaatgggtggtggctcaggttttgggttctaaattgttcagctgcccttcgttccatcgcagcgacagaatcttagtttcgagatataataataaattggatgatgttagtttcgagatattagttggatgttgttattgttgtctcaaattataaaaaatcaagtgcaagtaaccaagacagctgaaaaaaatagttttgatgagatgctgcttcgtttttcttttctactaaaaaaaaaaaaaaaaaaaaaaaaaaaaaaaaaaaaaaaaaaaaaactcgagggggggcccggaacccaattcgcccaaaagggagtcgaataac

SEQ ID NO: 37184 - protein, 604 aa, Zea mays subsp. mays
MASAFGTASTCGIKHAPAGVALAAPMKHLSLVSPSLVSLPRKMRPRRKYNFRVNAAKELHFNKDGSAIRKMQNGVNKLADLVGVTLGPKGRNVVLESKYGSPKIVNDGVTVAKEVELEDPVENIGAKLVRQAAAKTNDLAGDGTTTSVVLAQGMITEGVKVVAAGANPVQITRGIEKTAKALVSELQKMSKEVEDSELADVAAVSAGNNYEIGNMIAEAMKKVGRQGVVTLEEGKSAENNLYSVEGMQFDRGYISPYFVTDSEKMTVEYENCKLLLVDKKINNARDLITILEDAIRSGYPILIVAEDIEQEALATLVVNRLRGALKIAAIKAPGFGERKSQYLDDIATLTGGTVIREEVGLSLDKADNAVLGTAAKVVVTKDSTTIVGDGTTQEEVNKRVTQIKNQIEATEQEYEREKLNERIAKLSGGVAVIQVGAQTETELKEKKLRVEDALNATKAAVEEGIVGGGCTLLRLASKVDAIIETLENDEQKVGAEIVRKSLSYPLKLIAKNAGVNGSVVTEKVLANENFRYGYNAATGEYEDLMAAGIIDPTKVVRCCLEHAASVAKTFITSDAVVVDAKVAEQAPSSPANPMAMGGGSGFGF

SEQ ID NO: 37185 - protein, 579 aa, Zea mays subsp. mays
MKHLSLVSPSLVSLPRKMRPRRKYNFRVNAAKELHFNKDGSAIRKMQNGVNKLADLVGVTLGPKGRNVVLESKYGSPKIVNDGVTVAKEVELEDPVENIGAKLVRQAAAKTNDLAGDGTTTSVVLAQGMITEGVKVVAAGANPVQITRGIEKTAKALVSELQKMSKEVEDSELADVAAVSAGNNYEIGNMIAEAMKKVGRQGVVTLEEGKSAENNLYSVEGMQFDRGYISPYFVTDSEKMTVEYENCKLLLVDKKINNARDLITILEDAIRSGYPILIVAEDIEQEALATLVVNRLRGALKIAAIKAPGFGERKSQYLDDIATLTGGTVIREEVGLSLDKADNAVLGTAAKVVVTKDSTTIVGDGTTQEEVNKRVTQIKNQIEATEQEYEREKLNERIAKLSGGVAVIQVGAQTETELKEKKLRVEDALNATKAAVEEGIVGGGCTLLRLASKVDAIIETLENDEQKVGAEIVRKSLSYPLKLIAKNAGVNGSVVTEKVLANENFRYGYNAATGEYEDLMAAGIIDPTKVVRCCLEHAASVAKTFITSDAVVVDAKVAEQAPSSPANPMAMGGGSGFGF

SEQ ID NO: 37186 - protein, 562 aa, Zea mays subsp. mays
MRPRRKYNFRVNAAKELHFNKDGSAIRKMQNGVNKLADLVGVTLGPKGRNVVLESKYGSPKIVNDGVTVAKEVELEDPVENIGAKLVRQAAAKTNDLAGDGTTTSVVLAQGMITEGVKVVAAGANPVQITRGIEKTAKALVSELQKMSKEVEDSELADVAAVSAGNNYEIGNMIAEAMKKVGRQGVVTLEEGKSAENNLYSVEGMQFDRGYISPYFVTDSEKMTVEYENCKLLLVDKKINNARDLITILEDAIRSGYPILIVAEDIEQEALATLVVNRLRGALKIAAIKAPGFGERKSQYLDDIATLTGGTVIREEVGLSLDKADNAVLGTAAKVVVTKDSTTIVGDGTTQEEVNKRVTQIKNQIEATEQEYEREKLNERIAKLSGGVAVIQVGAQTETELKEKKLRVEDALNATKAAVEEGIVGGGCTLLRLASKVDAIIETLENDEQKVGAEIVRKSLSYPLKLIAKNAGVNGSVVTEKVLANENFRYGYNAATGEYEDLMAAGIIDPTKVVRCCLEHAASVAKTFITSDAVVVDAKVAEQAPSSPANPMAMGGGSGFGF

SEQ ID NO: 37187 - DNA, 616 bp, Zea mays subsp. mays
gaggaagaagaagatctgcttctgcaaaaaaccttatcctgctatggcttccactttcgtctgctctctaccaaatcctttctttgcttttccggtcaaagcaactactccttcgacggctaactatacgcttctcggaagtcgaagaggttgtcttagaatcaaagcgatttccactaaatgggaaccgacaaaggttgttcctcaggcagacagagttcttgttcgtcttgaagatcttcctattaaatcctcaggtggagtattgttgcctaaagcagctgtgaagtttgagagatacctaacaggagagattatatctgttggttctgaggttggacaacaagttggacctggaaagagggttttgttctctgatgtgagcgcttatgaggtcgatttgggaaccgatgctaggcattgcttctgtaaagagagtgacttgttggccctcgttgagtgaagtcttgtccaagagggagagatttgaagattttacaagttttctgtaattttcagacagcaattgttgtttctagttaatccttcaatttaatatcaattgagatcactttcagaaaaaaaaaaaaaaaaaaaactcgagggggggcccggt

SEQ ID NO: 37188 - protein, 153 aa, Zea mays subsp. mays
RKKKICFCKKPYPAMASTFVCSLPNPFFAFPVKATTPSTANYTLLGSRRGCLRIKAISTKWEPTKVVPQADRVLVRLEDLPIKSSGGVLLPKAAVKFERYLTGEIISVGSEVGQQVGPGKRVLFSDVSAYEVDLGTDARHCFCKESDLLALVE

SEQ ID NO: 37189 - protein, 139 aa, Zea mays subsp. mays
MASTFVCSLPNPFFAFPVKATTPSTANYTLLGSRRGCLRIKAISTKWEPTKVVPQADRVLVRLEDLPIKSSGGVLLPKAAVKFERYLTGEIISVGSEVGQQVGPGKRVLFSDVSAYEVDLGTDARHCFCKESDLLALVE

SEQ ID NO: 37190 - protein, 94 aa, Zea mays subsp. mays
GRRRSASAKNLILLWLPLSSALYQILSLLFRSKQLLLRRLTIRFSEVEEVVLESKRFPLNGNRQRLFLRQTEFLFVLKIFLLNPQVEYCCLKQL

SEQ ID NO: 37191 - DNA, 761 bp, Zea mays subsp. mays
gacacacaatccaatcaaaacacacagagagaagaaaaactcagaagaaaagccaaagagtgaaacaaaaatggcgtcgacgactctctcaatcgcaacaacaatccgttcctcatcttatcctactctcgcttccatcaatcacttcccttcccgaaccaccaccatcgaattcccctctcgcttcggtggtggttcatcatccacattgacccaccgtgcaacccatctccgtccaatcgccgccgtcgaagctccggagaaaatcgagaagatcggatccgaaatctcatccctaaccctcgaagaagctcgtatcctcgtcgactatctccaagacaaattcggtgtctccccactctctttagcccccgcagcagcggcggttgctgctccagccgacggtggcgcggcggctgtagtggaagagcaaacagagttcaatgtggttatcaatgaagttcccagcagttcccgtattgcagtgattaaagctgttagggctttaactagcttggcgttgaaggaagctaaggagctaatcgaaggattaccaaagaagtttaaagaaggtatcactaaagatgaagctgaagaagctaagaagactcttgaagaagctggtgctaaagtctccattgcttaaggtttttattaaaaaaaaaaaaagaagttgttatcttttctggaatttgattggtcttttgtgttgtttagtatagtttgcgtctggaattgttgagaaattgtgtaattgaatc

SEQ ID NO: 37192 - protein, 214 aa, Zea mays subsp. mays
THNPIKTHREKKNSEEKPKSETKMASTTLSIATTIRSSSYPTLASINHFPSRTTTIEFPSRFGGGSSSTLTHRATHLRPIAAVEAPEKIEKIGSEISSLTLEEARILVDYLQDKFGVSPLSLAPAAAAVAAPADGGAAAVVEEQTEFNVVINEVPSSSRIAVIKAVRALTSLALKEAKELIEGLPKKFKEGITKDEAEEAKKTLEEAGAKVSIA

SEQ ID NO: 37193 - protein, 191 aa, Zea mays subsp. mays
MASTTLSIATTIRSSSYPTLASINHFPSRTTTIEFPSRFGGGSSSTLTHRATHLRPIAAVEAPEKIEKIGSEISSLTLEEARILVDYLQDKFGVSPLSLAPAAAAVAAPADGGAAAVVEEQTEFNVVINEVPSSSRIAVIKAVRALTSLALKEAKELIEGLPKKFKEGITKDEAEEAKKTLEEAGAKVSIA

SEQ ID NO: 37194 - DNA, 220 bp, Zea mays subsp. mays
gatgcccaaagaagcatgctcgatgataggtttaaatggaaggcaagagaaatggataaaaggcgagaaggaaggcctggtgatgcacgagcagctctgaggcgttcagttagggagaatgggtctgatatagcagaacaaagcggagaagtagtgtcccgtccagcggctggatcaatgatctcaagggacttcggatatgcatatgttcatatggata

SEQ ID NO: 37195 - protein, 73 aa, Zea mays subsp. mays
DAQRSMLDDRFKWKAREMDKRREGRPGDARAALRRSVRENGSDIAEQSGEVVSRPAAGSMISRDFGYAYVHMD

SEQ ID NO: 37196 - protein, 68 aa, Zea mays subsp. mays
MLDDRFKWKAREMDKRREGRPGDARAALRRSVRENGSDIAEQSGEVVSRPAAGSMISRDFGYAYVHMD

SEQ ID NO: 37197 - protein, 56 aa, Zea mays subsp. mays
MDKRREGRPGDARAALRRSVRENGSDIAEQSGEVVSRPAAGSMISRDFGYAYVHMD

SEQ ID NO: 37198 - DNA, 1150 bp, Zea mays subsp. mays
  misc_feature (1143)..(1143): n is a, c, g, or t
aagaccaaggccgccgccgcggattcggccctggtcgttcgcgacgactcctacctagaggcggtcactcagaagaggattcgcttcttcgaggagatccaggcaaggcaagccgtcgagcggctgaatatcggcggcgaagttatcaaggtaactttgcctgatggcgctatcaaggagggtaagaaatggataacaaccccaatggatattgctaaggagatatcaagtggatttgcagctagttgtttgatagctcaagtggacgaaacactctgggacatggggaggccactcgaaggtgattgtaaattgcaaatgttcaagtttgataccaatgaaggtcgtgacaccttctggcactcaagtgctcatattcttggagaatctattgagagagcatatggatgcaagctgtgtattgggccttgcaccacaagaggggagggtttctactatgatgcttactacaatgatcagacattgaatgaggagcactttggtatcattgaaaaccaagctaaaaaggctgttgcggaaaagcaaccgtttgaacgcattgaggtcagcagggcagaagctcttgaaatgtttgctgagaatgaattcaaggttgaaatcattaatgagttgcctgaggacaagaccattactgtatacaggtgtggtcctttagttgacctatgccgtgggccacacatcccaaatacttcctttgtcaaagctttcgcttgtctgaaggcttcatcatcatattggagaggaaaagttgaccgcgaaagcctgcagagagtatatggaatttctttccctgattctcgacgtctcacggaatataaacattttctagaggaagctaagaaacgtgatcataggatattagggaaagcacaggaactcttctttttccatgaacttagccctggaagctgcttcttccttccacatggtgccaggatatataacaaactgatggacttcatgcgacaacagtacagagatagaggataccaagaggtgttgagcccaaatatttacaatatgcaactatgggaaacttctggacacgccgcaaactataaggagaacatgtttgtttttgagatcgagaaacaggaatttggacttaagccaatgaattgnccaggac

SEQ ID NO: 37199 - protein, 383 aa, Zea mays subsp. mays
  misc_feature (381)..(381): Xaa can be any naturally occurring amino acid
KTKAAAADSALVVRDDSYLEAVTQKRIRFFEEIQARQAVERLNIGGEVIKVTLPDGAIKEGKKWITTPMDIAKEISSGFAASCLIAQVDETLWDMGRPLEGDCKLQMFKFDTNEGRDTFWHSSAHILGESIERAYGCKLCIGPCTTRGEGFYYDAYYNDQTLNEEHFGIIENQAKKAVAEKQPFERIEVSRAEALEMFAENEFKVEIINELPEDKTITVYRCGPLVDLCRGPHIPNTSFVKAFACLKASSSYWRGKVDRESLQRVYGISFPDSRRLTEYKHFLEEAKKRDHRILGKAQELFFFHELSPGSCFFLPHGARIYNKLMDFMRQQYRDRGYQEVLSPNIYNMQLWETSGHAANYKENMFVFEIEKQEFGLKPMNXPG

SEQ ID NO: 37200 - protein, 315 aa, Zea mays subsp. mays
  misc_feature (313)..(313): Xaa can be any naturally occurring amino acid
MDIAKEISSGFAASCLIAQVDETLWDMGRPLEGDCKLQMFKFDTNEGRDTFWHSSAHILGESIERAYGCKLCIGPCTTRGEGFYYDAYYNDQTLNEEHFGIIENQAKKAVAEKQPFERIEVSRAEALEMFAENEFKVEIINELPEDKTITVYRCGPLVDLCRGPHIPNTSFVKAFACLKASSSYWRGKVDRESLQRVYGISFPDSRRLTEYKHFLEEAKKRDHRILGKAQELFFFHELSPGSCFFLPHGARIYNKLMDFMRQQYRDRGYQEVLSPNIYNMQLWETSGHAANYKENMFVFEIEKQEFGLKPMNXPG

SEQ ID NO: 37201 - protein, 289 aa, Zea mays subsp. mays
  misc_feature (287)..(287): Xaa can be any naturally occurring amino acid
MGRPLEGDCKLQMFKFDTNEGRDTFWHSSAHILGESIERAYGCKLCIGPCTTRGEGFYYDAYYNDQTLNEEHFGIIENQAKKAVAEKQPFERIEVSRAEALEMFAENEFKVEIINELPEDKTITVYRCGPLVDLCRGPHIPNTSFVKAFACLKASSSYWRGKVDRESLQRVYGISFPDSRRLTEYKHFLEEAKKRDHRILGKAQELFFFHELSPGSCFFLPHGARIYNKLMDFMRQQYRDRGYQEVLSPNIYNMQLWETSGHAANYKENMFVFEIEKQEFGLKPMNXPG

SEQ ID NO: 37202 - DNA, 591 bp, Zea mays subsp. mays
gttctcagagggtaattccaacttcagtaaaccatgtatctattcttctaggcctttgcaagaaaggattccttgatgaagcgaggtcatatttggaaactgtggctagcaaatatcagccatccgatgtagtcctctacaatgtagttattgatggttatgcaaaagtgggtgatattggtaatgctgttcagctgtatgatgcgattattatggctggtatgtgcccaaccattgtaacatgcaactctcttctatatggctactgcaaatttggggatctacatatggcagaaagctattttatggctattcagttaagtgacctgctgccaacaacagttacctacactactttgatggatgcactctctgaagctgggaaagttcattccatgctaagtatttttaaagaaatgactggaaaaggtatcagaccaaatgcaataacttacagtgtagttattaaaggactttgtaagcagttaatgttccacgatgccaaaaatgttcttgatgatatgtatagagaaggttttgatgctgatccaataccttacaacacgcttatacaaggtttttgtgaaactc

SEQ ID NO: 37203 - protein, 196 aa, Zea mays subsp. mays
SQRVIPTSVNHVSILLGLCKKGFLDEARSYLETVASKYQPSDVVLYNVVIDGYAKVGDIGNAVQLYDAIIMAGMCPTIVTCNSLLYGYCKFGDLHMAESYFMAIQLSDLLPTTVTYTTLMDALSEAGKVHSMLSIFKEMTGKGIRPNAITYSVVIKGLCKQLMFHDAKNVLDDMYREGFDADPIPYNTLIQGFCET

SEQ ID NO: 37204 - protein, 126 aa, Zea mays subsp. mays
MAGMCPTIVTCNSLLYGYCKFGDLHMAESYFMAIQLSDLLPTTVTYTTLMDALSEAGKVHSMLSIFKEMTGKGIRPNAITYSVVIKGLCKQLMFHDAKNVLDDMYREGFDADPIPYNTLIQGFCET

SEQ ID NO: 37205 - protein, 123 aa, Zea mays subsp. mays
MCPTIVTCNSLLYGYCKFGDLHMAESYFMAIQLSDLLPTTVTYTTLMDALSEAGKVHSMLSIFKEMTGKGIRPNAITYSVVIKGLCKQLMFHDAKNVLDDMYREGFDADPIPYNTLIQGFCET

SEQ ID NO: 37206 - DNA, 790 bp, Zea mays subsp. mays
gaggacgaaggaaaaagaagaagagtgaaagttgcagagcgagaaaaaatggcaaccatgtctgctcttcagagctcttttacttctctttctctatctcccagctcttccttcctcggccagcgtttaatttccccgatttccctctccgtcacttctccggtcaagcccgctgagaacccatgtcttgttcttgcaaagctcaagcgttgggaacgaaaagaatgcaaaccaaacagtcttccgattctccacaaaatgcatgtcaagtttggagatacagtcaaagtaatatctggacgcgacaagggtaaaatcggagaggttactaagattttcactcacaacagtaccattgtgatcaaagatgtgaacctcaaaacaaaacacatgaagagccgagaagagggagagcctggtcaaattgtcaagatagaagcacctatccacagctcaaatgtgatgttgtattcaaaagaaaaagacgtagtaagccgggtgggtcacaaggtacttgaagatggacagaaggtaagatatctgatcaaaacaggggaactcatcgacaccattgagaagtggaagctacttaaggaggctaaggataaggaaaccacccaagttgcagttacctccgcatcttagcgtctcatttctttcttcttcagtgcacttttgatataatagacctatgcattggatggatgtattgaaacccttttaaggtaaattataatatttctgctcccctcaaaaaaaaaaaaaaaaaaaactcgagggggggcccggt

SEQ ID NO: 37207 - protein, 214 aa, Zea mays subsp. mays
EDEGKRRRVKVAEREKMATMSALQSSFTSLSLSPSSSFLGQRLISPISLSVTSPVKPAENPCLVLAKLKRWERKECKPNSLPILHKMHVKFGDTVKVISGRDKGKIGEVTKIFTHNSTIVIKDVNLKTKHMKSREEGEPGQIVKIEAPIHSSNVMLYSKEKDVVSRVGHKVLEDGQKVRYLIKTGELIDTIEKWKLLKEAKDKETTQVAVTSAS

SEQ ID NO: 37208 - protein, 198 aa, Zea mays subsp. mays; identical to SEQ ID NO: 2233

SEQ ID NO: 37209 - protein, 195 aa, Zea mays subsp. mays; identical to SEQ ID NO: 2234

SEQ ID NO: 37210 - DNA, 2157 bp, Zea mays subsp. mays
aagtttggcctccgtttccagatttttattcaattcttcttaatcaacttttaaaatccggcgactcatagtccgtggtttttggccggcatatccggttttggtgtcgtcggtaaattcctcttcattgcgggcctttttcccagaacttgcagtggaagctggttcattgagaaataatggatgcatttagagatgctatattgcagcgagctccaattgaaacctttgcactcaagactgttcaacactttatacaacctcagaaacaaacaaagttggctcaagatgaaaaccaaatgcttgaaaacatgctccggacattgctgcaggagctagtggctgctgctgcgcaatcaggggagcaaattatgcagtatggtcagttgattgacgatgatgatgatgatgatgatgatgatatacatggacagattcctcatcttctagatgttgtgctttatctttgtgagaaagagcatgtagaaggtggcatgatattccagctgctggaggatttgaccgaaatgtctactatgaaaaactgtaaagatgttttcggttatattgaaagcaaacaagatatattgggcaagcaagagctttttgcacgcggaaaacttgtcatgttgaggacttgcaaccaacttctccgccgactctcaaaggccaatgatgttgtattctgtggaaggattcttatgtttttggctcacttttttccgttatctgagcgctcagccgtcaatataaaaggtgtttttaatacatctaatgaaaccaaatatgaaaaagatcctccaaaaggcatttctgtagatttcaacttctacaagacattttggagtttacaggagtatttctgtaatcccgcttctcttacttccgcatctaccaagtggcagaaattttcatccagtttggcggttgttttaaacacctttgatgctcaaccactaagcgaagaagagggagaggctaatagtttggaggaagaggcagcaacttttaatataaagtacctaacaagtagtaaattgatgggtttagagttaaaggattcgagtttccgacgacatattcttctccagtgcctcattatgtttgattatctaagggcaccagggaagaacgacaaagatctgccatctgaaaccatggaagaacttaagtcatgtgaggatcgtgtaaagaaattgcttgagatcactccgcctaaagggaaagaattcctccgtgcagttgagcatatactggagcgcgaaaagaattgggtctggtggaaacgtgatggatgtccaccatttgaaaagcaaccgatagataagaaatcacctaatgcagggcaaaagaaacggagacaaagatggagattgggaaataaagaactctcccaactttggagatgggcagatcaaaatccgaatgctttgactgattctcaacgcgtgcgaacccctgacattgcagactactggaaaccattagcagaagatatggatccatcagctggcatagaagatgagtaccatcataaaaacaacagagtttactgctggaaaggtcttcggtttacagctcggcaagaccttgaaggattttctaggtttactgaaatgggaatcgaaggagttgtcccagttgaactattgccgcctgaggtccggtccaaataccaagctaaaccaaacgaaaaagccaaacgagcgaagaaagaagaaaccaaaggtggatctcatgaaacagagggaaaccagattggtgtttctaatagtgaagctgaagctgaaggaggaaggggtgatgcagagacgatggagagtgatgctattgcagacactcctacgcctgaggaacagcaaagactcggtggttctgatacagaaaacggtcaagaggccggtcaaatcgaagacggagagacagaagaagctggtctgatggacactgatcttgatcatcctcctatgcccgtctcatgaatacgctttcagtttgtcaaccctttcttcaatggggaatcctttggatatgaagttcaaaagtattgatgtttaacaaattatgttaaaaggtattttctaaatatgtttgtatgagtgcaaatctgctagcttattaaaaaaaaaaaaaaaaaaactcgagggggggcccggt

SEQ ID NO: 37211 - protein, 600 aa, Zea mays subsp. mays
MDAFRDAILQRAPIETFALKTVQHFIQPQKQTKLAQDENQMLENMLRTLLQELVAAAAQSGEQIMQYGQLIDDDDDDDDDDIHGQIPHLLDVVLYLCEKEHVEGGMIFQLLEDLTEMSTMKNCKDVFGYIESKQDILGKQELFARGKLVMLRTCNQLLRRLSKANDVVFCGRILMFLAHFFPLSERSAVNIKGVFNTSNETKYEKDPPKGISVDFNFYKTFWSLQEYFCNPASLTSASTKWQKFSSSLAVVLNTFDAQPLSEEEGEANSLEEEAATFNIKYLTSSKLMGLELKDSSFRRHILLQCLIMFDYLRAPGKNDKDLPSETMEELKSCEDRVKKLLEITPPKGKEFLRAVEHILEREKNWVWWKRDGCPPFEKQPIDKKSPNAGQKKRRQRWRLGNKELSQLWRWADQNPNALTDSQRVRTPDIADYWKPLAEDMDPSAGIEDEYHHKNNRVYCWKGLRFTARQDLEGFSRFTEMGIEGVVPVELLPPEVRSKYQAKPNEKAKRAKKEETKGGSHETEGNQIGVSNSEAEAEGGRGDAETMESDAIADTPTPEEQQRLGGSDTENGQEAGQIEDGETEEAGLMDTDLDHPPMPVS

SEQ ID NO: 37212 - protein, 560 aa, Zea mays subsp. mays
MLENMLRTLLQELVAAAAQSGEQIMQYGQLIDDDDDDDDDDIHGQIPHLLDVVLYLCEKEHVEGGMIFQLLEDLTEMSTMKNCKDVFGYIESKQDILGKQELFARGKLVMLRTCNQLLRRLSKANDVVFCGRILMFLAHFFPLSERSAVNIKGVFNTSNETKYEKDPPKGISVDFNFYKTFWSLQEYFCNPASLTSASTKWQKFSSSLAVVLNTFDAQPLSEEEGEANSLEEEAATFNIKYLTSSKLMGLELKDSSFRRHILLQCLIMFDYLRAPGKNDKDLPSETMEELKSCEDRVKKLLEITPPKGKEFLRAVEHILEREKNWVWWKRDGCPPFEKQPIDKKSPNAGQKKRRQRWRLGNKELSQLWRWADQNPNALTDSQRVRTPDIADYWKPLAEDMDPSAGIEDEYHHKNNRVYCWKGLRFTARQDLEGFSRFTEMGIEGVVPVELLPPEVRSKYQAKPNEKAKRAKKEETKGGSHETEGNQIGVSNSEAEAEGGRGDAETMESDAIADTPTPEEQQRLGGSDTENGQEAGQIEDGETEEAGLMDTDLDHPPMPVS

SEQ ID NO: 37213 - protein, 556 aa, Zea mays subsp. mays
MLRTLLQELVAAAAQSGEQIMQYGQLIDDDDDDDDDDIHGQIPHLLDVVLYLCEKEHVEGGMIFQLLEDLTEMSTMKNCKDVFGYIESKQDILGKQELFARGKLVMLRTCNQLLRRLSKANDVVFCGRILMFLAHFFPLSERSAVNIKGVFNTSNETKYEKDPPKGISVDFNFYKTFWSLQEYFCNPASLTSASTKWQKFSSSLAVVLNTFDAQPLSEEEGEANSLEEEAATFNIKYLTSSKLMGLELKDSSFRRHILLQCLIMFDYLRAPGKNDKDLPSETMEELKSCEDRVKKLLEITPPKGKEFLRAVEHILEREKNWVWWKRDGCPPFEKQPIDKKSPNAGQKKRRQRWRLGNKELSQLWRWADQNPNALTDSQRVRTPDIADYWKPLAEDMDPSAGIEDEYHHKNNRVYCWKGLRFTARQDLEGFSRFTEMGIEGVVPVELLPPEVRSKYQAKPNEKAKRAKKEETKGGSHETEGNQIGVSNSEAEAEGGRGDAETMESDAIADTPTPEEQQRLGGSDTENGQEAGQIEDGETEEAGLMDTDLDHPPMPVS

SEQ ID NO: 37214 - DNA, 1686 bp, Zea mays subsp. mays
gtttaaacagttaatgttcctgccaacaatggtttatttgagaatgtgaagaagacagaggctgttgtcccaccagttgtgcctgtaaaaagcatcagcattccaacaccacaaatgacattggaggtgcataacaatggcaccgaaccgactcaaagcagaaagttagacaaggaaagggaaattactgaaaatggtagcccaattgtcgatacgcccattgctgcagctccagcagaagaggcagtcacaaacctaaataagaaaacctcacagaacatgcccttgattccacaaggcttgaggaacacaggaaatatctgctttctgaatgcaactttacaggcattgctttcatgctcgccttttgtccaccttttacaggatctgaggaaccgtagtatacctaagtttggctacccaactctgcgtgcatttgttgagttgatctctcaattcgatgtgcttgacgagtcagttaacaagaaaaatgagaaggctattactgttgctgcaaagccacttaatcctgccatgtttgatgatgttctcagaaactttacaccagatgtgccggctggaataactgctcggccaaggcaggaagatgctcaagagtttttaagttttgccatggatagagtgcatgatgaactgctgaagcttaatggtaatggtttgaattcaaaggagggtatggttgtttcttctgctgatgatgcttgggagacagttggaagaaagaacaaatctgcaatagttagaacacatagttttgttccctctgagctaagtgctatttttggagggcagctacagagcgttgtgaaagctgcaggtaacaaagcatcagctactgttcaacccttcctactgctccatcttgatatattcccagatgctgttcagacacttaatgatgcacttcgtctgttctctacccccgaatctttggaaggatacagaacaactgctggaaaggctggtttggtgacagctagaaagtcattcaagatacacgccctttcaaaaataatgatcctgcacttgaagaggttcagttatggaaatcatgggagcactaaaatctataagccactccgcttcacatctgaactggttcttagtcgtgatctgctgagctcaccatcacaagagggtagaaaatatgagcttgttgcaaccatcactcatcatgggagggacccttacagaggtcactacactgctcacgcaaagcatgccgacgggcaatggcttcgctttgacgatgacgctgttgtgcccgttggcgagaacgatgtcttgcatgaccaagcatatgttctcttctacaaacaagtctgaaagcactacgtagttgattagttgctctttcgtatcgcagttgcttaaacagccagatataccgtctaactatcgtcctattaatgtagtcaccgagtaacagcagcagagtattatgtgaagcaccctggtgctgcccgtgtttattatcatatgcttggtcatgatgtggcgagagcggggatttgtcttcagctcattttgaggttctgtaaagattcaactgtcatcattgcaatgagcagcgaagtaatcatggtcagccctgtcgctggcagctgcctaaaaaaaaaaaaaaaaaactcgagggggggcccggtacccaattcgccctatatg

SEQ ID NO: 37215 - protein, 410 aa, Zea mays subsp. mays
MTLEVHNNGTEPTQSRKLDKEREITENGSPIVDTPIAAAPAEEAVTNLNKKTSQNMPLIPQGLRNTGNICFLNATLQALLSCSPFVHLLQDLRNRSIPKFGYPTLRAFVELISQFDVLDESVNKKNEKAITVAAKPLNPAMFDDVLRNFTPDVPAGITARPRQEDAQEFLSFAMDRVHDELLKLNGNGLNSKEGMVVSSADDAWETVGRKNKSAIVRTHSFVPSELSAIFGGQLQSVVKAAGNKASATVQPFLLLHLDIFPDAVQTLNDALRLFSTPESLEGYRTTAGKAGLVTARKSFKIHALSKIMILHLKRFSYGNHGSTKIYKPLRFTSELVLSRDLLSSPSQEGRKYELVATITHHGRDPYRGHYTAHAKHADGQWLRFDDDAVVPVGENDVLHDQAYVLFYKQV

SEQ ID NO: 37216 - protein, 355 aa, Zea mays subsp. mays
MPLIPQGLRNTGNICFLNATLQALLSCSPFVHLLQDLRNRSIPKFGYPTLRAFVELISQFDVLDESVNKKNEKAITVAAKPLNPAMFDDVLRNFTPDVPAGITARPRQEDAQEFLSFAMDRVHDELLKLNGNGLNSKEGMVVSSADDAWETVGRKNKSAIVRTHSFVPSELSAIFGGQLQSVVKAAGNKASATVQPFLLLHLDIFPDAVQTLNDALRLFSTPESLEGYRTTAGKAGLVTARKSFKIHALSKIMILHLKRFSYGNHGSTKIYKPLRFTSELVLSRDLLSSPSQEGRKYELVATITHHGRDPYRGHYTAHAKHADGQWLRFDDDAVVPVGENDVLHDQAYVLFYKQV

SEQ ID NO: 37217 - protein, 270 aa, Zea mays subsp. mays
MFDDVLRNFTPDVPAGITARPRQEDAQEFLSFAMDRVHDELLKLNGNGLNSKEGMVVSSADDAWETVGRKNKSAIVRTHSFVPSELSAIFGGQLQSVVKAAGNKASATVQPFLLLHLDIFPDAVQTLNDALRLFSTPESLEGYRTTAGKAGLVTARKSFKIHALSKIMILHLKRFSYGNHGSTKIYKPLRFTSELVLSRDLLSSPSQEGRKYELVATITHHGRDPYRGHYTAHAKHADGQWLRFDDDAVVPVGENDVLHDQAYVLFYKQV

SEQ ID NO: 37218 - DNA, 1148 bp, Zea mays subsp. mays
gagagagagagctcactagtcccccccccccccccccccacaacaatccagagcgtgctgttgagtacttatattctgtaagaatgattctttgtcctcgttactttctaggccttacatgcgatgaactttcagcgatttatgtgtgcccaggtacgtttaactagtgaacacatctattatataaagtagattgaagctgcatgcacatatgtttggtttgaatatttcgtgaccttagaagtgaattgccgttttcaacctgcaacatgaggatacaattttgttttacaattgtagacactaatgtccttcatgttctgtttaggggattcctgaacaaatggaggttcctgcaccgcctccgagttcccaaccagtcgaccctgttcaggcggtacaaccagctcaagctggaccaaatgctaaccctctcgacctctttccccaagaaatcttgatgttttgcgtaataactcacagttccaaaacctacttggtttggttcaggctaaccctcaaattttgcagccattgcttcaagaattgaggaaacaaaatccccgggttatgcagctaatccaggaaaaccaagcagagtttatgcggttgattagtgagccactagagggagacgaagagaatgaaatgatgctggatcagatggcagatgcaactgagaccattgcagtcactccagaggagaatgaagctatacttcgtcttgaagggatgggctttgaccgggcactcgtcctggaagtgttcttcgcctgcaacaagaacgagcagctggccgccaactacctcttggatcacatgcacgagttcgacaacgatgacgggctcggagggcctccattgtgatgcgatgcgaaggctgtggacagaaaataggaaaacgttttgggatttgtctcgtctgtccgctccgctccccctacatttctttgctgtttagtacataattctagatttacagaaaagacaaagtttactcttttctggatcatatgttttgtgctacttattgctgttctggccgcattgggccagcatgcagttattcacgggttcaaccaaaaaaaaaaaaaaaaactcgagggggggcccggtacccaattcgcccttgtttaaacacaataaag

SEQ ID NO: 37219 - protein, 98 aa, Zea mays subsp. mays
MQLIQENQAEFMRLISEPLEGDEENEMMLDQMADATETIAVTPEENEAILRLEGMGFDRALVLEVFFACNKNEQLAANYLLDHMHEFDNDDGLGGPPL

SEQ ID NO: 37220 - protein, 96 aa, Zea mays subsp. mays
MQLRPLQSLQRRMKLYFVLKGWALTGHSSWKCSSPATRTSSWPPTTSWITCTSSTTMTGSEGLHCDAMRRLWTENRKTFWDLSRLSAPLPLHFFAV

SEQ ID NO: 37221 - protein, 87 aa, Zea mays subsp. mays
MRLISEPLEGDEENEMMLDQMADATETIAVTPEENEAILRLEGMGFDRALVLEVFFACNKNEQLAANYLLDHMHEFDNDDGLGGPPL

SEQ ID NO: 37222 - DNA, 2439 bp, Zea mays subsp. mays
atctggatttggagggcatccatccctggatcagagaaacgattctttcaacattaatgagtcaatgactgtccactgcggctttgtcagaggaaagaagcctggccaaggtactggattcgatatcaaggatgacgatctgctagagatggagcaatgccacgatctagtcgtagcttctgctatttttggaaattatgatatgattcagcatccgaggaacatcagtgatttttcaaaggcaaatgcatgcttttatatgtttgtagatgaagaaacagaggcttatgtcaagaattctagttctctgtacaacaataataaagttggactgtggaggctggtggttgtccgaaacctcccttatgaagacccaaggcgtacgggaaaggtgcttatcttataaattgtgataatcaacaaattttccttgtgatttgtgtttctattatcagcatccatttcaagaatcaacaaaaagttaatggttttcgtcatttatacctaatgaatatgaatctcatatcaaaataccacctaacctaaacacagtgaagcttcttttgaaacagaaagaactacaatgttcatataatttatacattaatggcactagtttttttattatagccatatcttagaacatcataagaaatttgggattacttaagtgcttggataaattgatagtctgtatgcttgtcaaacttattgagggagctactatgcaaattatgctcttgtcttatccatcatgtctgtctcatagatactcaacatatggtggcctatataattgatttttgttagatgttcttttgctttgacttagcttctgtaacttatatttgttttcgagtaggcaactattatatgattcaatagttgaggcaacttatcatgagagaaggcataaatttcacctcttatgtgttttctatgtgtcgtttaaagtaattcctttcatatgtctgaagattcttctatatatagcttttagtttcattaactttagtggtagtttgattgcaggaaatgtattttttatttgcatcagctgtggttacctccttatctgtacattgttttgatcaagttaaatggacaaatgcttatctgtgcagattccaaaacttctgctccataggctttttccaaatgtgagattttcagtttggatagatgcaaaacttgagcttgttgtggatccctatctcctgcttgagaggtattcttgatgtagagagctttacttgtaatgtcctacattttgatggttctataactattcttaaaagagaaaatctggagaagatatatgacctgtgaaattgaggtaaatgaatttggggctgtcttgcaccctagcaacttcacttcaatttcttagtgccaatgctatcgtgaactggtcccagcaaatttggatctgtggtagggttttgttgcatctgtatcccatcattgtagtacgacatttatttgactgatccatgaaagttgggctgctgtaagtgataatgagtaatctgatttctcactctacctgttaggttcctttggaggaagaataccacttttgcaatctctcggcattacaaacgctttgatgtgtttgaagaagcagaagcgaacaaagctgctggaaagtacgacaacgcgtcaatcgattaccaaatagagttctacagaaacgagggcctaacgcattattcttctgctaagcttcccatcacaagcgatgtccccgaaggctgtgtgatcatcagagagcacatccccatcacgaacctgttcacgtgcgtatggttcaatgaggttgatcgcttcacctccagggaccagatcagtttcagcacggtccgggacaaaatcagggctagagttggctggatgcctgagatgttcatggactgcgaaaggcgcaactttgtcgttcaggtataccacagggagctactggagcagatgattgcatctggtaggatgccccctttggcggcggctgtgacgcacgcgaatgtccgggtaggtagcaggaaagctcctccgacaaagaagccctccgtgaaacggaaaagggagaaaaaatcgagctcgcgacggcgtctcccgaaacccatcgcccaggggttggatgccaatgtgacgcaagtttttttctcagtagcagagtctggatagtcccacacaggaacattgttccattaggtctggggcctgtaatcgtgccccggcgagatttgttcatagctattcttcatcattgttgtacataacagcggcaacccaacattcaattttctccattcatattaaaaaaaaaaaaaaaaaaaaaaaaaaaaaaaaaaaaaccaaaaaaaaaaaaaaagaaaaaaaaaaaaaaaaacctcgggggggggcccggaacccaattcccccaatagggagtcgaataac

SEQ ID NO: 37223 - protein, 134 aa, Zea mays subsp. mays
SGFGGHPSLDQRNDSFNINESMTVHCGFVRGKKPGQGTGFDIKDDDLLEMEQCHDLVVASAIFGNYDMIQHPRNISDFSKANACFYMFVDEETEAYVKNSSSLYNNNKVGLWRLVVVRNLPYEDPRRTGKVLIL

SEQ ID NO: 37224 - protein, 113 aa, Zea mays subsp. mays
MTVHCGFVRGKKPGQGTGFDIKDDDLLEMEQCHDLVVASAIFGNYDMIQHPRNISDFSKANACFYMFVDEETEAYVKNSSSLYNNNKVGLWRLVVVRNLPYEDPRRTGKVLIL

SEQ ID NO: 37225 - protein, 96 aa, Zea mays subsp. mays
MPEMFMDCERRNFVVQVYHRELLEQMIASGRMPPLAAAVTHANVRVGSRKAPPTKKPSVKRKREKKSSSRRRLPKPIAQGLDANVTQVFFSVAESG

SEQ ID NO: 37226 - DNA, 860 bp, Zea mays subsp. mays
ggaagaaaacattcgtagatctatttccgcatctgcttaaacacctacatcgtcgtagatcgcaaaccatggccgtcgctgtagctaagcttctgatctccgccatggcggttttcatgcttgtttctgcttcgttcgcgacctcggaagtgccgttcatggtggttcacaagaaagccactctcaacaggctcaaatctggcgccgaacgcgtctccgtttcctacgatatctataaccaaggatcctcgtcggcgtatgatgtgactctgacagataatagctgggataaaaagacttttgaagttgttaatggaaacacttcaaaatcatgggaaagacttgatgcaggaggtattctgtctcattctatcgaattggaggccaaggttaaaggagtcttctacggtgctcctgctgtcgttactttccgcatccccactaagccagctcttcaggaagcatactcaactccactactacctctagatatcctcgcagacaaacctccaacgaaacctttggacgtggccaagaggttgctggcgaaatatggatcactcgtctccgtgatctccatggtggtttgtttcatatacttggtggcaacacctaagtccaacgtatcaaaggcaagcagcaagaagaagcgttaagttagtgaaatgaaaggtgagaaaggttggtacggtgctgttttctgtttaacagttaaacacagtttcaaaacttgtaagaattagagaacacactttaattttggtgttgcagaggacatacttcaagttcaaaaaaaaaaaaaaaaaaaactcgagggggggcccggtacccaattcgctgtttaaacacaataaagtggg

SEQ ID NO: 37227 - protein, 217 aa, Zea mays subsp. mays
KKTFVDLFPHLLKHLHRRRSQTMAVAVAKLLISAMAVFMLVSASFATSEVPFMVVHKKATLNRLKSGAERVSVSYDIYNQGSSSAYDVTLTDNSWDKKTFEVVNGNTSKSWERLDAGGILSHSIELEAKVKGVFYGAPAVVTFRIPTKPALQEAYSTPLLPLDILADKPPTKPLDVAKRLLAKYGSLVSVISMVVCFIYLVATPKSNVSKASSKKKR

SEQ ID NO: 37228 - protein, 195 aa, Zea mays subsp. mays
MAVAVAKLLISAMAVFMLVSASFATSEVPFMVVHKKATLNRLKSGAERVSVSYDIYNQGSSSAYDVTLTDNSWDKKTFEVVNGNTSKSWERLDAGGILSHSIELEAKVKGVFYGAPAVVTFRIPTKPALQEAYSTPLLPLDILADKPPTKPLDVAKRLLAKYGSLVSVISMVVCFIYLVATPKSNVSKASSKKKR

SEQ ID NO: 37229 - protein, 183 aa, Zea mays subsp. mays
MAVFMLVSASFATSEVPFMVVHKKATLNRLKSGAERVSVSYDIYNQGSSSAYDVTLTDNSWDKKTFEVVNGNTSKSWERLDAGGILSHSIELEAKVKGVFYGAPAVVTFRIPTKPALQEAYSTPLLPLDILADKPPTKPLDVAKRLLAKYGSLVSVISMVVCFIYLVATPKSNVSKASSKKKR

SEQ ID NO: 37230 - DNA, 2225 bp, Zea mays subsp. mays
actttattgtgtttaaacagcgaattgggtaccgggccccccctcgagcgttacagcattgagcgtaaaaactcgccgctgaaataaggaatcgccatgtttacctttatcaaaaaagtcatcaaaaccggcacggcgacctcgtcttatccgctggagccgattgcggttgataaaaacttccgtggtaagccagagcagatcccgcagcagtgcatcggctgcgcggcctgcgtcaatgcctgcccgtcaaacgccttaacggttgaaactgacctcgccacaggagagcttgcctgggagtttaatcttgggcactgcatcttctgtggacgctgcgaagaagtctgcccgacggcggcgatcaaactgtcgcaagagtacgaactggcggtgtggaagaaagaagacttcctgcaacagtcccgcttcgcgctgtgcaactgccgcgtctgcaatcgtcctttcgccgtccagaaagagatcgactacgccattgcgctgcttaagcacaacggcgacagccgcgcggaaaaccaccgcgaaagctttgagacttgcccggaatgtaagcgccagaaatgcctggtgccgtccgaccgtattgaactgactcgccatatgaaagaggccatctgatgagcaatttattaggcccccgtgacgccaacggcattccggtccccatgacggtggatgaatccatcgccagcatgaaggcgtcgttactgaaaaaaatcaaacgttctgcctatgtttaccgcgtggactgcggcggctgcaacggttgcgaaatcgaaattttcgccacgctttcgccgctgtttgatgcagaacgcttcggcattaaagtcgttccttcaccgcgtcatgcggatattttactgtttaccggcgcggtcacccgtgcaatgcgatcccctgcgctgcgtgcgtggcagtccgcgccggacccgaaaatttgtatctcctacggtgcctgcggtaacagtggcgggatcttccacgatctctactgcgtgtggggcggtacggataaaattgtccctgtggatgtttatatccctggctgcccgccaacgcctgccgccacgctgtacggctttgcaatggcgctcggcctgctggagcagaaaattcacgcccgtgggccgggtgaactggatgaacaaccggcggagatcctgcatggtgatatggtgcagccgctgcgcgtgaaagtggatcgcgaagcacgtcgcctggcgggttatcgttacggtcgtcagattgccgatgattaccttacacagttagggcagggcgaagaacaggttgcacgctggctggaagcggaaaacgatccgcgtctgaacgagattgtcagccatctgaatcatgttgttgaagaggcgcgtatccgatgagtgaaaaggtggtgttcagtcaactgagccgtaaatttattgatgagaacgatgccacgcccgccgaggcgcagcaggtggtctattacagcctggcgattggtcaccaccttggggttatcgattgcctggaagcggcgctcacctgcccgtgggatgaatatctggcatggattgccactctggaggcaggcagtgaagcccgccgcaaaatggaaggcgtgccgaaatatggtgagatcgtcatcgacattaaccatgtgccgatgctggccaacgcattcgataaagcccgggcagcgcaaacttcgcagcagcaggaatggagtacaatgctgttaagtatgctgcatgatattcatcaggaaaacgccatctatttgatggtgaggagactgcgtgactgacgttttactctgtgttggcaatagcatgatgggcgatgatggcgcaggtccgctgctggcggaaaagtgcgccgccgcgccgaaaggtaactgggtggtgattgacggcggtagcgcaccggaaaacgacatcgtcgctatccgtgaactgcgcccgacacgactgctgattgtcgacgccacggatatggggctaaaccccggcgagatccgcatcatcgacccggatgatatcgccgagatgtttatgatgactacccataacatgccgttgaattaccttatcgaccagttgaaagaagatattggcgaagtgattttcctcggcattcagccggatatcgtcggcttttactacccgatgacccagccgattaaagatgcggtagaaaccgtttatcaacgactggaa

SEQ ID NO: 37231 - protein, 255 aa, Zea mays subsp. mays
MSNLLGPRDANGIPVPMTVDESIASMKASLLKKIKRSAYVYRVDCGGCNGCEIEIFATLSPLFDAERFGIKVVPSPRHADILLFTGAVTRAMRSPALRAWQSAPDPKICISYGACGNSGGIFHDLYCVWGGTDKIVPVDVYIPGCPPTPAATLYGFAMALGLLEQKIHARGPGELDEQPAEILHGDMVQPLRVKVDREARRLAGYRYGRQIADDYLTQLGQGEEQVARWLEAENDPRLNEIVSHLNHVVEEARIR

SEQ ID NO: 37232 - protein, 239 aa, Zea mays subsp. mays
MTVDESIASMKASLLKKIKRSAYVYRVDCGGCNGCEIEIFATLSPLFDAERFGIKVVPSPRHADILLFTGAVTRAMRSPALRAWQSAPDPKICISYGACGNSGGIFHDLYCVWGGTDKIVPVDVYIPGCPPTPAATLYGFAMALGLLEQKIHARGPGELDEQPAEILHGDMVQPLRVKVDREARRLAGYRYGRQIADDYLTQLGQGEEQVARWLEAENDPRLNEIVSHLNHVVEEARIR

SEQ ID NO: 37233 - protein, 230 aa, Zea mays subsp. mays
MKASLLKKIKRSAYVYRVDCGGCNGCEIEIFATLSPLFDAERFGIKVVPSPRHADILLFTGAVTRAMRSPALRAWQSAPDPKICISYGACGNSGGIFHDLYCVWGGTDKIVPVDVYIPGCPPTPAATLYGFAMALGLLEQKIHARGPGELDEQPAEILHGDMVQPLRVKVDREARRLAGYRYGRQIADDYLTQLGQGEEQVARWLEAENDPRLNEIVSHLNHVVEEARIR

SEQ ID NO: 37234 - DNA, 749 bp, Zea mays subsp. mays
  misc_feature (732)..(733): n is a, c, g, or t
ttatactggtttctactaaggcgaccccggcttctagattttctccacatcctggaccaagacgaagacattcttttggggaagaggagctggcataccttccgtatagaagacgagatataatgatagacaatgaaagcaatgaattacttcttcctgtcgaagggtttggtgtatcacttgaagattcttcaaaggaagaaaaaaagaataggaagggacttcttaactggttcaaactccggaaacgtgatggagcttctattctgacaagttcagaaggtgataagtccagtttgactaaatcaaccgctccttcaacacctattggggaaagcgtcaactttcctgctgaaccaagaatatcaaattcattagctggtgagaatgtatcatctgatctgtttagcattggtcatggggaatttccttctggaagcattcacggcgaagaaactctttcggccagtggaaaaacgatggaccatgttgatttgttgagagaacagttgaaaattttgtcaggggaggttgcgtttaatacaagtgctcttaagcgcctcacagaggaagctggaagaagcccaaagaacgagaagattcagatggaaatgaagaagaagaccgatgaaattaaggggaagcatcaacagatagcatctttggagagagagatagctcatgcaacattaggaaactcaggaaaggtcgatacgttagagcattcacccnnctatcatgaactactt

SEQ ID NO: 37235 - protein, 249 aa, Zea mays subsp. mays
  misc_feature (244)..(244): Xaa can be any naturally occurring amino acid
ILVSTKATPASRFSPHPGPRRRHSFGEEELAYLPYRRRDIMIDNESNELLLPVEGFGVSLEDSSKEEKKNRKGLLNWFKLRKRDGASILTSSEGDKSSLTKSTAPSTPIGESVNFPAEPRISNSLAGENVSSDLFSIGHGEFPSGSIHGEETLSASGKTMDHVDLLREQLKILSGEVAFNTSALKRLTEEAGRSPKNEKIQMEMKKKTDEIKGKHQQIASLEREIAHATLGNSGKVDTLEHSPXYHELL

SEQ ID NO: 37236 - protein, 209 aa, Zea mays subsp. mays
  misc_feature (204)..(204): Xaa can be any naturally occurring amino acid
MIDNESNELLLPVEGFGVSLEDSSKEEKKNRKGLLNWFKLRKRDGASILTSSEGDKSSLTKSTAPSTPIGESVNFPAEPRISNSLAGENVSSDLFSIGHGEFPSGSIHGEETLSASGKTMDHVDLLREQLKILSGEVAFNTSALKRLTEEAGRSPKNEKIQMEMKKKTDEIKGKHQQIASLEREIAHATLGNSGKVDTLEHSPXYHELL

SEQ ID NO: 37237 - DNA, 1047 bp, Zea mays subsp. mays
aaaaacctccctcaggagcttccgccttattcagagtgtagaggaggatccaaaagaaaagaggaaaaaatggactatatgtatggaccagggagacaccatctgtttgtaccaggaccagtgaacataccggaaccggtaatccgggcgatgaaccggaacaacgaggattaccggtcaccagccattccggcgcttacgaaaacattgttggaggatgttaagaagatattcaagaccacatcagggacaccttttctgtttcccacgaccgggactggtgcttgggagagtgccttgaccaacacgttatctcctggagacaggattgtttcgtttctgattccctggcgcgcaagggttgcttgagggtttaaccaaaaccggtggcgataccgcgaaatatgcactggaaaacaagctggtcgatgcactggcatcgagtgcggaaatcgaaaaagcactgaccaaagaattcggctggagtaagactgataaaaattatcgcgccatcagttattacgattacgcattgaaaacgccggcagataccggtgacagcatcggtgtcgtctttgctaatggcgcaattatggatggcgaggaaactcaggggaatgttggcggtgataccactgcggcacaaatccgcgacgctcgccttgacccgaaagtgaaagcgattgtcatgcgtgttaatagcccaggcggcagcgttaccgcgtctgaagtgattcgcgctgaactggcagcagcccgggcagcgggtaagcctgtggttgtatcgatgggcggcatggcggcatctggtggttactggatttccacgccagctaattacattgtggctaaccccagcaccctgaccggttctatcggtatcttcggcgtgatcaccaccgtagaaaatagtctggattcgattggtgttcatactgatggtgtctcaacttcaccgctggcggatgtttctatcaccagggcactgccgccggaagcgcagctgatgatgcagttaagcattgagaatgggctataacgctttat

SEQ ID NO: 37238 - protein, 148 aa, Zea mays subsp. mays
MDGEETQGNVGGDTTAAQIRDARLDPKVKAIVMRVNSPGGSVTASEVIRAELAAARAAGKPVVVSMGGMAASGGYWISTPANYIVANPSTLTGSIGIFGVITTVENSLDSIGVHTDGVSTSPLADVSITRALPPEAQLMMQLSIENGL

SEQ ID NO: 37239 - protein, 122 aa, Zea mays subsp. mays
KNLPQELPPYSECRGGSKRKEEKMDYMYGPGRHHLFVPGPVNIPEPVIRAMNRNNEDYRSPAIPALTKTLLEDVKKIFKTTSGTPFLFPTTGTGAWESALTNTLSPGDRIVSFLIPWRARVA

SEQ ID NO: 37240 - protein, 116 aa, Zea mays subsp. mays
MRVNSPGGSVTASEVIRAELAAARAAGKPVVVSMGGMAASGGYWISTPANYIVANPSTLTGSIGIFGVITTVENSLDSIGVHTDGVSTSPLADVSITRALPPEAQLMMQLSIENGL

SEQ ID NO: 37241 - DNA, 2122 bp, Zea mays subsp. mays
gctcactagtcccccccccccccccccaagtgacttttgatattgtggatatggtatatccatacaacgccatcatgggtcggggctccatcaataagttcgaagccgccatccacggactgtacctatgtatgaagataccaggtccgctaggcgccatcacggtctacggcaaccagcagacggcgcgcaacatagagcgggacttcgtgcccggtcagaccagcgcgaggtcccagcgcccgcgagcccaaccgataaacagcacgacaaggcacagctgcagagccaagacgggaccaagactgtccccctcgatcaggccacgcccaagcagacagtcactatcagcgaagacctcacctcgcatgaagaagagagactcctctgctgcctgtccaagaatatagatgtcttcgcctggtccgccctcgacctggtcggagtcagtcgatccataattgagcacagcttgggaattgacccttcggtgcgaccaaaaaggcagaggcttcgcaaaatgtccgacgaaaagacagaggctgccaaggcggaggtgcaccgcctcctagaggctaaattcatcaagccaatagcttaccccacctggctctccaatgttgtaatggtgcagaaaaaaagcgggaaatggcgaatgtgcatagacttcaccagtctcaataaggcctgcccaaaggacaatttcccgttgccgtggatcgacaaaatagtcgatagcgcggccggatgcgaggtcatgtcactcctcgactacttctccggttaccaccagatatacatgaagaaggaagacaaggctagcaccagctttataacacccttcggcacatattgcttcatcagaatgccggagggactcaagaacgccgggtccaccttctccagactcaccaaaacagtactcgaagggcaggttggcagaaatatatttacatatgtggacgacatcgtcgtcgccagcaagaacaaggaggaccacctcaccgacctcgccgagacattcgcgaacatgcgagacgcacgactccgcctaaacccggaaaagtgcgtcttcggcgttcgtcagggcaaaatattgggctacctggtatcacgccgcggcatcgaggccaacccaaccaagatccaggccatcgtagacatgtcgcctccgcagtccgtcagggacgtccagcgactgacaggcagattggccgctctcaacagattcatctccaggtccgccgagcgaagtctccccttcctcaaaacactccgcggtgcaaaggacttcgcctggaaaccggagcaggcagcggccttcgcctcactaaaacagtacctgtcggagctggccatcctcacaagccccgactcctcgctccccctattgctctacgtcgcggcttcgccgcacgctgtcagcgcggcactagtgcaggagcagacagttgagggcgtggtcaggcaatgccctgtctactatgtctccgaggtactgacaccgtccaagtgcaacatgacagagctggagaagattgcttacgcagtcgttatgtcttcgcgcaaactgcgccactactttgaagcattcaaggtccgagtcacctcagacaggggactcggcgaattattcagaaacctagaggcatcggtgaggattgccaagtgggcagccgaactatccggctaccacatcagcttcgagcccaggacaaccatcaagtcacaagtcctggcagacttcgtcatcgattggactgggccaataacacaaccagacccgtccacagaaaaggtttggactatccattgcgacggcgcatggtgccatgcgggggcaggcgccgctgcaatcatcacctcaccagccggggtcaagcacagatatgcagcacgcctcagcttcgctctggaatccgacagatgcacaaacaatatagcagaatatgaagcagtcatcctcggcctccgcaagctaagggccctcgaagtcaccacctgtatcatcaaaacagactccaagatagttgccggccaggtcgaaaaagattacgcagcaaaggaccccgcgctcatgcaatacctcgcggccatccgaagtctcgagggggggcccggt

SEQ ID NO: 37242 - protein, 665 aa, Zea mays subsp. mays
MYEDTRSARRHHGLRQPADGAQHRAGLRARSDQREVPAPASPTDKQHDKAQLQSQDGTKTVPLDQATPKQTVTISEDLTSHEEERLLCCLSKNIDVFAWSALDLVGVSRSIIEHSLGIDPSVRPKRQRLRKMSDEKTEAAKAEVHRLLEAKFIKPIAYPTWLSNVVMVQKKSGKWRMCIDFTSLNKACPKDNFPLPWIDKIVDSAAGCEVMSLLDYFSGYHQIYMKKEDKASTSFITPFGTYCFIRMPEGLKNAGSTFSRLTKTVLEGQVGRNIFTYVDDIVVASKNKEDHLTDLAETFANMRDARLRLNPEKCVFGVRQGKILGYLVSRRGIEANPTKIQAIVDMSPPQSVRDVQRLTGRLAALNRFISRSAERSLPFLKTLRGAKDFAWKPEQAAAFASLKQYLSELAILTSPDSSLPLLLYVAASPHAVSAALVQEQTVEGVVRQCPVYYVSEVLTPSKCNMTELEKIAYAVVMSSRKLRHYFEAFKVRVTSDRGLGELFRNLEASVRIAKWAAELSGYHISFEPRTTIKSQVLADFVIDWTGPITQPDPSTEKVWTIHCDGAWCHAGAGAAAIITSPAGVKHRYAARLSFALESDRCTNNIAEYEAVILGLRKLRALEVTTCIIKTDSKIVAGQVEKDYAAKDPALMQYLAAIRSLEGGPG

SEQ ID NO: 37243 - protein, 534 aa, Zea mays subsp. mays
MSDEKTEAAKAEVHRLLEAKFIKPIAYPTWLSNVVMVQKKSGKWRMCIDFTSLNKACPKDNFPLPWIDKIVDSAAGCEVMSLLDYFSGYHQIYMKKEDKASTSFITPFGTYCFIRMPEGLKNAGSTFSRLTKTVLEGQVGRNIFTYVDDIVVASKNKEDHLTDLAETFANMRDARLRLNPEKCVFGVRQGKILGYLVSRRGIEANPTKIQAIVDMSPPQSVRDVQRLTGRLAALNRFISRSAERSLPFLKTLRGAKDFAWKPEQAAAFASLKQYLSELAILTSPDSSLPLLLYVAASPHAVSAALVQEQTVEGVVRQCPVYYVSEVLTPSKCNMTELEKIAYAVVMSSRKLRHYFEAFKVRVTSDRGLGELFRNLEASVRIAKWAAELSGYHISFEPRTTIKSQVLADFVIDWTGPITQPDPSTEKVWTIHCDGAWCHAGAGAAAIITSPAGVKHRYAARLSFALESDRCTNNIAEYEAVILGLRKLRALEVTTCIIKTDSKIVAGQVEKDYAAKDPALMQYLAAIRSLEGGPG

SEQ ID NO: 37244 - protein, 499 aa, Zea mays subsp. mays
MVQKKSGKWRMCIDFTSLNKACPKDNFPLPWIDKIVDSAAGCEVMSLLDYFSGYHQIYMKKEDKASTSFITPFGTYCFIRMPEGLKNAGSTFSRLTKTVLEGQVGRNIFTYVDDIVVASKNKEDHLTDLAETFANMRDARLRLNPEKCVFGVRQGKILGYLVSRRGIEANPTKIQAIVDMSPPQSVRDVQRLTGRLAALNRFISRSAERSLPFLKTLRGAKDFAWKPEQAAAFASLKQYLSELAILTSPDSSLPLLLYVAASPHAVSAALVQEQTVEGVVRQCPVYYVSEVLTPSKCNMTELEKIAYAVVMSSRKLRHYFEAFKVRVTSDRGLGELFRNLEASVRIAKWAAELSGYHISFEPRTTIKSQVLADFVIDWTGPITQPDPSTEKVWTIHCDGAWCHAGAGAAAIITSPAGVKHRYAARLSFALESDRCTNNIAEYEAVILGLRKLRALEVTTCIIKTDSKIVAGQVEKDYAAKDPALMQYLAAIRSLEGGPG

SEQ ID NO: 37245 - DNA, 787 bp, Zea mays subsp. mays
aaatccgatcgatctccgcggcctccagatcccccggcgggcggagacggcgagctccaggcggccaagaagcccccccctcgcagcgctcctctcctctgcctctccgaatcccttaccagggggaaaaaacattgcctgaaagttcttcaggccctggtgtagcagctgaattacccagtttaatggcgaagaacgagctttagatggtctaaagatggagatgagatagaagcaccacaaagtgtacagtggggtagcaaggatatgactgtcatgatgcctcagcgccaccgggctacagccaagaagcccatgtggataatcgtgctcttgtgcatggtttgcatcgtgctgattggggcttacgtcttcccaccgcggcgcttctctaactgctacctctctgcttcaagtgtatgcgcacctttcaaggattggctcccttctatgggccgtcgggagagaactgacgaggagattatttcatctgtagttattagggatatcctttcaatgcccatgcctatgccaaaaaatccaaagattgcccttatgttcttgacaccaggttcattgccctttgagaaattgtgggagaagtttttacagggacatgagggaagatactccatctatgtgcacgcatcacgtgaaaagcctgttcatactagttctttgtttgctggccgggatattcacagtgatgcggtagtatggggattgatttcaatggttgatgctgagaaaagattgttagcgaatgcactggaagatgttgataatc

SEQ ID NO: 37246 - protein, 173 aa, Zea mays subsp. mays
MTVMMPQRHRATAKKPMWIIVLLCMVCIVLIGAYVFPPRRFSNCYLSASSVCAPFKDWLPSMGRRERTDEEIISSVVIRDILSMPMPMPKNPKIALMFLTPGSLPFEKLWEKFLQGHEGRYSIYVHASREKPVHTSSLFAGRDIHSDAVVWGLISMVDAEKRLLANALEDVDN

SEQ ID NO: 37247 - protein, 170 aa, Zea mays subsp. mays
MMPQRHRATAKKPMWIIVLLCMVCIVLIGAYVFPPRRFSNCYLSASSVCAPFKDWLPSMGRRERTDEEIISSVVIRDILSMPMPMPKNPKIALMFLTPGSLPFEKLWEKFLQGHEGRYSIYVHASREKPVHTSSLFAGRDIHSDAVVWGLISMVDAEKRLLANALEDVDN

SEQ ID NO: 37248 - protein, 169 aa, Zea mays subsp. mays
MPQRHRATAKKPMWIIVLLCMVCIVLIGAYVFPPRRFSNCYLSASSVCAPFKDWLPSMGRRERTDEEIISSVVIRDILSMPMPMPKNPKIALMFLTPGSLPFEKLWEKFLQGHEGRYSIYVHASREKPVHTSSLFAGRDIHSDAVVWGLISMVDAEKRLLANALEDVDN

SEQ ID NO: 37249 - DNA, 2345 bp, Zea mays subsp. mays
taactccatgcacaaaactactccctgcgcaaaacacagagtagaatagaggctcaattaaccaatctttattaactccctgcgcaaaacacacggaatagaatacatgctcaattaatcaattaaccatttttttattaactccctgcacaaaactagcctaagcagtgatttttacagtaattttgataccttggcaccacgcttatattttgataaatcgtaccatatctatgatttatcttttgttaaatcatagatccctaacacttatattttgttgttatggacagtttgcatgaacacttgattgtacacctatatatcaattctacatgattgttgtttgcttgagattatttccccaaatattgatatgattccagattcatcatgacatgccatatgtttttttggatttgatgcttacatgtagatggataagaagaccaaggttatagtttgtgttgctgctgcacatatattactgtcatgtcaatgatggctatgattattcattctagaaaaagaaaacgaaatgcaaggaggactgggattacctatgcaccaatgcatgaaagggatagaactagaattgaatatctcaacacaaagatttggagggatgacacaacatgtataaacatgattagaatgaaaagggcttgtttctttcacctaactaaacattttagagagcgtggtttacttcaggacactatccatatgtgtgttgaacaacaagtggccatgtttctaaatacagttgggcataaccttagaaataggttgattggcatgaattttggtagatctggggaaacagttagtcgatgtttcaataaagttcttcgtgcaattggtgagctacgtggggaactaattaggccaccttcattggacactccaaccaaaatagcagggaactacagatgggatccgtattttaaggattgtattggagctattgatggtacacatgtaagagccactattcctagagatatggagcatgcctttcgtggtaggaagtcctatgcgactcaaaatgtaatggcggctgtagattttgatctacgcttcacttatgtgttggctggttgggagggaacatctcatgatgctaatgtattacgggatgctttagaacgtgtgaatggccttcgcgttccacaagctttggtaattggtcgtatagtccctcatcatcggaatggtggggtcacttatctttcactcacctaatgtggatccgaaggcagagaatcctaatgagatggttacagctggtgtgctttcaagccttcagaatttcctacgcaagtgcctcatagctatcctctcatatggcccaatgccgaagcacattgcatttattatggatggcaatcgtcgatatgctaaattcagaagcatgcaagaaggagctggtcacaggatgggtttctctacccttattgcaagtctgatgtactgctatgaaatgggtgtgaagtacatcactgtctacgcattcagcatcgacaattttaaaagggacccaagtgaggtggaatccttgatgcagttaatggaggaaaaaatcaacgaactcttagagaaccaaagtgtaatcaacaagattaactgtaagatcaacttttggggtaacttggacttgttatatgagccggtgcggttggcggctgagaagctgatggcgagcacagctgggaacacagggctggtcttttctatctgcatgccatacaactcgacttctgagattgtcaatgctgtcagtcaagtctgtgcggaaaggatggaaatgtttcagagcgaacatattggcgaatgcaatggtcatgctgcaaataacggtgtgcgatcagagatttcagtggcggatttggatcgccacatgtatagtgccgaatgcccagatcctgatattgtcatccggacttcgggcgagactcgattgagcaatttcctcctttggcagacaacgtttagtcacttgcagaatccagatcctctgtggcccgagttctcttttaggcaccttgtttgggctatcttgcagtatcagagagtttaccctgctctggagcataacagaaagttggctaagaagcagttgtgattccatgttatttgcaaggaggtatcatgaagggctattaacatcaaacttttccttctcaatttcccggtaatgggaaatgcaaagaacatactagcatataacattatgaatagatcaccatgtaacttaagtgtgattgctaccataaccatgtaacttatttgagctcgtacaaatgctgtgattcctaaatatatatatatagagtgcccggggt

SEQ ID NO: 37250 - protein, 303 aa, Zea mays subsp. mays
MVGSLIFHSPNVDPKAENPNEMVTAGVLSSLQNFLRKCLIAILSYGPMPKHIAFIMDGNRRYAKFRSMQEGAGHRMGFSTLIASLMYCYEMGVKYITVYAFSIDNFKRDPSEVESLMQLMEEKINELLENQSVINKINCKINFWGNLDLLYEPVRLAAEKLMASTAGNTGLVFSICMPYNSTSEIVNAVSQVCAERMEMFQSEHIGECNGHAANNGVRSEISVADLDRHMYSAECPDPDIVIRTSGETRLSNFLLWQTTFSHLQNPDPLWPEFSFRHLVWAILQYQRVYPALEHNRKLAKKQL

SEQ ID NO: 37251 - protein, 282 aa, Zea mays subsp. mays
MVTAGVLSSLQNFLRKCLIAILSYGPMPKHIAFIMDGNRRYAKFRSMQEGAGHRMGFSTLIASLMYCYEMGVKYITVYAFSIDNFKRDPSEVESLMQLMEEKINELLENQSVINKINCKINFWGNLDLLYEPVRLAAEKLMASTAGNTGLVFSICMPYNSTSEIVNAVSQVCAERMEMFQSEHIGECNGHAANNGVRSEISVADLDRHMYSAECPDPDIVIRTSGETRLSNFLLWQTTFSHLQNPDPLWPEFSFRHLVWAILQYQRVYPALEHNRKLAKKQL

SEQ ID NO: 37252 - protein, 256 aa, Zea mays subsp. mays
MPKHIAFIMDGNRRYAKFRSMQEGAGHRMGFSTLIASLMYCYEMGVKYITVYAFSIDNFKRDPSEVESLMQLMEEKINELLENQSVINKINCKINFWGNLDLLYEPVRLAAEKLMASTAGNTGLVFSICMPYNSTSEIVNAVSQVCAERMEMFQSEHIGECNGHAANNGVRSEISVADLDRHMYSAECPDPDIVIRTSGETRLSNFLLWQTTFSHLQNPDPLWPEFSFRHLVWAILQYQRVYPALEHNRKLAKKQL

SEQ ID NO: 37253 - DNA, 714 bp, Zea mays subsp. mays
gggacgtcaatgtgacgcagagagacctttataagtacttcgtcgcattctctctcttccgactcaattcgttttccctcctcttctgcttaccggaaaagtctatatctccgacggaccttcttctctctagttaatcagacctcgcgctcgtgataatggcaacttttggtgcgcctgctaccgccaacagtaaccctaacaaatcctacgaggttactccatcaccggcagattctatttcgagcttaagttttagtccaagagctgatatacttgtggccacttcatgggacaatcaggtgaggtgttgggaaatatcccgtagtggagcctctctagccagtgctcctaaagcatcaatatcacatgatcagccggttttatgttctgcttggaaagatgatggaaccacagtctttagcggtggatgtgataagcaagcaaaaatgtggcccttgttgtctggtggtcaacctgtaactgttgctatgcatgagggtcctatcgcagctatggcttggatcccgggaatgaatctccttgcaactggaagttgggataaaactttgaaatattgggacacaagacagcaaaatcctgtacatacccaacagcttccagacaaatgttatacattgtctgtgaaacatcctctgatgggtgtcgggactgccgatagaaatctgatagtcttcaactttgcaaatcctc

SEQ ID NO: 37254 - protein, 185 aa, Zea mays subsp. mays
MATFGAPATANSNPNKSYEVTPSPADSISSLSFSPRADILVATSWDNQVRCWEISRSGASLASAPKASISHDQPVLCSAWKDDGTTVFSGGCDKQAKMWPLLSGGQPVTVAMHEGPIAAMAWIPGMNLLATGSWDKTLKYWDTRQQNPVHTQQLPDKCYTLSVKHPLMGVGTADRNLIVFNFANP

SEQ ID NO: 37255 - DNA, 1832 bp, Zea mays subsp. mays
ggtttttactctttcgtcttccttttcagagttcaatcacacaacacctctcttcaatagcaataaccatggctcacactctcggtctcactcaacccaactccactgagcctcacaagatctcgttcactgcgaaggagatcgatgtaattgaatggaaaggagacatactcgtagttggtgtgacagagaaggacttagccaaagacggtaactcaaagtttgagaatccgatcttgagcaaggtcgatgctcacttaagtggacttttagctcaagtctcttccgaggaagatttcactgggaaacctggtcaatcgactgttctcaggcttccgggtttaggatcaaagagaatcgctttgatcggtcttggacagtctgtttcgtctccggtggcttttcatagccttggtgaagctgtagctacagtttcaaaagcttctcaatctactagtgctgctattgtgcttgcttcaagtgtttctgatgaatctaagcttagttctgtatcagctttagcttcaggcatagtacttggtttatttgaagatggtaggtataagtctgaatcaaagaaaccatctttgaaagctgttgatattattggatttggaactggggctgaggtagaaaagaagctgaagtatgctgaagatgtttcttacggtgtaattttcgggagagagctcattaattctcctgccaatgtgcttactcctgctgtactagctgaggaagcagcaaaggtggcttctacgtacagtgatgtcttcactgcaaacatcttgaacgaagagcaatgcaaagagttgaagatgggttcttacctagctgttgctgctgcgtcggctaatcctcctcacttcatccaccttgtctataaacctccgaatggctctgttaagaccaaacttgctcttgttggaaaaggattgacctttgacagtggtggctacaacattaagactggacctggctgctcaattgagctcatgaaattcgacatgggcggttcagctgctgttcttggcgctgcgaaagctattggtgagattaagcctcctggtgttgaggttcatttcatcgttgcagcctgtgaaaatatgattagtggaaccggaatgagacctggagatgtcatcactgcctcaaacggaaagaccattgaggtcaacaacacagatgctgaaggtcgtctaacactcgcagatgctctagtgtatgcttgtaaccaaggcgtcgacaagattgtagacctcgctactttgaccggggcctgtgttattgctcttggaacttcaatggcaggaatctatacacctagcgacgagcttgcaaaggaagtgattgctgcatcagaaaggagtggagagaagctgtggaggatgccactggaagagagctattgggagatgatgaagtctggagtggctgatatggtcaacacaggcgggcgggcaggaggatccatcaccgcggctctcttcttgaaacagtttgtgagtgagaaggtgcaatggatgcatatcgacatggctggaccggtgtggaacgagaagaagaagtctgggaccgggtttggtgttgctacgcttgttgaatgggtacagaagaattcatcttcgtgaatgaaacctagagagcgtgagggagagactgtagagtttttcgggtgttgaaatgattgctggtttttaataaggtctcaaaagttactatgttttcagatgttcttaacttgttatgaaaagtaaaatcgtcaaaagttgaataaagtggtactttgttcaaaaaaaaaaaaaaaaaaaactcgagggggggcccggtac

SEQ ID NO: 37256 - protein, 542 aa, Zea mays subsp. mays
FLLFRLPFQSSITQHLSSIAITMAHTLGLTQPNSTEPHKISFTAKEIDVIEWKGDILVVGVTEKDLAKDGNSKFENPILSKVDAHLSGLLAQVSSEEDFTGKPGQSTVLRLPGLGSKRIALIGLGQSVSSPVAFHSLGEAVATVSKASQSTSAAIVLASSVSDESKLSSVSALASGIVLGLFEDGRYKSESKKPSLKAVDIIGFGTGAEVEKKLKYAEDVSYGVIFGRELINSPANVLTPAVLAEEAAKVASTYSDVFTANILNEEQCKELKMGSYLAVAAASANPPHFIHLVYKPPNGSVKTKLALVGKGLTFDSGGYNIKTGPGCSIELMKFDMGGSAAVLGAAKAIGEIKPPGVEVHFIVAACENMISGTGMRPGDVITASNGKTIEVNNTDAEGRLTLADALVYACNQGVDKIVDLATLTGACVIALGTSMAGIYTPSDELAKEVIAASERSGEKLWRMPLEESYWEMMKSGVADMVNTGGRAGGSITAALFLKQFVSEKVQWMHIDMAGPVWNEKKKSGTGFGVATLVEWVQKNSSS

SEQ ID NO: 37257 - protein, 520 aa, Zea mays subsp. mays
MAHTLGLTQPNSTEPHKISFTAKEIDVIEWKGDILVVGVTEKDLAKDGNSKFENPILSKVDAHLSGLLAQVSSEEDFTGKPGQSTVLRLPGLGSKRIALIGLGQSVSSPVAFHSLGEAVATVSKASQSTSAAIVLASSVSDESKLSSVSALASGIVLGLFEDGRYKSESKKPSLKAVDIIGFGTGAEVEKKLKYAEDVSYGVIFGRELINSPANVLTPAVLAEEAAKVASTYSDVFTANILNEEQCKELKMGSYLAVAAASANPPHFIHLVYKPPNGSVKTKLALVGKGLTFDSGGYNIKTGPGCSIELMKFDMGGSAAVLGAAKAIGEIKPPGVEVHFIVAACENMISGTGMRPGDVITASNGKTIEVNNTDAEGRLTLADALVYACNQGVDKIVDLATLTGACVIALGTSMAGIYTPSDELAKEVIAASERSGEKLWRMPLEESYWEMMKSGVADMVNTGGRAGGSITAALFLKQFVSEKVQWMHIDMAGPVWNEKKKSGTGFGVATLVEWVQKNSSS

SEQ ID NO: 37258 - DNA, 783 bp, Zea mays subsp. mays
gctctttcaccacataaaaactcataaacctcgatcgaaccaaagctaaacgaaaaacttaaaacccaaatcttatcactactctaaaagaatcttcatcatggcctcagtaacctcagccaccgttgcaatcccatctttcaccggccttaaagcctcaaccatcaaatcatccgccaccgtcagaatccaaactgctgctgttgcatcaccgaagcttacagtgaagtcatctctaaagaacttcggagtcgcggccgtagcggctgcagcttcaattgctttggccggaaacgccatggcaatagaagttctcttgggaggaggggatgggtcgttagcttttattcccaacgacttctctatagctaaaggagagaagattgtgttcaagaacaacgctggatacccacacaatgttgtctacgatgaagacgagatcccaagtggcgtcgacgtggccaagatctcgatggacgagcaagatctactcaacggtgcgggagagacgtacgaggttgctttgaccgagccagggacttacagcttctactgtgcgccacatcagggtgctggtatggtcggtaaagtcaccgttaactaaaatgtgtgtgtgagtaagtgagggagtctcggactcaattagaggctcttctttcacattcttacattattacataaagtgttttgtaattctaaagagtgttgaatcgaatggaccgtgattgttgttgtaaaaaaaaaaaaaaaaaaaaaaaaaaaaaactcgagggggggcccggt

SEQ ID NO: 37259 - protein, 167 aa, Zea mays subsp. mays
MASVTSATVAIPSFTGLKASTIKSSATVRIQTAAVASPKLTVKSSLKNFGVAAVAAAASIALAGNAMAIEVLLGGGDGSLAFIPNDFSIAKGEKIVFKNNAGYPHNVVYDEDEIPSGVDVAKISMDEQDLLNGAGETYEVALTEPGTYSFYCAPHQGAGMVGKVTVN

SEQ ID NO: 37260 - protein, 101 aa, Zea mays subsp. mays
MAIEVLLGGGDGSLAFIPNDFSIAKGEKIVFKNNAGYPHNVVYDEDEIPSGVDVAKISMDEQDLLNGAGETYEVALTEPGTYSFYCAPHQGAGMVGKVTVN

SEQ ID NO: 37261 - DNA, 2120 bp, Zea mays subsp. mays
taaatggcttacgcccgaggggcttattcttccttatcatggtatgatataattatcatacaaaaatgttacactgcttttacagggtgtacctcatctatttgcttgtacaattcatcttactactgctttgacaaacattggtctgcactgctttggtctgtgctttaggattctgtttcattgggagaaacaaatgcccttgcttacttttatttatgcttttctgaataattaagaagactagcctcatgttggaatcttcagcgttatatataatacaaaaaaagaggtttgcaatgaaaagttaaaaaggggacttttctccaatacaaggaatcatcttgacagaatataaaacttttcttctaaacatagcatacaatggttttagctgattattgtgtatttcagaagatggtgaattgtgtgaatacttccctagccctttttgctacatcgaggtcttcaggaggaaccttgcttttgacaccaggaatgttgtaagcattacagtatgcaattagttccttctttattaccatatatatgaacttaggtgttcctctactgaccaggcttcagaccaatctggagaagtgtcaggtcatacccatccagttatccatggtcaaacttgcctttgtacaggagattttcagctgtcagattgctcctttcccctgccactacttaggtgttcctctctcaatctacaagcctaaacacagtaaggattaaggagcagccgttgtatacttgtatataattgtggatagaattcccacttggatgggcaacatgctaaatttagctgggcgagctaccttggtgaaggtcacacactctgcaattccgatattcatctccattgacacctgtttgtcggtatgggccattgaacagattgatctgtcaccctactgagcttggtagggtatgccctcatattaaggtgggaatggcttcacataactgacccatatcgtacttggattgatcttctgagtctggcttgatggttcctcaattaagcatgtggctgatctgtgcaactgtgggtagataaattcattggatttttttttgctgaggttgctttttttgcatccgtgtctatgtcgacatagaggcatcattatggtgcatgataataaaaactatttgtaaacctttgttgtacatgcccagattggggaagactttacagtcgataactttactatatacccttctttgtcaaggctttgatgataagccaatggttaaaagggttgtcattgtaacccccacaagcttagttagcaactgggaatctgagataattaagtggttgaaaggcagagtgcaggtgctggccatctgtgaaagcacacgtgctgatgttctttccggaattgaaagtttcttaaaacccttgagccgtctccatgttttcttttgcttactaattatttgttaatatacactatactaaatgaaaatgtagctgcaagttaatgacaatttctgtggtgcatgaataatcttcaggtacttatcatatcttatgagactttccgcatgcattcttcatgcgcgcaccaagtgcgcgcagtgccataccgtggagcgaggtggcgcgcacaggcaggggcccaacctgcacggcctcttcggtcgtcagtcaggcaccaccctcggctaagcctactccacgaccaacaagaacatggtcatcgtctgggaggagggcaccctgtacgactacctcttcaaccccaagaagtacattctaggcacaaagatggtcttcccggggctcaagaagcccaaggaacgaaccgatctcatcgcctacttgacctatcgacgcaacaggggatactcacactgtcatccttagctctgtggcaataagtcgttcgtctgcaacacagccgacagaaaactgagcatgtgcttcagagaccaggcattattgaactttgctgccactaatttacattagatgaactgagttacagcagaatgaatttcctggatcctaaatgcagagaataaataaataaaaatatataaaaggaaaaaaaaaaaaaaaaaaaaaaaaaaaaaaaaaaaaacctcgagggggggcccgg

SEQ ID NO: 37262 - protein, 126 aa, Zea mays subsp. mays
MNNLQVLIISYETFRMHSSCAHQVRAVPYRGARWRAQAGAQPARPLRSSVRHHPRLSLLHDQQEHGHRLGGGHPVRLPLQPQEVHSRHKDGLPGAQEAQGTNRSHRLLDLSTQQGILTLSSLALWQ

SEQ ID NO: 37263 - protein, 111 aa, Zea mays subsp. mays
MHSSCAHQVRAVPYRGARWRAQAGAQPARPLRSSVRHHPRLSLLHDQQEHGHRLGGGHPVRLPLQPQEVHSRHKDGLPGAQEAQGTNRSHRLLDLSTQQGILTLSSLALWQ

SEQ ID NO: 37264 - protein, 104 aa, Zea mays subsp. mays
MIIKTICKPLLYMPRLGKTLQSITLLYTLLCQGFDDKPMVKRVVIVTPTSLVSNWESEIIKWLKGRVQVLAICESTRADVLSGIESFLKPLSRLHVFFCLLIIC

SEQ ID NO: 37265 - DNA, 1687 bp, Zea mays subsp. mays
tgctcctgcattcaaccaagaggaaaacatttccaggcacagtgagaagccacgttatgcttttgatattggtacacaaaatgtccatcctgacataatccagcaaccacccaatctggctgtccagagcaaccttatagctcccattgaaccacctggttctaatgaaaaggttactgtgctaccatctaactctggtgctcaggttccttctggatcacctgtacagcgtcctaaagaaatggccaatcacttggtttcaattccccccaatggcagtaacaaatttccattgcagtctactgttggtattgatcgtgttgaaggtacacaggaaccggcttatgcagattcacttttctcaaatcaggatccttggaaagcagtgggcaatgcatctttagtgcctccaagaccaaacaagctaactaaggagtctgttgtttctggaggtcaatatattgatggccatatgcctgatatgaacatgcatgctgccataccctcagaagaagactcatgttttaaggatatgcacacagttaaattgaacaaaggacctggagaagatagtatcaagcgacaattacaagctgttgctgaaggggtagccgcatcagttcttcagccaccctttcctgaaaaaacagtggtgttctctggggatcacatcgattcgcatggagcagaagttgatgtcaagttccaggatgaagggaacaatcagtcagacaaaataagtcaaggggttcaagttttagatgacaacgataaccttcagataataaagaacagtgaccttgaagaattgcgtgaacttggttctggaacctttggtactgtttaccatggaaagtggagaggttcagatgttgctataaagagaatcaacgatcgatgctttgctgggaaggcttctgagcaagagcgtatgatggacctggtggatctgttgcaacggtaacagaatacatggctaatggctcactccgacaagcattacaaagacatgaaaagatctttgatcggcgtaggcgtctactaattgcaatggatgttgcatttggaatggaatatctccatgggaagaatatagtgcattttgacttgaagagtgacaatctgcttgtcaacctaagggatcctcaacggcctatatgcaaggttggtgatttgggattatcaaaggtcaaatgccagacactaatctctggcggagtaagaggaacacttccttggatggcccctgagttgttgaatggcagcagcagccttgtctcggaaaaggttgacgtcttctcgtttggcattgtgatgtgggagctacttacaggtgaagagccttacgccgagctgcactatggggccattataggtggaatcgtgaataacacgctgcgacctccggtgcccgagtcctgtgatccccagtggaggtcactgatggagcggtgctggtcagccgaaccgtcagagaggccgagcttcaccgaggtcggcaagagcctgcgcgccatggcttctcctaccaaggcacaacaatcgaaatagatgctttagccttgcctctcgcgtccttttgttcagcagattgtttcagtcttcaaaccgaggaggtgccaccatggctggcctgccttttgtacatgaataagttgaagaaaaatacgagaatgtggcctgcttt

SEQ ID NO: 37266 - protein, 320 aa, Zea mays subsp. mays
APAFNQEENISRHSEKPRYAFDIGTQNVHPDIIQQPPNLAVQSNLIAPIEPPGSNEKVTVLPSNSGAQVPSGSPVQRPKEMANHLVSIPPNGSNKFPLQSTVGIDRVEGTQEPAYADSLFSNQDPWKAVGNASLVPPRPNKLTKESVVSGGQYIDGHMPDMNMHAAIPSEEDSCFKDMHTVKLNKGPGEDSIKRQLQAVAEGVAASVLQPPFPEKTVVFSGDHIDSHGAEVDVKFQDEGNNQSDKISQGVQVLDDNDNLQIIKNSDLEELRELGSGTFGTVYHGKWRGSDVAIKRINDRCFAGKASEQERMMDLVDLLQR

SEQ ID NO: 37267 - protein, 240 aa, Zea mays subsp. mays
MANHLVSIPPNGSNKFPLQSTVGIDRVEGTQEPAYADSLFSNQDPWKAVGNASLVPPRPNKLTKESVVSGGQYIDGHMPDMNMHAAIPSEEDSCFKDMHTVKLNKGPGEDSIKRQLQAVAEGVAASVLQPPFPEKTVVFSGDHIDSHGAEVDVKFQDEGNNQSDKISQGVQVLDDNDNLQIIKNSDLEELRELGSGTFGTVYHGKWRGSDVAIKRINDRCFAGKASEQERMMDLVDLLQR

SEQ ID NO: 37268 - protein, 192 aa, Zea mays subsp. mays
MANGSLRQALQRHEKIFDRRRRLLIAMDVAFGMEYLHGKNIVHFDLKSDNLLVNLRDPQRPICKVGDLGLSKVKCQTLISGGVRGTLPWMAPELLNGSSSLVSEKVDVFSFGIVMWELLTGEEPYAELHYGAIIGGIVNNTLRPPVPESCDPQWRSLMERCWSAEPSERPSFTEVGKSLRAMASPTKAQQSK

SEQ ID NO: 37269 - DNA, 1023 bp, Zea mays subsp. mays
gtcagtatggaaacacttggttccacatctggtcgacgattaccgcgtcgtcctctacgacaacatgggagccggtacgaccaaccctgactatttcgacttcgatcgttactcaaatctcgaaggctactctttcgatttgattgcaatcttggaagatctcaagattgagtcttgtatctttgttggccactctgtttctgccatgattggtgtcttggcttctcttaaccgtcctgatctcttctccaaaatcgtcatgatctcagcttctccgagatacgtaaacgatgttgattaccaaggtggattcgaacaagaagacttaaaccaactattcgaagctatccgaagcaactacaaagcatggtgcttaggtttcgctccactcgccgtcggtggcgacatggactccatcgccgttcaagaattcagcagaacactcttcaatatgcgtcccgacatagctctctccgtcggccagaccattttccaaagtgacatgagacagatcttaccttttgtcactgttccgtgtcacattctccaaagtgttaaggacttagctgtaccagtcgttgtctccgagtatcttcacgccaatcttggctgtgaatccgtcgtggaggttattccttctgatggtcatcttcctcagcttagctcaccggattctgttattcccgttatcctccgtcacattcgtaatgacattgctatgtgattataagagatttaattagttaactattaaacgatgtaagaaaaaatgaaaataaatttctgatgtgatatgtctgtctagtctattgagaacattgtttcgttgtcttttggttctgattcgtttatcttgagtatcttgatctttgttgttcttatcttgttaaacgaaaagtctctgtcttctgtccacagctttgttcagagctcattattgctcgatgtaatagtgatgttcgtaattgatggtcaaaaaaaaaaaaaaaaaaactcgagggggggcccggtacccaattcgtg

SEQ ID NO: 37270 - protein, 240 aa, Zea mays subsp. mays
SVWKHLVPHLVDDYRVVLYDNMGAGTTNPDYFDFDRYSNLEGYSFDLIAILEDLKIESCIFVGHSVSAMIGVLASLNRPDLFSKIVMISASPRYVNDVDYQGGFEQEDLNQLFEAIRSNYKAWCLGFAPLAVGGDMDSIAVQEFSRTLFNMRPDIALSVGQTIFQSDMRQILPFVTVPCHILQSVKDLAVPVVVSEYLHANLGCESVVEVIPSDGHLPQLSSPDSVIPVILRHIRNDIAM

SEQ ID NO: 37271 - protein, 219 aa, Zea mays subsp. mays
MGAGTTNPDYFDFDRYSNLEGYSFDLIAILEDLKIESCIFVGHSVSAMIGVLASLNRPDLFSKIVMISASPRYVNDVDYQGGFEQEDLNQLFEAIRSNYKAWCLGFAPLAVGGDMDSIAVQEFSRTLFNMRPDIALSVGQTIFQSDMRQILPFVTVPCHILQSVKDLAVPVVVSEYLHANLGCESVVEVIPSDGHLPQLSSPDSVIPVILRHIRNDIAM

SEQ ID NO: 37272 - protein, 172 aa, Zea mays subsp. mays
MIGVLASLNRPDLFSKIVMISASPRYVNDVDYQGGFEQEDLNQLFEAIRSNYKAWCLGFAPLAVGGDMDSIAVQEFSRTLFNMRPDIALSVGQTIFQSDMRQILPFVTVPCHILQSVKDLAVPVVVSEYLHANLGCESVVEVIPSDGHLPQLSSPDSVIPVILRHIRNDIAM

SEQ ID NO: 37273 - DNA, 1084 bp, Zea mays subsp. mays
aagtctttcgatcaagccaagtaaaaaaaaaaatctaatctttgcgtcaccgttcgtgtttcctcttttctctagggttcttctacagttttccagtaaacatgagtcgtcatcctgaagtgaagtgggctgagactaccgagaagatttttctcactgtagtattagctgatactaaggataccaaggttaacctagacccagaaggagtctttgatttctctgcgaaagttggtccagaaaaccacgtttatgagctcaaactggaacttgccgataaagtcaatgttgaggaaagcaaaatcaacattggggaaagaagcatattctgcatcattgagaaagcagagccagaaaggtggaataagctactccgtgtgaagaagcccccacactatgtcaaggttgattgggacaagtgggttgatgaggacgatgaaggcagtgctggtgccgcagatatggatatggcaggaatggaaggaatgggaggaatgggaggcatgggcggcatgggaggaatgggtgaaatgggtggaatgggaggaatgggtggaatgggaggaatggaaggaatggatttctcgaaattaatgggtggaatgggtggaatgggcggactagaagggctcggtggaatgggaggcatgggtggcatgggtggtatgggaggaatgggaggcatggaagagtttgaagacagtgatgatgaagaagagacagcaaaatcaggagacaagaaggatgatgccgttaaggaggaaggtcctgcgacagagaaggcaccagccgcagaagaaacaacatctgttaaggaagacaagtgaagacactgttctagagatgctgaaaaaccatatggtattattagcttttcaggtttatgaaaccctctgaattacttcctcttttatatgaatgttgttggtactctgttttctttctatggatttgatcttggtttaagtttcttctaccttttgttttgggttatattgtttccaaatgttcttggacttgaaatttttggctttgacgtaaaacaaaaaaaaaaaaaaaaaaaactcgagggggggcccggtac

SEQ ID NO: 37274 - protein, 241 aa, Zea mays subsp. mays
MSRHPEVKWAETTEKIFLTVVLADTKDTKVNLDPEGVFDFSAKVGPENHVYELKLELADKVNVEESKINIGERSIFCIIEKAEPERWNKLLRVKKPPHYVKVDWDKWVDEDDEGSAGAADMDMAGMEGMGGMGGMGGMGGMGEMGGMGGMGGMGGMEGMDFSKLMGGMGGMGGLEGLGGMGGMGGMGGMGGMGGMEEFEDSDDEEETAKSGDKKDDAVKEEGPATEKAPAAEETTSVKEDK

SEQ ID NO: 37275 - protein, 121 aa, Zea mays subsp. mays
MDMAGMEGMGGMGGMGGMGGMGEMGGMGGMGGMGGMEGMDFSKLMGGMGGMGGLEGLGGMGGMGGMGGMGGMGGMEEFEDSDDEEETAKSGDKKDDAVKEEGPATEKAPAAEETTSVKEDK

SEQ ID NO: 37276 - DNA, 2356 bp, Zea mays subsp. mays
aaactcgcacaggtgagaatgacaccttttggggtagaagcaaatgatatcctcgtgactggaggttgggcctgttgggctctcctctgtactcttaggttgcgtttggttgcaatgacggaatgggacgggatgagacgattacttagataaggttgtttggttcagggtcaagggttgggacatgaccatcccagtgtcgtcctcaacagtccgtcagaattggatggatgagaggggacgacggaggacgcagctgtcccctgttgtcctagctgtcccgcaaccaaacacacccttactcgcataggtgacatgcagtgctcagccgctcatgcttgcatttgtccgagaaaaacaagatgtggacatttattcatttgcttcttgaatgcaaaatatagttgtatttcagtaaccattataccgacttgtcaatctctcatgctatgcatgtctatgcagaggatgcagttagttggatttgcttcttaattgtcatttataagaatattgttcatgcttatgctaccattttttctgattcttgataagcaactgcaagaaaattgtgcagtgagatcttcatgtggtaattctattgtaacctaggagggttaatatgaaatctagtactgtttggactcagaaagtcaacttatttttttgcagagaaactttgttgaaagtatggctggatattcaattctgtgctacctacttcaggtgaaagatcgccacaatgggaatcttctaattgatgaggaagggcatattattcatattgattttggtttcatactgtcgaactctcctggaggtgtaaacttcgagagtgcaccatttaagctaacgagggaactccttgaagtgatggattctgatgcagagggaactcccagtgagttctttgattactttaaggtgctatgcattcaaggtttccttacttgccggaagcatgcagaacgtattatacttcttgtggaaatgttgcaggtaacgtactttatctgtgttgcctaatatatgtcatacaactaatttctaagggcaaatatttgtttaatccaaacgttttttttggctcaacattttgtgatgtatatcagtaaagaattatcgcattagattctttgacaggtcttctatattggccaaaagttccagtttctcaattttcatccaatacgaactcaagttttttcactgtgccttgtaatctgagctactacagtgaagttgttttctttttttctctcaaaaagtgaagttgtttccttgtattgaagcatataaattgatttgagttaaccttttttatatggtataatgttacccctgcatgtctgggatgtggtatgctgtttacttataattgtgttgatttagctagtatgcaaattgttacaaattatcttacaagtgttatattgcgttcccttaccaggattctggctttccatgtttcaaaggtggccctcgcacaatacaaaacttgaggaagaggttccacttgagtctaactgaagagcaatgtgtatccctggtgctctcactgatcagtagcagcatggatgcttggcgcactcggcaatatgattactaccagagagtattgaatggaattttatgattttccccacaggagcaacggattcattcagaaaccaattttcttgtatccttggagcaaaccatgggattgcataggtcagttttgggctgatctatgctggcaccccatatcagatttccaggagaggactaggttattgatcactgtgttttcatgtggcattgcacatttgtggtcaactagggaaacagattggtgccgcattgtactttcatgggaccccccctctgaaagagttgagaagtgtacagtcatcggcagtcatctagttagcgctttgtgctaggaggttgtgaccagtggagctctatttggcatattggaatttggaatccgagctacattgttgtacagacctttgattgacgtagcttggagaggatgtaggagtgaacagggccatgctttgaagcgaacaagttataggcatatgggagctggggatcatccgagacagatgccgctcgaagtgtcactgtacttgttgtgtggtatccctatagcaccaaagtagatggagatgtgctttgctaaaaaaaaggtctgaaaggaaattggccgctaatttgcgcgaggcctgtccttaagagaggtgctttgctgcatttgtaaattatcattactgtacagggaccatactatcttagcattccgtttttaagttgttaagattttaattccaaaaaaaaaaaaaaaaaactcgagggggggcccggt

SEQ ID NO: 37277 - protein, 111 aa, Zea mays subsp. mays
MAGYSILCYLLQVKDRHNGNLLIDEEGHIIHIDFGFILSNSPGGVNFESAPFKLTRELLEVMDSDAEGTPSEFFDYFKVLCIQGFLTCRKHAERIILLVEMLQVTYFICVA

SEQ ID NO: 37278 - protein, 100 aa, Zea mays subsp. mays
MEFYDFPHRSNGFIQKPIFLYPWSKPWDCIGQFWADLCWHPISDFQERTRLLITVFSCGIAHLWSTRETDWCRIVLSWDPPSERVEKCTVIGSHLVSALC

SEQ ID NO: 37279 - protein, 61 aa, Zea mays subsp. mays
MHSRFPYLPEACRTYYTSCGNVAGNVLYLCCLIYVIQLISKGKYLFNPNVFFGSTFCDVYQ

SEQ ID NO: 37280 - DNA, 899 bp, Zea mays subsp. mays
gaccaatcaaaaatgtctttgctctctcctcttcctctgctccactcattctcctccaccgtcgccacaaaatccaccgcctctagaatcactgccacgccgtcgaaaatccgcttctctgtcataaacgccacgtcggagaatggaaacagcggtggtagtaaaaacgatcgtgatgaggatccatcttttaacccatttggtttcgttacagacaatccgtctagccggagtgcaattcagttaccagagtctccggcggaagacggtaatgtcggccaaatgctctacaggactgaagataaaggtaaagagtatggctcaactatcaaatctgggaagcttagatggtttgtgagagagactggatcaaaggagagtcgtcgaggaaccattgtatttgttcatggagctcctactcagtcttttagctacagaactgtcatgtctgagttgtcagatgctggatttcattgctttgcacctgactggataggattcggattcagtgacaaaccgcagcctggatacggttttaattacacagaaaaagagtaccatgaggcgtttgataaactgcttgaagtgctagaggtcaaatctcctttctttcttgttgttcagggatttcttgtaggttcatatggtttaacttgggctttgaaaaatccaagcaaggttgagaaactcgcgatccttaatagtccgctgaccgtttcatccccagttcccggattatttaagcagctgaggattcccctgtttggtgaattcacctgccaaaatgctatcttggccgagcggttcattgaaggaggtagcccctacgtcctgaagaatgagaaagctgatgtgtatcgtctaccatatttgtcaagcggagggcctggctttgcctt

SEQ ID NO: 37281 - protein, 299 aa, Zea mays subsp. mays
DQSKMSLLSPLPLLHSFSSTVATKSTASRITATPSKIRFSVINATSENGNSGGSKNDRDEDPSFNPFGFVTDNPSSRSAIQLPESPAEDGNVGQMLYRTEDKGKEYGSTIKSGKLRWFVRETGSKESRRGTIVFVHGAPTQSFSYRTVMSELSDAGFHCFAPDWIGFGFSDKPQPGYGFNYTEKEYHEAFDKLLEVLEVKSPFFLVVQGFLVGSYGLTWALKNPSKVEKLAILNSPLTVSSPVPGLFKQLRIPLFGEFTCQNAILAERFIEGGSPYVLKNEKADVYRLPYLSSGGPGFA

SEQ ID NO: 37282 - protein, 295 aa, Zea mays subsp. mays
MSLLSPLPLLHSFSSTVATKSTASRITATPSKIRFSVINATSENGNSGGSKNDRDEDPSFNPFGFVTDNPSSRSAIQLPESPAEDGNVGQMLYRTEDKGKEYGSTIKSGKLRWFVRETGSKESRRGTIVFVHGAPTQSFSYRTVMSELSDAGFHCFAPDWIGFGFSDKPQPGYGFNYTEKEYHEAFDKLLEVLEVKSPFFLVVQGFLVGSYGLTWALKNPSKVEKLAILNSPLTVSSPVPGLFKQLRIPLFGEFTCQNAILAERFIEGGSPYVLKNEKADVYRLPYLSSGGPGFA

SEQ ID NO: 37283 - protein, 205 aa, Zea mays subsp. mays
MLYRTEDKGKEYGSTIKSGKLRWFVRETGSKESRRGTIVFVHGAPTQSFSYRTVMSELSDAGFHCFAPDWIGFGFSDKPQPGYGFNYTEKEYHEAFDKLLEVLEVKSPFFLVVQGFLVGSYGLTWALKNPSKVEKLAILNSPLTVSSPVPGLFKQLRIPLFGEFTCQNAILAERFIEGGSPYVLKNEKADVYRLPYLSSGGPGFA

SEQ ID NO: 37284 - DNA, 941 bp, Zea mays subsp. mays
aaatcttcattccagcaatggcgattcgttgtgtagcgagtagaaaaaccctagccggcttgaaggagacatcatcgaggctattgaggatcagagggattcagacttttacgcttcctgatcttccttacgattatggcgcattggaaccggccattagtggagagatcatgcagattcatcaccagaagcatcaccaggcttatgttactaattacaataatgctcttgagcagcttgatcaagctgtgaacaagggagatgcttccactgttgttaagttgcagagcgccatcaaattcaacggcggaggtcatgtcaaccattcgattttctggaagaaccttgctccttccagtgaaggaggtggagagccaccaaaaggatctcttggtagtgccattgacgctcactttggctcccttgaaggtctggtgaaaaagatgagtgctgagggtgctgcagtgcaaggctcaggatgggtgtggctcggactagacaaagaactgaagaagctagttgttgacacaactgccaatcaggatccattagtgacaaaaggaggaagcttggtacctctggtgggtatagatgtttgggagcacgcctactacttgcagtacaaaaatgtgaggcctgagtatctgaagaatgtatggaaagtgatcaactggaaatatgcaagcgaggtttatgagaaggaaagcaactgaatcgtttacacgatgacataaggagatgaaccagttccagctcagcttttgttttaaggttgtcagaaacaaacttacagtgtctctttggtttttaagatttgctcaactcagctgtgtggtacgttgttttacaatgaaagttttcaagaataaaaatttgctattattgtcacaaaaaaaaaaaaaaaaaaaactcgaggaggggcccggtacccaattcgccct

SEQ ID NO: 37285 - protein, 236 aa, Zea mays subsp. mays
IFIPAMAIRCVASRKTLAGLKETSSRLLRIRGIQTFTLPDLPYDYGALEPAISGEIMQIHHQKHHQAYVTNYNNALEQLDQAVNKGDASTVVKLQSAIKFNGGGHVNHSIFWKNLAPSSEGGGEPPKGSLGSAIDAHFGSLEGLVKKMSAEGAAVQGSGWVWLGLDKELKKLVVDTTANQDPLVTKGGSLVPLVGIDVWEHAYYLQYKNVRPEYLKNVWKVINWKYASEVYEKESN

SEQ ID NO: 37286 - protein, 231 aa, Zea mays subsp. mays
MAIRCVASRKTLAGLKETSSRLLRIRGIQTFTLPDLPYDYGALEPAISGEIMQIHHQKHHQAYVTNYNNALEQLDQAVNKGDASTVVKLQSAIKFNGGGHVNHSIFWKNLAPSSEGGGEPPKGSLGSAIDAHFGSLEGLVKKMSAEGAAVQGSGWVWLGLDKELKKLVVDTTANQDPLVTKGGSLVPLVGIDVWEHAYYLQYKNVRPEYLKNVWKVINWKYASEVYEKESN

SEQ ID NO: 37287 - protein, 180 aa, Zea mays subsp. mays
MQIHHQKHHQAYVTNYNNALEQLDQAVNKGDASTVVKLQSAIKFNGGGHVNHSIFWKNLAPSSEGGGEPPKGSLGSAIDAHFGSLEGLVKKMSAEGAAVQGSGWVWLGLDKELKKLVVDTTANQDPLVTKGGSLVPLVGIDVWEHAYYLQYKNVRPEYLKNVWKVINWKYASEVYEKESN

SEQ ID NO: 37288 - DNA, 1120 bp, Zea mays subsp. mays
attatggacaggcttggcaaaatcctcagatgtttggtactagagaaaacacaaatctaccacaaggtcttgggccaagagcttttgtaagaccaatggtgcctcttggatacatcaatggaccaccatatcctgggcctatccctcccatgtattattacatgcccactgtgcctatggattcgatgagaagtccatcacactacattcaaaatcaaccagctcctaatcctgttttatccccagaagctgctgagttaagatctaatatactaactcaagtggagtactacttcagtgatgcaaatctggagcgtgatgatttcctgaaatctttaatggatgagcatggttgggttccagtttcaaaacttgcagatttcaatagacttaagaaaatgaccgcagatatacacctgatattggatgcactgacaagctcaagtcttctagaagttcaggatgacaagattagaaggcgttatgattggtcaaagtgggtctcgctttctggtacatcagttgcgagcccatcatctgccagtgtgaatagcagtgtgggtgagaagaacattggtggtttttcaaataaggatgcttattctgaagatcaaaagacgcattgtcaatccaaagatattagatgtaatacagatattggtatgggggaaaaagttatcgatgaacaagtgcaagattcacatggttgttcattgaataacgacttttctgtcatcagtattgatgaaaagactaagaacctttctgcacatccttcacgcaaatatggatcttcttttagatttggtgaagttcagaaaacaaggtcgaagatagtacctaatgctcagagtgaaagaggtttctctattggtttcccaagtgccttctctagctttggtggtggtggtgaccagagcactttcttgcttgatgaggagttggaactggaacatgtcgaccattcacgtgatgacctccattcacataaaaggggtgatgatgaagatgaggacttctttgttgatgatcaagacgttagtaggctaatgattgttacacaggatactaggttagaaaaggatgacaaaaatcgcacaagtataccacaggcattttc

SEQ ID NO: 37289 - protein, 372 aa, Zea mays subsp. mays
YGQAWQNPQMFGTRENTNLPQGLGPRAFVRPMVPLGYINGPPYPGPIPPMYYYMPTVPMDSMRSPSHYIQNQPAPNPVLSPEAAELRSNILTQVEYYFSDANLERDDFLKSLMDEHGWVPVSKLADFNRLKKMTADIHLILDALTSSSLLEVQDDKIRRRYDWSKWVSLSGTSVASPSSASVNSSVGEKNIGGFSNKDAYSEDQKTHCQSKDIRCNTDIGMGEKVIDEQVQDSHGCSLNNDFSVISIDEKTKNLSAHPSRKYGSSFRFGEVQKTRSKIVPNAQSERGFSIGFPSAFSSFGGGGDQSTFLLDEELELEHVDHSRDDLHSHKRGDDEDEDFFVDDQDVSRLMIVTQDTRLEKDDKNRTSIPQAF

SEQ ID NO: 37290 - protein, 363 aa, Zea mays subsp. mays
MFGTRENTNLPQGLGPRAFVRPMVPLGYINGPPYPGPIPPMYYYMPTVPMDSMRSPSHYIQNQPAPNPVLSPEAAELRSNILTQVEYYFSDANLERDDFLKSLMDEHGWVPVSKLADFNRLKKMTADIHLILDALTSSSLLEVQDDKIRRRYDWSKWVSLSGTSVASPSSASVNSSVGEKNIGGFSNKDAYSEDQKTHCQSKDIRCNTDIGMGEKVIDEQVQDSHGCSLNNDFSVISIDEKTKNLSAHPSRKYGSSFRFGEVQKTRSKIVPNAQSERGFSIGFPSAFSSFGGGGDQSTFLLDEELELEHVDHSRDDLHSHKRGDDEDEDFFVDDQDVSRLMIVTQDTRLEKDDKNRTSIPQAF

SEQ ID NO: 37291 - protein, 341 aa, Zea mays subsp. mays
MVPLGYINGPPYPGPIPPMYYYMPTVPMDSMRSPSHYIQNQPAPNPVLSPEAAELRSNILTQVEYYFSDANLERDDFLKSLMDEHGWVPVSKLADFNRLKKMTADIHLILDALTSSSLLEVQDDKIRRRYDWSKWVSLSGTSVASPSSASVNSSVGEKNIGGFSNKDAYSEDQKTHCQSKDIRCNTDIGMGEKVIDEQVQDSHGCSLNNDFSVISIDEKTKNLSAHPSRKYGSSFRFGEVQKTRSKIVPNAQSERGFSIGFPSAFSSFGGGGDQSTFLLDEELELEHVDHSRDDLHSHKRGDDEDEDFFVDDQDVSRLMIVTQDTRLEKDDKNRTSIPQAF

SEQ ID NO: 37292 - DNA, 2474 bp, Zea mays subsp. mays
gataccatttgggagaggtcagtcgacttctctttatgccgatgtggtgatgttgattgtattgaggtctgtgatatcagggagtggttgccaaaatcaaaaatggaccataagctgtggaagcttgttcttttgctaggagaatcttatttggcacttggagaggcatacaagaatgatgggcagcttcagcgcacccttaaagttgttgaattagcttgtttggtatatgggtctatgcctggacatattgatggcgacgagttcatctcatccatgtccaacagttcattgagtcgagaagatcttgccctaaaaactaaacttgtactggacgaggcagactattgcaataacaaaagatgcttcagttatgaagtttcttcccaccaattgccaccaaattatttgttctgggcaaaggcatggatgcttgttggtgacgtctatgcagaatatcacagattgaatagtcatcaagcaaagttggcaccagaacagaagtctcatggcgaagttagaatgtcaaatgaagttgcattggaggtcaaacgccttaagagaaaactgggaaaggataagcagaattgtgacacatgctctttgataaactgtagctgccaaagtgacagggcaagtagtggcagcagtgcaagcagcagtagttctgaggcctctaaactttacagccgaaagaaaaacaaaaaatcacttggtaagaaccttcaacttcaatcacaatatagagaagccagcaagaaccccaatgcacaagaagctacacaaggttctgaaaataaacagcatgatgtgaatgatacttgtattgagaacaactcagtattaaatgatgatattggtcactacagtcaggccagggaaaatcagtcaagaaatgttgatggtgttcctgataaatctcaagcaagtgttcctactgtgagggatggtggtatcttcaagttccttggtggtccaaaaccaggagatgttgagtacaacttgtcttctgctattcactgctatggtgcagccaagggagcattgttcgcatttcctgtgcattcagtagaaacttccatggttcttaagaaaagaggctggggatttaatgaactgggccgttgtagacttgagaatagaaatctggttagcgccgagattgcttttgcggatgctattaaagcatttgaagaggtgtttgaccacacaaatgttatactgatcaactgtaacttaggtcatggtaggagagctttagcagaggaatgtgtatccaggattgatgaatttcagaaacatgatcttcctgaaggcacatatatgcaatcctttaagtcggccaagtcagaatattttcaagcaataaactactattccgcagctaagaggcaactgaagtatgtcaatactgaggccgataaagtactataccatgaggtttacacacagtatgcccatacctacctgaggcttggaatgcttttggcaagggaaagcttcttaactgacagttatgaaggtggacttgtcaatgagtcatctaacagaacagctgtagagatttcagcgagtgatgcttttcgggaggctttgtctacgtatgaatcccttggtgaacatcgcaaacaggaagctgcttttggtcattttcagcttgcttgttatcagagggatctgtgcttaaggtttctggatttagttgacaaggaggttaaacagaaaaacgaggataaatatcgtcagaaaagtaagtggtatggttcactagctgagaagaactggcagaaggctttagaattttatgggccgaagacacatcctactatgtttcttaacatccttatggcgcagtctgccctttctattaatatttctaattccttccactcaaccgcgatgcttgacaccgctctgactcacttgttggaaggccggcatgtggttgaagcaaatgaagacaactccaacgatatggatctggacataaaaccgaagttctggtgccagctgcagagcctgctgaagaggatgctggcgggatccctgcctagcagcacgggcagagcagcctctgtcagccaagccagcactagcagcagaacagaaacttctaagctgaaagagatgtatcgtttgtcgctcaaatcttctaccctgggccagctgcatgcgttgtacaagctttgggtatcttaacacctttattttacaaatggttgctgctcatgttttatgtcgtcggcatctatatcttgaattacatagttcttatttggtgttcacggcacgtttttttttgttttgatttccagccaacttttaaaactaaatattaagtgtaaccatggaatgtcatggacgggacacactagctactacagtctacaactgttttgtagacttatataaacagcaaataatggcattctatgtgaaaaaaaaaaaaaaaaaaactcgagggggggcccggt

SEQ ID NO: 37293 - protein, 732 aa, Zea mays subsp. mays
DTIWERSVDFSLCRCGDVDCIEVCDIREWLPKSKMDHKLWKLVLLLGESYLALGEAYKNDGQLQRTLKVVELACLVYGSMPGHIDGDEFISSMSNSSLSREDLALKTKLVLDEADYCNNKRCFSYEVSSHQLPPNYLFWAKAWMLVGDVYAEYHRLNSHQAKLAPEQKSHGEVRMSNEVALEVKRLKRKLGKDKQNCDTCSLINCSCQSDRASSGSSASSSSSEASKLYSRKKNKKSLGKNLQLQSQYREASKNPNAQEATQGSENKQHDVNDTCIENNSVLNDDIGHYSQARENQSRNVDGVPDKSQASVPTVRDGGIFKFLGGPKPGDVEYNLSSAIHCYGAAKGALFAFPVHSVETSMVLKKRGWGFNELGRCRLENRNLVSAEIAFADAIKAFEEVFDHTNVILINCNLGHGRRALAEECVSRIDEFQKHDLPEGTYMQSFKSAKSEYFQAINYYSAAKRQLKYVNTEADKVLYHEVYTQYAHTYLRLGMLLARESFLTDSYEGGLVNESSNRTAVEISASDAFREALSTYESLGEHRKQEAAFGHFQLACYQRDLCLRFLDLVDKEVKQKNEDKYRQKSKWYGSLAEKNWQKALEFYGPKTHPTMFLNILMAQSALSINISNSFHSTAMLDTALTHLLEGRHVVEANEDNSNDMDLDIKPKFWCQLQSLLKRMLAGSLPSSTGRAASVSQASTSSRTETSKLKEMYRLSLKSSTLGQLHALYKLWVS

SEQ ID NO: 37294 - protein, 698 aa, Zea mays subsp. mays
MDHKLWKLVLLLGESYLALGEAYKNDGQLQRTLKVVELACLVYGSMPGHIDGDEFISSMSNSSLSREDLALKTKLVLDEADYCNNKRCFSYEVSSHQLPPNYLFWAKAWMLVGDVYAEYHRLNSHQAKLAPEQKSHGEVRMSNEVALEVKRLKRKLGKDKQNCDTCSLINCSCQSDRASSGSSASSSSSEASKLYSRKKNKKSLGKNLQLQSQYREASKNPNAQEATQGSENKQHDVNDTCIENNSVLNDDIGHYSQARENQSRNVDGVPDKSQASVPTVRDGGIFKFLGGPKPGDVEYNLSSAIHCYGAAKGALFAFPVHSVETSMVLKKRGWGFNELGRCRLENRNLVSAEIAFADAIKAFEEVFDHTNVILINCNLGHGRRALAEECVSRIDEFQKHDLPEGTYMQSFKSAKSEYFQAINYYSAAKRQLKYVNTEADKVLYHEVYTQYAHTYLRLGMLLARESFLTDSYEGGLVNESSNRTAVEISASDAFREALSTYESLGEHRKQEAAFGHFQLACYQRDLCLRFLDLVDKEVKQKNEDKYRQKSKWYGSLAEKNWQKALEFYGPKTHPTMFLNILMAQSALSINISNSFHSTAMLDTALTHLLEGRHVVEANEDNSNDMDLDIKPKFWCQLQSLLKRMLAGSLPSSTGRAASVSQASTSSRTETSKLKEMYRLSLKSSTLGQLHALYKLWVS

SEQ ID NO: 37295 - protein, 653 aa, Zea mays subsp. mays
MPGHIDGDEFISSMSNSSLSREDLALKTKLVLDEADYCNNKRCFSYEVSSHQLPPNYLFWAKAWMLVGDVYAEYHRLNSHQAKLAPEQKSHGEVRMSNEVALEVKRLKRKLGKDKQNCDTCSLINCSCQSDRASSGSSASSSSSEASKLYSRKKNKKSLGKNLQLQSQYREASKNPNAQEATQGSENKQHDVNDTCIENNSVLNDDIGHYSQARENQSRNVDGVPDKSQASVPTVRDGGIFKFLGGPKPGDVEYNLSSAIHCYGAAKGALFAFPVHSVETSMVLKKRGWGFNELGRCRLENRNLVSAEIAFADAIKAFEEVFDHTNVILINCNLGHGRRALAEECVSRIDEFQKHDLPEGTYMQSFKSAKSEYFQAINYYSAAKRQLKYVNTEADKVLYHEVYTQYAHTYLRLGMLLARESFLTDSYEGGLVNESSNRTAVEISASDAFREALSTYESLGEHRKQEAAFGHFQLACYQRDLCLRFLDLVDKEVKQKNEDKYRQKSKWYGSLAEKNWQKALEFYGPKTHPTMFLNILMAQSALSINISNSFHSTAMLDTALTHLLEGRHVVEANEDNSNDMDLDIKPKFWCQLQSLLKRMLAGSLPSSTGRAASVSQASTSSRTETSKLKEMYRLSLKSSTLGQLHALYKLWVS

SEQ ID NO: 37296 - DNA, 627 bp, Zea mays subsp. mays
  misc_feature (570)..(573): n is a, c, g, or t
tctatagagcccatcctctgcttcgcataacctagcggcaccagcagctaaccgtccagagaacagaacagagatgaccaccagcgtccccgtccctctggcctcacagtcgcaggcgccgcagcgcaagccacggacctacaccccgagcccatggggtgacttcttcctccaccacaccccatgcactccgtcacagctcttgtcgatgaaggagagggcaaaggtcaaggagcaacaggtgaggcagatcatacaggaaacaatggcctcctccaacctgcttcgcaagttggagcttgtggacacgctgcagcgtctcggggtggactaccgctacaacgaggagatcgaccagttgcttcgctctgtatacgacgacgacgacagggacggaggcggctccgacgatctctacctcacctcgctgcggttgtacttgctcaggaagcatgggtatacaacctcttcagatgtgttcgagaaattcagggacgagcgcgggagcgtctcgagcgacgatgccggctgcttgctcatgctgtatgacgctgctcatacgagaactcnnnnggaggagattcttgacgacatcatcgcttgggagcagagccgcctgcaatccct

SEQ ID NO: 37297 - protein, 184 aa, Zea mays subsp. mays
  misc_feature (166)..(167): Xaa can be any naturally occurring amino acid
MTTSVPVPLASQSQAPQRKPRTYTPSPWGDFFLHHTPCTPSQLLSMKERAKVKEQQVRQIIQETMASSNLLRKLELVDTLQRLGVDYRYNEEIDQLLRSVYDDDDRDGGGSDDLYLTSLRLYLLRKHGYTTSSDVFEKFRDERGSVSSDDAGCLLMLYDAAHTRTXXEEILDDIIAWEQSRLQS

SEQ ID NO: 37298 - protein, 139 aa, Zea mays subsp. mays
  misc_feature (121)..(122): Xaa can be any naturally occurring amino acid
MKERAKVKEQQVRQIIQETMASSNLLRKLELVDTLQRLGVDYRYNEEIDQLLRSVYDDDDRDGGGSDDLYLTSLRLYLLRKHGYTTSSDVFEKFRDERGSVSSDDAGCLLMLYDAAHTRTXXEEILDDIIAWEQSRLQS

SEQ ID NO: 37299 - protein, 121 aa, Zea mays subsp. mays
MHSVTALVDEGEGKGQGATGEADHTGNNGLLQPASQVGACGHAAASRGGLPLQRGDRPVASLCIRRRRQGRRRLRRSLPHLAAVVLAQEAWVYNLFRCVREIQGRARERLERRCRLLAHAV

SEQ ID NO: 37300 - DNA, 1995 bp, Zea mays subsp. mays
tattggggccaaagtcgctgccctgccgagtctcgactctccacctcagccctcagggccgccggctccttcctcccctctcctccgcctcgacaagcgtcggcgagatggtgaagaggagcaagaagagcaagagcaagcgagtcacgctgcggcagaagcacaaggtgcagcgcaaggtgaaggagcaccaccgcaagaagcgcaaggaagccaagaaggccggcaaggccggccagcggaggaaggtcgagaaggaccccgggatccccaacgagtggcccttcaaggagcaggagctcaaggcgctcgaggcccgacgcgcgcaggcgctccaggagctcgagctcaagaagcaggcgcgcaaggagagggctcagaagaggaaggcaggattgcttgaggacgaggacattgctagtttggcatctgcagcttccgcacagggcagtgagtttgcagcaaaggagaatgctcctttattagtggcaaagatcaacgatcattcagagaggtctttctacaaggagcttgttaaagtaattgaagcttccgatgtgattatggaggttcttgatgcaagggatccgctgggcacccgttgcattgacatggaaaagatggttaggaaggctgatccaagtaaacggattgtactacttctcaacaagatagatcttgttcccaaggaggcggtagagaaatggcttacatatctaagagaagaattgccaacagttgcttttaagtgcaatacccaggagcagaggaccaagctgggatggaaatcttcaaaattagataaaacaagcaacatcccacaaagcagtgattgtcttggtgccgagaatctaatcaaattgcttaagaattattccagaagccatgagctcaaactggcaattacggtgggtattgttggacttcctaatgttggcaagagcagtctgatcaacagcctgaagaggtcccgagtggtcaatgtcggttctactccagggattactagatcaatgcaagaagttcaattagacaagaaggtaaagttgttggattgtcctggtgttgttatgctcaaatcttccaacagtggtgtgtctgtagcccttcgaaactgcaaaagggttgagaaaatagaagatccagtcgctcctgttaaggagatcctaagtatttgcccacatgagaagttgctgtctctgtacaaggttccaaactttggttcagttgatgattttcttcagaaagtagcaactgtacgtgggaaattgaaaaagggtggtgtagtggatgttgaagctgcagcgagaattgtgcttcatgactggaatgaaggtaaaataccatattttacactgccgcctaaaagagatgctggggaagactcagatgcagtgattatatccgaggatgggaaagaatttaatatcgatgagatttacaaagctgaatcttcatatattggtggtttgaagtccattgaggagttccatcatattgagattcctcctaatgctccactggcgatcgatgaagagatgctagaggatggtggcaagaaaccaagcgaagccatccaggaaagccgggacagggaggagcaaatgcccgacgtgaaggactcaggaggaagcaaggcagccagcgccagcacgcagaacgacaagttgtacaccgccgacgccatactcgaccctcacaagaggaaagcagagaagaaacggcgcaaggcgagcaggcccagcgcgctgaacgacatggacgcggactacgatttcaaggtggattatcggatggaggacggtgggagcgagggtgcacatgcggatgatgaagatggcggagatggatccgaggataatgaaccaatgaccggtgtcgatgatgcgtgaattgtcatgtcgagtgccactttgccagaaatgatttgtcccaatgggggttgggaaattaacccacgacagtttggtaattagtttgtttctgtttaaacac

SEQ ID NO: 37301 - protein, 629 aa, Zea mays subsp. mays
LGPKSLPCRVSTLHLSPQGRRLLPPLSSASTSVGEMVKRSKKSKSKRVTLRQKHKVQRKVKEHHRKKRKEAKKAGKAGQRRKVEKDPGIPNEWPFKEQELKALEARRAQALQELELKKQARKERAQKRKAGLLEDEDIASLASAASAQGSEFAAKENAPLLVAKINDHSERSFYKELVKVIEASDVIMEVLDARDPLGTRCIDMEKMVRKADPSKRIVLLLNKIDLVPKEAVEKWLTYLREELPTVAFKCNTQEQRTKLGWKSSKLDKTSNIPQSSDCLGAENLIKLLKNYSRSHELKLAITVGIVGLPNVGKSSLINSLKRSRVVNVGSTPGITRSMQEVQLDKKVKLLDCPGVVMLKSSNSGVSVALRNCKRVEKIEDPVAPVKEILSICPHEKLLSLYKVPNFGSVDDFLQKVATVRGKLKKGGVVDVEAAARIVLHDWNEGKIPYFTLPPKRDAGEDSDAVIISEDGKEFNIDEIYKAESSYIGGLKSIEEFHHIEIPPNAPLAIDEEMLEDGGKKPSEAIQESRDREEQMPDVKDSGGSKAASASTQNDKLYTADAILDPHKRKAEKKRRKASRPSALNDMDADYDFKVDYRMEDGGSEGAHADDEDGGDGSEDNEPMTGVDDA

SEQ ID NO: 37302 - protein, 594 aa, Zea mays subsp. mays
MVKRSKKSKSKRVTLRQKHKVQRKVKEHHRKKRKEAKKAGKAGQRRKVEKDPGIPNEWPFKEQELKALEARRAQALQELELKKQARKERAQKRKAGLLEDEDIASLASAASAQGSEFAAKENAPLLVAKINDHSERSFYKELVKVIEASDVIMEVLDARDPLGTRCIDMEKMVRKADPSKRIVLLLNKIDLVPKEAVEKWLTYLREELPTVAFKCNTQEQRTKLGWKSSKLDKTSNIPQSSDCLGAENLIKLLKNYSRSHELKLAITVGIVGLPNVGKSSLINSLKRSRVVNVGSTPGITRSMQEVQLDKKVKLLDCPGVVMLKSSNSGVSVALRNCKRVEKIEDPVAPVKEILSICPHEKLLSLYKVPNFGSVDDFLQKVATVRGKLKKGGVVDVEAAARIVLHDWNEGKIPYFTLPPKRDAGEDSDAVIISEDGKEFNIDEIYKAESSYIGGLKSIEEFHHIEIPPNAPLAIDEEMLEDGGKKPSEAIQESRDREEQMPDVKDSGGSKAASASTQNDKLYTADAILDPHKRKAEKKRRKASRPSALNDMDADYDFKVDYRMEDGGSEGAHADDEDGGDGSEDNEPMTGVDDA

SEQ ID NO: 37303 - protein, 442 aa, Zea mays subsp. mays
MEVLDARDPLGTRCIDMEKMVRKADPSKRIVLLLNKIDLVPKEAVEKWLTYLREELPTVAFKCNTQEQRTKLGWKSSKLDKTSNIPQSSDCLGAENLIKLLKNYSRSHELKLAITVGIVGLPNVGKSSLINSLKRSRVVNVGSTPGITRSMQEVQLDKKVKLLDCPGVVMLKSSNSGVSVALRNCKRVEKIEDPVAPVKEILSICPHEKLLSLYKVPNFGSVDDFLQKVATVRGKLKKGGVVDVEAAARIVLHDWNEGKIPYFTLPPKRDAGEDSDAVIISEDGKEFNIDEIYKAESSYIGGLKSIEEFHHIEIPPNAPLAIDEEMLEDGGKKPSEAIQESRDREEQMPDVKDSGGSKAASASTQNDKLYTADAILDPHKRKAEKKRRKASRPSALNDMDADYDFKVDYRMEDGGSEGAHADDEDGGDGSEDNEPMTGVDDA

SEQ ID NO: 37304 - DNA, 1970 bp, Zea mays subsp. mays
aaacaggtgtgcctcgctcagactgcaagctacgtcggctagccgtccgaaatcaacatgtgcagcgcttccctgaagaaaccatggacatgccagaggtgttgaggtcacttagcattacagattataatattgcggttatggccccaattgatagcttcagggtttgccgtgtgctgcatatagaaaacaactacgtacccatcaacctaaagcatctagggaagctgttgcatctcaagttcctacagatatctggcacgactattgatgagctccctagagaaattgggcatctgaggtctcttcagacactgatattagccgatactggactagacgagctgccaccggctgtttgctcacttacacggttgatgtgcctgatagccctggagttcgaaaggttaccagctgacaggatggggaacctaacgtccctggaggagctacgactacatagggtagttggccggagtgccacccaagccctagtggcagagcttggcaagctgacgaggttgagggtggtcagcatcgccttttcagagcagctagaggagagcttgcaagaagcattcgtgcaatctctgtccaatctgcggggactccaggaactagcgcttttgtttaaaatgccacagcgggtaagcgatatgtggggagactgggagccaccaaggcagctccggcgcctgattattaaaggcatcgacttctcacggcagcctcgatggatcagccgctcctgcctgccacgcctctgctccttatctctggtggtgtacgctcttgaagcacaggacctagataatctagcgaggttgccagagctccagtacctcacgctagatggtctcagctggcctccaaggtatactgttggcccagacgacttcaggaatctgaggttctgcgatgtgagcacaacgttcgagtttcgtaagggcgccatgccaaggcttgaagtgctgcactttggagtttatgcagggtactggagttgggaaaagaatggtgtgccgttcgagcagttcccaacgaaggatgtgatcgaagatcttgacttggacctggataacgtccttttacttcagcaagtgatggtcaaagtcgactgctcaggtgctactgccgcacaagtggaggaggtggaggccgtggtcatgcgtgccgtggaaaatcatgccaaccgtccaaccatagtaatggatcgagtatatgaacaaaatatcctatccgacgaagagcgggaggctctgctttggcgacacattgaagaggattgctgcgtgcgcacgatgaaggataaatctgatgctttcttcatcagccagctgtggttatatcgacatcttcaggaagccattattttcatcgactgttcgggtgccagcatgtgtgaggtgcagaaagtggaagcagcttatagacatgcagccgaggttcatcctaaccatccaagtattgaacttatcagaacaaacaccgacggaatggcctcctcctcatctgaccatcccaacacagagcccaggaattgatgactcggtttgtcagatccttccaacccagcagcaggtaaatgtgagttgcttaagtaccaagagagaggtcctgttcagcaagatgattagaagcattggcatggcttgttaattagattcgcggttcttagtctaaaatcacattgaagagggagacggacccaagtgatgcagttcatctgttatctgtatcagtctctatttttataagctgtcatatattttctcgaaactatcttgtgttgattttgtgtgatgtgtacttttaatggcacgggccatgtattttccttggaaacgaccatgtggacttaatttttcccccattttctttcctgagatgggctgtgtatttgcttgaaagataaggatggtattatctttgtattgaactctaaatgcttaaatgaaggatcatccgga

SEQ ID NO: 37305 - protein, 513 aa, Zea mays subsp. mays
TGVPRSDCKLRRLAVRNQHVQRFPEETMDMPEVLRSLSITDYNIAVMAPIDSFRVCRVLHIENNYVPINLKHLGKLLHLKFLQISGTTIDELPREIGHLRSLQTLILADTGLDELPPAVCSLTRLMCLIALEFERLPADRMGNLTSLEELRLHRVVGRSATQALVAELGKLTRLRVVSIAFSEQLEESLQEAFVQSLSNLRGLQELALLFKMPQRVSDMWGDWEPPRQLRRLIIKGIDFSRQPRWISRSCLPRLCSLSLVVYALEAQDLDNLARLPELQYLTLDGLSWPPRYTVGPDDFRNLRFCDVSTTFEFRKGAMPRLEVLHFGVYAGYWSWEKNGVPFEQFPTKDVIEDLDLDLDNVLLLQQVMVKVDCSGATAAQVEEVEAVVMRAVENHANRPTIVMDRVYEQNILSDEEREALLWRHIEEDCCVRTMKDKSDAFFISQLWLYRHLQEAIIFIDCSGASMCEVQKVEAAYRHAAEVHPNHPSIELIRTNTDGMASSSSDHPNTEPRN

SEQ ID NO: 37306 - protein, 486 aa, Zea mays subsp. mays
MDMPEVLRSLSITDYNIAVMAPIDSFRVCRVLHIENNYVPINLKHLGKLLHLKFLQISGTTIDELPREIGHLRSLQTLILADTGLDELPPAVCSLTRLMCLIALEFERLPADRMGNLTSLEELRLHRVVGRSATQALVAELGKLTRLRVVSIAFSEQLEESLQEAFVQSLSNLRGLQELALLFKMPQRVSDMWGDWEPPRQLRRLIIKGIDFSRQPRWISRSCLPRLCSLSLVVYALEAQDLDNLARLPELQYLTLDGLSWPPRYTVGPDDFRNLRFCDVSTTFEFRKGAMPRLEVLHFGVYAGYWSWEKNGVPFEQFPTKDVIEDLDLDLDNVLLLQQVMVKVDCSGATAAQVEEVEAVVMRAVENHANRPTIVMDRVYEQNILSDEEREALLWRHIEEDCCVRTMKDKSDAFFISQLWLYRHLQEAIIFIDCSGASMCEVQKVEAAYRHAAEVHPNHPSIELIRTNTDGMASSSSDHPNTEPRN

SEQ ID NO: 37307 - protein, 484 aa, Zea mays subsp. mays
MPEVLRSLSITDYNIAVMAPIDSFRVCRVLHIENNYVPINLKHLGKLLHLKFLQISGTTIDELPREIGHLRSLQTLILADTGLDELPPAVCSLTRLMCLIALEFERLPADRMGNLTSLEELRLHRVVGRSATQALVAELGKLTRLRVVSIAFSEQLEESLQEAFVQSLSNLRGLQELALLFKMPQRVSDMWGDWEPPRQLRRLIIKGIDFSRQPRWISRSCLPRLCSLSLVVYALEAQDLDNLARLPELQYLTLDGLSWPPRYTVGPDDFRNLRFCDVSTTFEFRKGAMPRLEVLHFGVYAGYWSWEKNGVPFEQFPTKDVIEDLDLDLDNVLLLQQVMVKVDCSGATAAQVEEVEAVVMRAVENHANRPTIVMDRVYEQNILSDEEREALLWRHIEEDCCVRTMKDKSDAFFISQLWLYRHLQEAIIFIDCSGASMCEVQKVEAAYRHAAEVHPNHPSIELIRTNTDGMASSSSDHPNTEPRN

SEQ ID NO: 37308 - DNA, 721 bp, Zea mays subsp. mays
gatagagagagagagagagagtttagttagagagaaaaaaatggcgagattcacggtgctgattacggcggttgtgctagcttttctaatggcggcgccgatgccaggagtgacggccaagaagtatacagtcggcgagaacaagttttggaaccccaacattaactacaccatctgggctcagggcaagcatttctacctcggagactggctctatttcgtgttcgacagaaaccagcacaatattcttgaagtgaacaagactgactatgaaggatgtatcgccgaccacccaatacgcaactggacacgtggagctgggagagacattgtcactctcaaccagaccaagcattactaccttctcgacggaaagggtggatgttacggtggcatgaagctatctgttaaagtagagaagcttcctcctccaccaaaatctgcacctgtcaagaacattggatcggtttcaatggtcacaggtctcgctcaattcatgattccggtatctctattcgctttccctgcaatgtgggatgtgatctcaaggatgtggtagtagtcaccagtcttcaaagttctttagttgaatcgaaaccgacctcaaaaattcttttcagggaaacctttttaatttagttgagtttctcttttctctttgtaatgttggattgttggttttcctttaatcttttgcctttgaattgattgttaaagaaag

SEQ ID NO: 37309 - protein, 185 aa, Zea mays subsp. mays
IERERESLVREKKMARFTVLITAVVLAFLMAAPMPGVTAKKYTVGENKFWNPNINYTIWAQGKHFYLGDWLYFVFDRNQHNILEVNKTDYEGCIADHPIRNWTRGAGRDIVTLNQTKHYYLLDGKGGCYGGMKLSVKVEKLPPPPKSAPVKNIGSVSMVTGLAQFMIPVSLFAFPAMWDVISRMW

SEQ ID NO: 37310 - protein, 172 aa, Zea mays subsp. mays
MARFTVLITAVVLAFLMAAPMPGVTAKKYTVGENKFWNPNINYTIWAQGKHFYLGDWLYFVFDRNQHNILEVNKTDYEGCIADHPIRNWTRGAGRDIVTLNQTKHYYLLDGKGGCYGGMKLSVKVEKLPPPPKSAPVKNIGSVSMVTGLAQFMIPVSLFAFPAMWDVISRMW

SEQ ID NO: 37311 - protein, 156 aa, Zea mays subsp. mays
MAAPMPGVTAKKYTVGENKFWNPNINYTIWAQGKHFYLGDWLYFVFDRNQHNILEVNKTDYEGCIADHPIRNWTRGAGRDIVTLNQTKHYYLLDGKGGCYGGMKLSVKVEKLPPPPKSAPVKNIGSVSMVTGLAQFMIPVSLFAFPAMWDVISRMW

SEQ ID NO: 37312 - DNA, 1943 bp, Zea mays subsp. mays
gcgggccatacgagccacttgtgctctcgctgcctggagagcaccctgtcgtccaggtgcccccatcaataaattgcaggctacttgcgcatcagagggacggtgtgagattcttatacaatttgtatagaaacaatcatggcggtgttcttggagatgacatgggtttggggaagaccattcaaactattgcttttttgtcttctgttattggaaaaggcaatggccatgggcaatcaacaaacaaaggaaagatgactggtcctgtactcatcctctgccctacttcggtgatccggaactgggaaaatgaattttccgagtgggcagaattctctgttgctgtctatcatggtccaaatcgtgatttagttcttggaaaaattgaaaatcaaggactggaggtactcattaccagttttgacactttcagaattcatgataaggttttatgtggtatctcgtgggaacttgtggttgttgatgaggcacatcgtctcaagaatgaaaagtccaagttatatacagcatgcttggggataacaactcaaaagcggtttggtctcacggggaccataatgcagaataagatcatggaattatttaatctatttgactgggtcgtgcctggctgcttaggggaccgagaacactttcgagcttattatgatgagcctctaaaacagggtcagaggctaagtgctcctgagagatttgttcaagttgctgatgcgcgcaagaagcaccttgtttccattcttagggaattcttattgagaaggacaaaagaggagacaattggacatcttatgcttgggaaggaggataatattgttttctgcaaaatgagtgacgttcaaaaacgtgtttatagaagaatgctgcaacaacctgatatacaaatccttattaataaggatgtccgctgtagctgtggaagtcctttacctcaggttgaatgttgcaagagaactgaaccagatggtgttatatggtcttatcttcacagagagaaccctgaaggctgttctatatgccccttctgtcttgttcttcctttcctcgtcaagcttcagcagattagcaaccatctggagctgataaaacctaatccaaaggatgagcttgaaaagcagaagaaagatgctgaacttgcagctgctgtctttggtgcagatattgacttagttggtggtactgctaaaagtgagaacttcatgggtctcagtgatgctgagaactgtggaaagatgcgagcactagaaaggcttctgtcactatggactggacagggtgacaagattcttcttttcagttattctgtcaggatgcttgacatactagagaagtttctcataaggaagggttattgcttttcacgcttcgatggaacaactccgatgaatgcacgccaatcactagtggatgagttcaacagaagccctagcaaacaggttttccttatatctactcgagcaggtaatttaggtgtaaaccttgttagtgctaaccgcgtggtgatatttgatccaagttggaaccctgcccaagacttgcaagcacaagacagatcatttcggtatggacagagacggcatgttacagtatttcgcctacttggtgccggttcacttgaagagctcatttattctaggcaaatatataaacagcagctttccaacattgcagtctctggaaaaatagagaggcgttactttgaaggtgtgcaggtattttcttagccatggaagtgaaagaaacgcgacaccaggatattaaattgcttgtcttgacctctagtatcaatgggttgtatatttatataggaagaaaccgctaataacaagaggaatcctactcggttataacatcctaaccaaaaaaaaaaaaaaaaaaactcgagggggggcccggtacccaattcggtgttaaacacaataaag

SEQ ID NO: 37313 - protein, 579 aa, Zea mays subsp. mays
GPYEPLVLSLPGEHPVVQVPPSINCRLLAHQRDGVRFLYNLYRNNHGGVLGDDMGLGKTIQTIAFLSSVIGKGNGHGQSTNKGKMTGPVLILCPTSVIRNWENEFSEWAEFSVAVYHGPNRDLVLGKIENQGLEVLITSFDTFRIHDKVLCGISWELVVVDEAHRLKNEKSKLYTACLGITTQKRFGLTGTIMQNKIMELFNLFDWVVPGCLGDREHFRAYYDEPLKQGQRLSAPERFVQVADARKKHLVSILREFLLRRTKEETIGHLMLGKEDNIVFCKMSDVQKRVYRRMLQQPDIQILINKDVRCSCGSPLPQVECCKRTEPDGVIWSYLHRENPEGCSICPFCLVLPFLVKLQQISNHLELIKPNPKDELEKQKKDAELAAAVFGADIDLVGGTAKSENFMGLSDAENCGKMRALERLLSLWTGQGDKILLFSYSVRMLDILEKFLIRKGYCFSRFDGTTPMNARQSLVDEFNRSPSKQVFLISTRAGNLGVNLVSANRVVIFDPSWNPAQDLQAQDRSFRYGQRRHVTVFRLLGAGSLEELIYSRQIYKQQLSNIAVSGKIERRYFEGVQVFS

SEQ ID NO: 37314 - protein, 526 aa, Zea mays subsp. mays
MGLGKTIQTIAFLSSVIGKGNGHGQSTNKGKMTGPVLILCPTSVIRNWENEFSEWAEFSVAVYHGPNRDLVLGKIENQGLEVLITSFDTFRIHDKVLCGISWELVVVDEAHRLKNEKSKLYTACLGITTQKRFGLTGTIMQNKIMELFNLFDWVVPGCLGDREHFRAYYDEPLKQGQRLSAPERFVQVADARKKHLVSILREFLLRRTKEETIGHLMLGKEDNIVFCKMSDVQKRVYRRMLQQPDIQILINKDVRCSCGSPLPQVECCKRTEPDGVIWSYLHRENPEGCSICPFCLVLPFLVKLQQISNHLELIKPNPKDELEKQKKDAELAAAVFGADIDLVGGTAKSENFMGLSDAENCGKMRALERLLSLWTGQGDKILLFSYSVRMLDILEKFLIRKGYCFSRFDGTTPMNARQSLVDEFNRSPSKQVFLISTRAGNLGVNLVSANRVVIFDPSWNPAQDLQAQDRSFRYGQRRHVTVFRLLGAGSLEELIYSRQIYKQQLSNIAVSGKIERRYFEGVQVFS

SEQ ID NO: 37315 - protein, 495 aa, Zea mays subsp. mays
MTGPVLILCPTSVIRNWENEFSEWAEFSVAVYHGPNRDLVLGKIENQGLEVLITSFDTFRIHDKVLCGISWELVVVDEAHRLKNEKSKLYTACLGITTQKRFGLTGTIMQNKIMELFNLFDWVVPGCLGDREHFRAYYDEPLKQGQRLSAPERFVQVADARKKHLVSILREFLLRRTKEETIGHLMLGKEDNIVFCKMSDVQKRVYRRMLQQPDIQILINKDVRCSCGSPLPQVECCKRTEPDGVIWSYLHRENPEGCSICPFCLVLPFLVKLQQISNHLELIKPNPKDELEKQKKDAELAAAVFGADIDLVGGTAKSENFMGLSDAENCGKMRALERLLSLWTGQGDKILLFSYSVRMLDILEKFLIRKGYCFSRFDGTTPMNARQSLVDEFNRSPSKQVFLISTRAGNLGVNLVSANRVVIFDPSWNPAQDLQAQDRSFRYGQRRHVTVFRLLGAGSLEELIYSRQIYKQQLSNIAVSGKIERRYFEGVQVFS

SEQ ID NO: 37316 - DNA, 982 bp, Zea mays subsp. mays
atcaaatccatctcccactcttctagcatcttgaagcttaaatctcagccgtccgatcatgccgatcagaaacatcgccattggccgtccagatgaagcaacccgtcccgatgccttaaaggcggcgttggctgagttcatttcaactttgatctttgtcgtcgccggttcaggctctggcatggctttcaacaagctcactgaaaacggagccaccactccttctggtctcgtagctgctgcactggctcatgcctttggactcttcgtcgctgtctcagttggtgccaacatctctggtggacacgttaaccctgccgtcactttcggtgctttcattggtggtaacatcactctcctccgtggtatcctctactggattgctcagcttctcggctccgtcgtcgcttgcctcatccttaaattcgccaccggtggcttggctgtgccggcttttggtctctctgctggagtaggagtgttgaacgctttcgttttcgagatcgtgatgacattcgggcttgtttacaccgtctacgctacagccattgaccccaaaaacgggagtcttggaacaattgctcccatcgcaatcggtttcattgttggagccaacatcttagctggaggagctttctctggagcctccatgaatcccgccgtggctttcggaccagcggtggtgagctggacatggaccaaccactgggtctactgggccggacctctcgtcggcggtggaatcgctggactcatctacgaagttttcttcatcaacaccacgcacgagcagctcccaaccacagactactgaattaatctctctttttctctcttgtgtaattttattcgactttgaatttgaattttaatgtctttttaatttccgtttgtgtaatttcgaatcatcaaggggtttatgatcgttcgatcttttagatgaaaaaaaaaaaaaaaaaaaactcgagggggggcccggtac

SEQ ID NO: 37317 - protein, 251 aa, Zea mays subsp. mays
MPIRNIAIGRPDEATRPDALKAALAEFISTLIFVVAGSGSGMAFNKLTENGATTPSGLVAAALAHAFGLFVAVSVGANISGGHVNPAVTFGAFIGGNITLLRGILYWIAQLLGSVVACLILKFATGGLAVPAFGLSAGVGVLNAFVFEIVMTFGLVYTVYATAIDPKNGSLGTIAPIAIGFIVGANILAGGAFSGASMNPAVAFGPAVVSWTWTNHWVYWAGPLVGGGIAGLIYEVFFINTTHEQLPTTDY

SEQ ID NO: 37318 - protein, 210 aa, Zea mays subsp. mays
MAFNKLTENGATTPSGLVAAALAHAFGLFVAVSVGANISGGHVNPAVTFGAFIGGNITLLRGILYWIAQLLGSVVACLILKFATGGLAVPAFGLSAGVGVLNAFVFEIVMTFGLVYTVYATAIDPKNGSLGTIAPIAIGFIVGANILAGGAFSGASMNPAVAFGPAVVSWTWTNHWVYWAGPLVGGGIAGLIYEVFFINTTHEQLPTTDY

SEQ ID NO: 37319 - DNA, 1206 bp, Zea mays subsp. mays
gatttcaatctttgagataaaccacaaagatcctccgattcgaaggtttataaaaactcaaaatcgaatcttatccacaagaaaacaacaaggtacttttccaaaaatgaaggcggagttgaatttgccggcgggattccgatttcatccgacggacgaagagcttgtcaagttctatctttgccggagatgtgcgtcagaaccgattaacgttccggttatcgcagagattgacttgtacaaattcaatccatgggagcttccagaaatggcgttgtacggtgagaaagaatggtacttcttctcgcatagagaccggaaatacccaaacgggtcgagaccaaaccgggcagctggaaccggttattggaaagcgactggagctgataaaccgatcggaaaaccgaagacgtttagggattaagaaagcactcgtcttctacgcaggaaaagctccgaaagggattaaaacgaattggattatgcacgagtatcgtctcgctaatgtcgatcgatctgcttctaccaacaagaagaacaacttaagacttgatgattgggttttgtgtcggatatacaataagaaaggaacaatggagaagtatttaccggcggcggctgagaaaccgacggaaaagatgagtacgtcggactcaagatgctcaagtcacgtgatttcaccggacgtcacgtgttctgataactgggaggttgagagtgagcccaaatggattaatctggaagacgcgttagaggcatttaatgatgacacgtccatgtttagttccattggtttgttgcaaaatgacgcctttgttcctcagtttcagtaccagtcctccgatttcgtcgattcgtttcaggacccgttcgagcagaaaccgttcttgaattggaattttgctcctcaagggtaaaaataatcggcaaaaagttgaagcttttcagagtcttcgatcaccggcattgtgtcggatcctgacccggagaccaagtcgggtcatacgattacataatcgggttattgagatttccacatttggatttccgagactaaccaacttaacggattctggggtaattggggggttttgcacaggtgaatcacactgagtcagcaagtttcgattttttggttttgttttgtaatgattgattaaatgtctaaagatatcacgaagtagatacagaagaacttaaaagcaa

SEQ ID NO: 37320 - protein, 144 aa, Zea mays subsp. mays
MHEYRLANVDRSASTNKKNNLRLDDWVLCRIYNKKGTMEKYLPAAAEKPTEKMSTSDSRCSSHVISPDVTCSDNWEVESEPKWINLEDALEAFNDDTSMFSSIGLLQNDAFVPQFQYQSSDFVDSFQDPFEQKPFLNWNFAPQG

SEQ ID NO: 37321 - protein, 140 aa, Zea mays subsp. mays
ISIFEINHKDPPIRRFIKTQNRILSTRKQQGTFPKMKAELNLPAGFRFHPTDEELVKFYLCRRCASEPINVPVIAEIDLYKFNPWELPEMALYGEKEWYFFSHRDRKYPNGSRPNRAAGTGYWKATGADKPIGKPKTFRD

SEQ ID NO: 37322 - protein, 107 aa, Zea mays subsp. mays
MEKYLPAAAEKPTEKMSTSDSRCSSHVISPDVTCSDNWEVESEPKWINLEDALEAFNDDTSMFSSIGLLQNDAFVPQFQYQSSDFVDSFQDPFEQKPFLNWNFAPQG

SEQ ID NO: 37323 - DNA, 1233 bp, Zea mays subsp. mays
accattacctagaacatcctaatcgaaaagaaaaaaaaatccgccttctcctcccagtcgcaggccaggctcagcctcccctctcccctcctcggcatcttcgccgccggcgatctatctctctcacaatggcggcgcccatgtcagccatcgactcagcgtggcagctcctgatcgccaacttcaccgagttccagctcgccaccgtcgtcaccttcctgctccacgagaccgtcttcttcctctccggcctcccctccctcctcttcgagcgcttcggactcttcgccaagtacaagatccagaagaagagcaacacctctgcttaccaaaacagatgtgtcttgcgcctcattctctaacatgtatgtgtgaacctgcctgtcatgattttctcgtatcctgccttcaaattcatgggtctcaggagctctcttcctttgccacattggtcggttgttgtatctcaagttcttttctactttgtccttgaggattttatattctattgggggcacagggcattgcatacgaaatggctatacaaacacgttcacagcgtccaccatgagtacgccacaccctttggtttaacatcggaatatgcccacccagctgaaattttgttcctgggattcgccacagttgttggtcctgctcttactggccctcatctcttcaccctgtggctgtggatggtgttgagggttttggagacagttgaagctcacagcggctatcacttcccatggagcccatcaaatttcctgccgctgtatggcggctcggacttccatgactaccatcaccgtgtgctgtacacaaagtcagggaactatgcctcaacatttgtttacatggactggttgttcggcacggacaaggattatcgcaaggcaaagaccattgaggagaaagaagggaaaaatctgtagattgtggaagctgctcagcaagactggcgatagagtttcactcatggaaggagatatggatgcaccctagaaacagtcagtttatctcctgaccatcgatactataggttgagatattgatttcctgtgtttgctatgatcaagaatgaggccctggtggccctggtctgtcatgaactgaatttgatgatttgtcatctcctcctggtggtttgctttgcgtttctttcgtgactcgacgggatgtatacatatggaatggcctggcagcagtaataaccatctgaattgagtcgtc

SEQ ID NO: 37324 - protein, 182 aa, Zea mays subsp. mays
MIFSYPAFKFMGLRSSLPLPHWSVVVSQVLFYFVLEDFIFYWGHRALHTKWLYKHVHSVHHEYATPFGLTSEYAHPAEILFLGFATVVGPALTGPHLFTLWLWMVLRVLETVEAHSGYHFPWSPSNFLPLYGGSDFHDYHHRVLYTKSGNYASTFVYMDWLFGTDKDYRKAKTIEEKEGKNL

SEQ ID NO: 37325 - protein, 172 aa, Zea mays subsp. mays
MGLRSSLPLPHWSVVVSQVLFYFVLEDFIFYWGHRALHTKWLYKHVHSVHHEYATPFGLTSEYAHPAEILFLGFATVVGPALTGPHLFTLWLWMVLRVLETVEAHSGYHFPWSPSNFLPLYGGSDFHDYHHRVLYTKSGNYASTFVYMDWLFGTDKDYRKAKTIEEKEGKNL

SEQ ID NO: 37326 - protein, 119 aa, Zea mays subsp. mays
HYLEHPNRKEKKIRLLLPVAGQAQPPLSPPRHLRRRRSISLTMAAPMSAIDSAWQLLIANFTEFQLATVVTFLLHETVFFLSGLPSLLFERFGLFAKYKIQKKSNTSAYQNRCVLRLIL

SEQ ID NO: 37327 - DNA, 890 bp, Zea mays subsp. mays
atccaccacactacaactcgacaccgagaaaagcgcagcaaagcaacgcaaagcccacgccgctacagtgctacagcgagcgagcctcttgcctgccgctacgagccaacgactcgaacgcatacactccaatggcagcgacggtgatggcctccatgagccccctcgcctccgccaccccaggcgcgcgtcgcgctttccctgtacggctgctgctccaggcatctgcgctcgcgccgcgccagcgcgccttggccgtgaccgtgagggcccagagcgacgacgccgaggccgagccaaaggaggaggcggcggcggccaccaccccggcgccaaagtccaaggcggcggcgacggcgagccccgggctgtgggacgcgctggcgttcagcggcccggctcccgagcgcatcaacggccgcctcgccatggtgggcttcgtgtcggcgctcgccgtcgaggcgtcccgcggcgggggcctcctctcgcaggccggcagcgggtccgggctcgcctggttcgcggccacggctgctgtgctgtccgtggcctcgctggtgccgctgctcaggggcgacagcgccgaggccaggagcggcgccgtcatgagcgccgacgccgagctctggaacggccgcttcgccatgctcggcctcgtcgcgctcgccttcactgagtacctcaccggcgcaccgttcatcaacgcgtagatgtgttgtgtattttggaactgtgtatgctagtcaggcagtcagctagcggcaccatgcgcgtagtaggagcctagctacagttggacgagctactttttattgggatttactagtcttgggccatttacttctcttcttattaaagtccactcataaatcagaaatccaattttatct

SEQ ID NO: 37328 - protein, 235 aa, Zea mays subsp. mays
PPHYNSTPRKAQQSNAKPTPLQCYSERASCLPLRANDSNAYTPMAATVMASMSPLASATPGARRAFPVRLLLQASALAPRQRALAVTVRAQSDDAEAEPKEEAAAATTPAPKSKAAATASPGLWDALAFSGPAPERINGRLAMVGFVSALAVEASRGGGLLSQAGSGSGLAWFAATAAVLSVASLVPLLRGDSAEARSGAVMSADAELWNGRFAMLGLVALAFTEYLTGAPFINA

SEQ ID NO: 37329 - protein, 224 aa, Zea mays subsp. mays
STTLQLDTEKSAAKQRKAHAATVLQRASLLPAATSQRLERIHSNGSDGDGLHEPPRLRHPRRASRFPCTAAAPGICARAAPARLGRDREGPERRRRGRAKGGGGGGHHPGAKVQGGGDGEPRAVGRAGVQRPGSRAHQRPPRHGGLRVGARRRGVPRRGPPLAGRQRVRARLVRGHGCCAVRGLAGAAAQGRQRRGQERRRHERRRRALERPLRHARPRRARLH

SEQ ID NO: 37330 - protein, 192 aa, Zea mays subsp. mays
MAATVMASMSPLASATPGARRAFPVRLLLQASALAPRQRALAVTVRAQSDDAEAEPKEEAAAATTPAPKSKAAATASPGLWDALAFSGPAPERINGRLAMVGFVSALAVEASRGGGLLSQAGSGSGLAWFAATAAVLSVASLVPLLRGDSAEARSGAVMSADAELWNGRFAMLGLVALAFTEYLTGAPFINA

SEQ ID NO: 37331 - DNA, 1241 bp, Zea mays subsp. mays
gcttctgattactacaagcagggatctcagccatatgatagccagccaccgagctaccctcctgggccagggaattacaacagttatggtcaatcacagggtcctaactatggccaacctcaatacccgcaacatgcgcctcagcagaactacagccatgggtatggtgatcctagatacaatgctccccctccgaaccagcagtactatggtcagccgccaatgggcccgcagcaaggctatcctcaacagccagatccctatgctaggcctccatacagtggacctggtcaatggcctaccaggggtgctccggctgcagatggctcttaccaggcgccagctgcatcttatgggccgccttctcagcacccttctgcttatgggcaaacgtacagtgcagcaactggatctgatggatatgctcaacaaggttacccacagcagggtgggcaggcaccagctccatatggtcagagtgcaccagcagctccaggctatcctcagcagcaaggtggctatgcacagtacccacagacccaaccagcatatggtgagcaagcagctcaaaccaatgcgagctatgggtaccagggagctccagcagatcctaactatggaagtgcctacccacagccaggatatggtcctcctggtcaggctactggtcaggctggttatgcctcctcagcagccagccagcctgcgtatggccaggcaggatacacccagccgcctacaaatcctccaggttatgagcagtctgcggcaccagcaacaacccagagcggctatgctgcgcccccagcaaatccacagcagcctgctgcagcaaaaggggtctcgccacagcctggtggtggtgctgctgcatatggtgctggtgggcagtggacagcatgaccctcctcgaacctcaaacatggctcgctggtagcaatatcgtgctcaatatttgcaccttccggatgcatccttggttatcggaagagattgtgtaactccttgattagtgatacttggcatctctgtagtagcacctactagtagttcgttggttaactgtgacaataaacatcctaattcctattcacttcgaatcaaacttcgcagcttgccaagtaatttttttggatttgtgtttattcatgtaaaatagttactggtttggctcacagaatgatgattctgtttctgcagttcaaaaaaaaaaaaaaaaaaaactcgagggggggcccggt

SEQ ID NO: 37332 - protein, 311 aa, Zea mays subsp. mays
LLITTSRDLSHMIASHRATLLGQGITTVMVNHRVLTMANLNTRNMRLSRTTAMGMVILDTMLPLRTSSTMVSRQWARSKAILNSQIPMLGLHTVDLVNGLPGVLRLQMALTRRQLHLMGRLLSTLLLMGKRTVQQLDLMDMLNKVTHSRVGRHQLHMVRVHQQLQAILSSKVAMHSTHRPNQHMVSKQLKPMRAMGTRELQQILTMEVPTHSQDMVLLVRLLVRLVMPPQQPASLRMARQDTPSRLQILQVMSSLRHQQQPRAAMLRPQQIHSSLLQQKGSRHSLVVVLLHMVLVGSGQHDPPRTSNMARW

SEQ ID NO: 37333 - protein, 300 aa, Zea mays subsp. mays
ASDYYKQGSQPYDSQPPSYPPGPGNYNSYGQSQGPNYGQPQYPQHAPQQNYSHGYGDPRYNAPPPNQQYYGQPPMGPQQGYPQQPDPYARPPYSGPGQWPTRGAPAADGSYQAPAASYGPPSQHPSAYGQTYSAATGSDGYAQQGYPQQGGQAPAPYGQSAPAAPGYPQQQGGYAQYPQTQPAYGEQAAQTNASYGYQGAPADPNYGSAYPQPGYGPPGQATGQAGYASSAASQPAYGQAGYTQPPTNPPGYEQSAAPATTQSGYAAPPANPQQPAAAKGVSPQPGGGAAAYGAGGQWTA

SEQ ID NO: 37334 - protein, 300 aa, Zea mays subsp. mays
MIASHRATLLGQGITTVMVNHRVLTMANLNTRNMRLSRTTAMGMVILDTMLPLRTSSTMVSRQWARSKAILNSQIPMLGLHTVDLVNGLPGVLRLQMALTRRQLHLMGRLLSTLLLMGKRTVQQLDLMDMLNKVTHSRVGRHQLHMVRVHQQLQAILSSKVAMHSTHRPNQHMVSKQLKPMRAMGTRELQQILTMEVPTHSQDMVLLVRLLVRLVMPPQQPASLRMARQDTPSRLQILQVMSSLRHQQQPRAAMLRPQQIHSSLLQQKGSRHSLVVVLLHMVLVGSGQHDPPRTSNMARW

SEQ ID NO: 37335 - DNA, 1035 bp, Zea mays subsp. mays
ataccgccgaaccaaatccaacgtccgcagaaaccacactcccgtcgaggaggaggcgtcgacttcccatagtttccattccacttcgatcctatcctatcgtccccaaacactccaccaagaacctttccccctccaatagtccgagttactcggaggaatccatgtgcggcggtgcaatcatcttggactacatcccggcgcggcgccgggtgtccgccgccgacttctggcctgactccgaagccgacgccgaggactccgactcgcacgcccctgaccctgagagagcgccgcgcccgcgcgggaaggcgaagcgtgggcgcaagaaccagtaccgcggcatccggcagcggccgtggggcaagtgggcggcggagatccgcgaccccgtgaagggcgtgcgcgtctggctcggcacctaccccaccgccgaggccgccgcgcgcgcgtacgaccgcgctgccaggcgcatcaggggcgccaaagctaaggtcaacttccccaacgagacctcctcctccagcgtcaccgcgccgacggcggcatctggggctgctgctgctgcacaggccccggccgttctcccggcgcccaaggtggaggcgcgcacgcaggtgtccgacgaggtcaaggagctgtccgaggagctaatggcctacgagaactacatgagctttctcggcgtcccgtacatggagggcgggaatgcagctgcaagtgccaccaccgctgccgctgccgccgtccccgaagaagcgcaggtgccggcgccagcgccagccgggctgtggagcttcgaggattactactacccgccgtcactgtcgctcttcactgaataatgaacgcggtttgccgtgtctgtgttgttatctcttttgtatctgtgtctcgcgagttgaggcatgtaaacaagctttgcagttttttttttaactccggtctgtgcttctcagcagctcgctgcagtgcagaggaatctgtttcattctgttcgtcgtgattgaaactagttttacggttacaacgcgc

SEQ ID NO: 37336 - protein, 280 aa, Zea mays subsp. mays
TAEPNPTSAETTLPSRRRRRLPIVSIPLRSYPIVPKHSTKNLSPSNSPSYSEESMCGGAIILDYIPARRRVSAADFWPDSEADAEDSDSHAPDPERAPRPRGKAKRGRKNQYRGIRQRPWGKWAAEIRDPVKGVRVWLGTYPTAEAAARAYDRAARRIRGAKAKVNFPNETSSSSVTAPTAASGAAAAAQAPAVLPAPKVEARTQVSDEVKELSEELMAYENYMSFLGVPYMEGGNAAASATTAAAAAVPEEAQVPAPAPAGLWSFEDYYYPPSLSLFTE

SEQ ID NO: 37337 - protein, 226 aa, Zea mays subsp. mays
MCGGAIILDYIPARRRVSAADFWPDSEADAEDSDSHAPDPERAPRPRGKAKRGRKNQYRGIRQRPWGKWAAEIRDPVKGVRVWLGTYPTAEAAARAYDRAARRIRGAKAKVNFPNETSSSSVTAPTAASGAAAAAQAPAVLPAPKVEARTQVSDEVKELSEELMAYENYMSFLGVPYMEGGNAAASATTAAAAAVPEEAQVPAPAPAGLWSFEDYYYPPSLSLFTE

SEQ ID NO: 37338 - DNA, 423 bp, Zea mays subsp. mays
  misc_feature (24)..(27): n is a, c, g, or t
tctgaggctaacgaagataaaacnnnnggagattttaacgaaatgggtagcaggttggctggggaggtagttgccttcctgaagaagaaaatgcataagctttcgagatatggaggctgcaaagagctgaagttaagtttcgcaggtcattccattggaaacgtcatcattacaagtgccctggcagaacctgcattgcaaccatacttgaagaacctttacacttacatgtcaatatcagggcctcacttgggtcactggtacagctcaaattctttgttcaattctggactctggctgctgaaaaagctcaagggtgcgcaatgcatccatcaactcactttcagtgatgatcaagacccccagaatacctacttttataagctttgcaagttgaaaacgttggagaacttccaaaatatc

SEQ ID NO: 37339 - protein, 141 aa, Zea mays subsp. mays
  misc_feature (8)..(9): Xaa can be any naturally occurring amino acid
SEANEDKXXGDFNEMGSRLAGEVVAFLKKKMHKLSRYGGCKELKLSFAGHSIGNVIITSALAEPALQPYLKNLYTYMSISGPHLGHWYSSNSLFNSGLWLLKKLKGAQCIHQLTFSDDQDPQNTYFYKLCKLKTLENFQNI

SEQ ID NO: 37340 - protein, 127 aa, Zea mays subsp. mays
MGSRLAGEVVAFLKKKMHKLSRYGGCKELKLSFAGHSIGNVIITSALAEPALQPYLKNLYTYMSISGPHLGHWYSSNSLFNSGLWLLKKLKGAQCIHQLTFSDDQDPQNTYFYKLCKLKTLENFQNI

SEQ ID NO: 37341 - protein, 111 aa, Zea mays subsp. mays
MHKLSRYGGCKELKLSFAGHSIGNVIITSALAEPALQPYLKNLYTYMSISGPHLGHWYSSNSLFNSGLWLLKKLKGAQCIHQLTFSDDQDPQNTYFYKLCKLKTLENFQNI

SEQ ID NO: 37342 - DNA, 740 bp, Zea mays subsp. mays
aaattcccaatcccaaccccaagtcacactccacctccgcaaccaaacgcgctagggtttccgcaccgcacctctagtcctccacccaccccaccccactaccggcgatggccaccgcggcggcacagggcggtagcgacaagccggcgctccggaagcccgtcttcaccaaggtcgaccagctcaagccgggcactaacgggcacaccctcaccgtcaaggtcgtcagcgccacccccgtgccgggccgcgcgcgcccgggcgcacccgccgccgcctcgtcccgcgcgccgcgcatcgccgagtgcctcgtcggagacgagaccggcgtcatcgtattcaccgcccgcaacgaccaagttgatttgctgaagcccgatgccacggtgatcttgcgcaatgccaaaatcgacatgttcaaaggatcaatgaggcttgcagtggacaaatgggggcggattgaggctacagagccagccagcttcacagtgaaggaagacaacaacttgtcccttgtagagtatgaattggttaacgtggctgaataaccgtcgaagcgtttctgcccccctttcttctttttcacgcacgccataagatgataagaaaacgaacagcatctcgaagctgagtttatttgttacggtggtcgataaggtcaaggcttctgctgttacacctttggatccaatccattaagatgaattacccttgcatctattgtaattgtgtggttatcc

SEQ ID NO: 37343 - protein, 146 aa, Zea mays subsp. mays
MATAAAQGGSDKPALRKPVFTKVDQLKPGTNGHTLTVKVVSATPVPGRARPGAPAAASSRAPRIAECLVGDETGVIVFTARNDQVDLLKPDATVILRNAKIDMFKGSMRLAVDKWGRIEATEPASFTVKEDNNLSLVEYELVNVAE

SEQ ID NO: 37344 - protein, 123 aa, Zea mays subsp. mays
KFPIPTPSHTPPPQPNALGFPHRTSSPPPTPPHYRRWPPRRHRAVATSRRSGSPSSPRSTSSSRALTGTPSPSRSSAPPPCRAARARAHPPPPRPARRASPSASSETRPASSYSPPATTKLIC

SEQ ID NO: 37345 - DNA, 584 bp, Zea mays subsp. mays
atcctaatcgaaaaatcagtgcagacagtcctgtcgacaccaaacggacggcccggagccggacagagcctaacccgatagatgtcaatactaacatctattcagttccaaacaccacagttcaaactgatgttccaaatgcttatcagccagggtcacaagtggaccagatgacatatttgaacggtagtgtcgtttatgggcctcatctgccgtacggttactcgactgaaagaagtgacttctattggaactcaaatgatgggacatgagaagatataaacacatgttcgatttatggcatatttggccttcaagttctaacaattcccgttatgattattgggtcaaatctattagcatgacccccatcttcttgtaattgtagttggcccaatctacaggaaacatctctgaaacaagggatgccaataggcaatactgcagttctattttctgtggcaactttgtcgttgtaatatagccatatcatgataatagcaccctcctcgatgtgcagctgtatgtaacatatatctctggcttggtggacgataaccgttaaccagtcacgttggtgcctc

SEQ ID NO: 37346 - protein, 89 aa, Zea mays subsp. mays
PNRKISADSPVDTKRTARSRTEPNPIDVNTNIYSVPNTTVQTDVPNAYQPGSQVDQMTYLNGSVVYGPHLPYGYSTERSDFYWNSNDGT

SEQ ID NO: 37347 - DNA, 687 bp, Zea mays subsp. mays
agactcatcatcagttcaattcaatccaatccaatccaatcccaccccgccccttccaagaactctagtatcaaccaaccgtccaacaaaagcaggagtcgcatccgaccccccgcatcagagacaggcagggagggaaccgagatccgtccgtccgtgtcgatggagtcaacggtggagcggataagctcgtcggtgcagtcctgggtgaaggaccacgagctcgcagccatcggaggcgtgtgggctgcggcggtgggcacttcggtggcgtacagccggaggaaggcgccgcagcggggcacgggcctgcgcctcatccacgccaggatgcacgcgcaggcgctcacgctcgccgtcctcggcggcgccgccctcttccactactacggcgacggcgggcgcaggaagagggccgacgacatcgacctcgacttctactcgcagctgccgccggccaccgacgccgacggcaacgagaaccagcggtggagctggtaggaggagaaggaagaactgtagcagactagcagtgggtgcttgcagcaataataattgaggtggggccctatgacgtggcgggcgggagggattagtctgtgctaatcctaatccatccagctcagacaagacgacgggcggcccgtttacttaacattatcggtccatgctgtcatggccggcacc

SEQ ID NO: 37348 - protein, 166 aa, Zea mays subsp. mays
RLIISSIQSNPIQSHPAPSKNSSINQPSNKSRSRIRPPASETGREGTEIRPSVSMESTVERISSSVQSWVKDHELAAIGGVWAAAVGTSVAYSRRKAPQRGTGLRLIHARMHAQALTLAVLGGAALFHYYGDGGRRKRADDIDLDFYSQLPPATDADGNENQRWSW

SEQ ID NO: 37349 - protein, 112 aa, Zea mays subsp. mays
MESTVERISSSVQSWVKDHELAAIGGVWAAAVGTSVAYSRRKAPQRGTGLRLIHARMHAQALTLAVLGGAALFHYYGDGGRRKRADDIDLDFYSQLPPATDADGNENQRWSW

SEQ ID NO: 37350 - DNA, 656 bp, Zea mays subsp. mays
tcccctattcagctattcgtgcacggagaagaagggaggcgaagagagggggcaccgtcggacggcggctcatcacgccatcggtagggtttcggcgatcccatggccaggcgccacctgcccctttcctgctcccgcgccgcgaccatccgcctcctccacttcaccacctcctcccgccacaccacctcctcggcgactacgacgactaccgctacccttcccgcctgccacccggccacccccgacatcttccaggagtcgccgccaccgcatctccgccattttgtgggccacggccacaacggcaccgatgtccccatgccacattgccaccccagccgcatgtggtggcatcgctggaggagcggcttggcgcggagatggacgaggcgcatgtgctgcttgcgcaggaccagcggttgacgcacatggcgctcgtgcaggaggtcgctgccgcgcggcgcgatctcggctgcaccgcgcacgagctcacctccgctcatgaggagagcgaccaatgccttcacgaatcacgaggcgtggtcactccccctcacgagcttacgggctgaatgcatcttcttttctatgcgttgcaattctgggtacttatctggaagcagcttgctccaattgaaccagaaattgaagtt

SEQ ID NO: 37351 - protein, 190 aa, Zea mays subsp. mays
PYSAIRARRRREAKRGGTVGRRLITPSVGFRRSHGQAPPAPFLLPRRDHPPPPLHHLLPPHHLLGDYDDYRYPSRLPPGHPRHLPGVAATASPPFCGPRPQRHRCPHATLPPQPHVVASLEERLGAEMDEAHVLLAQDQRLTHMALVQEVAAARRDLGCTAHELTSAHEESDQCLHESRGVVTPPHELTG

SEQ ID NO: 37352 - protein, 168 aa, Zea mays subsp. mays
PLFSYSCTEKKGGEERGHRRTAAHHAIGRVSAIPWPGATCPFPAPAPRPSASSTSPPPPATPPPRRLRRLPLPFPPATRPPPTSSRSRRHRISAILWATATTAPMSPCHIATPAACGGIAGGAAWRGDGRGACAACAGPAVDAHGARAGGRCRAARSRLHRARAHLRS

SEQ ID NO: 37353 - protein, 107 aa, Zea mays subsp. mays
MARRHLPLSCSRAATIRLLHFTTSSRHTTSSATTTTTATLPACHPATPDIFQESPPPHLRHFVGHGHNGTDVPMPHCHPSRMWWHRWRSGLARRWTRRMCCLRRTSG

SEQ ID NO: 37354 - DNA, 773 bp, Zea mays subsp. mays
attacctagaacatcctaatcgaaaactctcaaatatctctcaccacctctaccctcagcttctccccacctttggtcaggcaggctcaggcaaagggggcggccaacaaggacgagcgatggcgaccaaggtcatctgcttcctgttgctcgcatccctgctcctcgccgtcgcctttcccgtgtctgctctgcggcagcaggtgaagaagggcggcggcggaggcggaggcggaggcagtgttagcggaagcggaggcggcaacctgaatccctgggagtgctcgcccaagtgcgggtcgcggtgctccaagacgcagtacaggaaggcctgcctcaccttatgtaacaagtgctgcgccaagtgcctctgcgtgccaccggggttctacggcaacaagggcgcctgcccctgctacaacaactggaaaaccaaggaaggagggcccaagtgcccctagaagatccaccgcagctcccgtccgccattgtcccctcttctccgaatctggaacgtgttgttcatcttggaccaccccctaggcttggcattttattactagtataatgctagtgtccgcccattgcttaatctggaatgctaccagccagatctccatgctctcctgtgagccactcggcagagtgaggattactaggtagggtggcatgtcatgtgctccaccctccactggtacgagtcaatcaactaaagctacccccggattgatgaggaacatcccgcgcgattagtggggcatgtcattacattc

SEQ ID NO: 37355 - protein, 152 aa, Zea mays subsp. mays
YLEHPNRKLSNISHHLYPQLLPTFGQAGSGKGGGQQGRAMATKVICFLLLASLLLAVAFPVSALRQQVKKGGGGGGGGGSVSGSGGGNLNPWECSPKCGSRCSKTQYRKACLTLCNKCCAKCLCVPPGFYGNKGACPCYNNWKTKEGGPKCP

SEQ ID NO: 37356 - protein, 113 aa, Zea mays subsp. mays
MATKVICFLLLASLLLAVAFPVSALRQQVKKGGGGGGGGGSVSGSGGGNLNPWECSPKCGSRCSKTQYRKACLTLCNKCCAKCLCVPPGFYGNKGACPCYNNWKTKEGGPKCP

SEQ ID NO: 37357 - DNA, 633 bp, Zea mays subsp. mays
gctcccccaaattcgtttgtttcccacggcgcaagaaagaaacaagggtacaagaacagcccgctaaaggaaagaaacaagggctacacaagaacagcttgagagctcctctccgatcccgacccaccgcctgcaactcttcttctctcctacgtgttcgtcagcccgctaagtgttaagatggcttcaagtgatggtcaaacagaagctgcggccccatctgtccccaaaaaccctgctatggcatcatgccggaagaagaaaacagatgatgctaccttcctcgaagatctgaaagaccacatcgatgagttcatccatgcctccatggatgagcacaagacctgctttaagaagacgatccagaagatgtttgggatgtcgaaggctgttgcagagagatccgcggcagaagcgaaggaagctggagttgaaagtgctttgccacttcagaccagtgtctcgcagtagaatttcacgttggtagtttcttgcttgacgccggcctttttttatacaagggttttgttgctctgtgttgtctgaaacgtataagcgtctcagtggcatgttttcataactgtattgtagtgctttcatcattctccgaagtttgttgtgtgagtatgcctt

SEQ ID NO: 37358 - protein, 96 aa, Zea mays subsp. mays
MASSDGQTEAAAPSVPKNPAMASCRKKKTDDATFLEDLKDHIDEFIHASMDEHKTCFKKTIQKMFGMSKAVAERSAAEAKEAGVESALPLQTSVSQ

SEQ ID NO: 37359 - protein, 76 aa, Zea mays subsp. mays
MASCRKKKTDDATFLEDLKDHIDEFIHASMDEHKTCFKKTIQKMFGMSKAVAERSAAEAKEAGVESALPLQTSVSQ

SEQ ID NO: 37360 - protein, 59 aa, Zea mays subsp. mays
MSSSMPPWMSTRPALRRRSRRCLGCRRLLQRDPRQKRRKLELKVLCHFRPVSRSRISRW

SEQ ID NO: 37361 - DNA, 1253 bp, Zea mays subsp. mays
atatgttcatccattgtattcttccgatttaaactgaaaagcttaggtgacgtacgttgtcccttcgtttgaaggtcaagatcatcagatacgcgccttgcggggagatcgtcaagcacgcatcggtgccgtacaatctcactgaagataacggttggggcctagagatctttgaagtcaagaggtgcttggaagaggctcgttcggctggcctcactgttagagctatggtggtaataaatcccggcaaccctactggacaggtgctatccgtcacaaaccaggaggagatagtagagttttgtcggaaggaaggtctggttatacttgctgatgaggtataccaggaaaatatctacgcagagaacaagaagttccattccttcaagaaagtggccagatcacttgcttacgacgaaaatgacctcaccctagtatcacttcattccgtttcaatgagctatggggagagtggcagaagaggaggctacatggaggtgtctggtgttgcagctaatgtgaaggatcagatttacaaggtggcttctttaacactctgccccaacattgctggccagattctcgtcagccttgcaatggatccaccgaagctaggagatgaatctttcgagtcatttgataaggagaaggaacagatccgttcatccttctgcaagcgagccaagaccctggagaaagctttcagcggcctggagggcgtgacttgcaacaagttagagggtgcgctgtacttgttcccacggctccacctcccctccgctgcgatcagggccgccgatttcgagggagtttcacctgacatattctacgctcaccgcctgcttgatgccaccgggattgccgttgtgccgggctctgggttccaccaggcctctgggacgatccatatccgatgcacgatccttcctgacgaaagaaaaatcgaggcgatggtcgcacgcttgagggcgttccataaggcgttcatgaacgagttccggggctctcagcaggtcatgaacgatctccgtcgctgatggtgtcgatgcatggcacggttaggcctgtgcgtgtgcccatgggcaatcaagacaacttctgagctctggagttgttgtttgttgttctgtgttcttgcttcctcgttgagctgtgcccgtttgtcctcacttatgcagtcagtggtctgtctgtagtctgtactgcttaaagataagctgtgctttcaggaataaaaagtctgcagcttgtgc

SEQ ID NO: 37362 - protein, 269 aa, Zea mays subsp. mays
MVVINPGNPTGQVLSVTNQEEIVEFCRKEGLVILADEVYQENIYAENKKFHSFKKVARSLAYDENDLTLVSLHSVSMSYGESGRRGGYMEVSGVAANVKDQIYKVASLTLCPNIAGQILVSLAMDPPKLGDESFESFDKEKEQIRSSFCKRAKTLEKAFSGLEGVTCNKLEGALYLFPRLHLPSAAIRAADFEGVSPDIFYAHRLLDATGIAVVPGSGFHQASGTIHIRCTILPDERKIEAMVARLRAFHKAFMNEFRGSQQVMNDLRR

SEQ ID NO: 37363 - protein, 193 aa, Zea mays subsp. mays
MSYGESGRRGGYMEVSGVAANVKDQIYKVASLTLCPNIAGQILVSLAMDPPKLGDESFESFDKEKEQIRSSFCKRAKTLEKAFSGLEGVTCNKLEGALYLFPRLHLPSAAIRAADFEGVSPDIFYAHRLLDATGIAVVPGSGFHQASGTIHIRCTILPDERKIEAMVARLRAFHKAFMNEFRGSQQVMNDLRR

SEQ ID NO: 37364 - protein, 181 aa, Zea mays subsp. mays
MEVSGVAANVKDQIYKVASLTLCPNIAGQILVSLAMDPPKLGDESFESFDKEKEQIRSSFCKRAKTLEKAFSGLEGVTCNKLEGALYLFPRLHLPSAAIRAADFEGVSPDIFYAHRLLDATGIAVVPGSGFHQASGTIHIRCTILPDERKIEAMVARLRAFHKAFMNEFRGSQQVMNDLRR

SEQ ID NO: 37365 - DNA, 360 bp, Zea mays subsp. mays
  misc_feature (6)..(6): n is a, c, g, or t
  misc_feature (11)..(11): n is a, c, g, or t
  misc_feature (27)..(27): n is a, c, g, or t
  misc_feature (36)..(38): n is a, c, g, or t
  misc_feature (42)..(43): n is a, c, g, or t
  misc_feature (50)..(50): n is a, c, g, or t
  misc_feature (58)..(59): n is a, c, g, or t
  misc_feature (62)..(62): n is a, c, g, or t
  misc_feature (64)..(64): n is a, c, g, or t
  misc_feature (66)..(66): n is a, c, g, or t
  misc_feature (73)..(74): n is a, c, g, or t
  misc_feature (89)..(89): n is a, c, g, or t
  misc_feature (91)..(91): n is a, c, g, or t
  misc_feature (103)..(103): n is a, c, g, or t
  misc_feature (121)..(121): n is a, c, g, or t
  misc_feature (126)..(126): n is a, c, g, or t
  misc_feature (133)..(133): n is a, c, g, or t
  misc_feature (139)..(139): n is a, c, g, or t
  misc_feature (147)..(147): n is a, c, g, or t
  misc_feature (155)..(155): n is a, c, g, or t
  misc_feature (158)..(158): n is a, c, g, or t
  misc_feature (173)..(173): n is a, c, g, or t
  misc_feature (180)..(180): n is a, c, g, or t
  misc_feature (183)..(183): n is a, c, g, or t
  misc_feature (187)..(188): n is a, c, g, or t
  misc_feature (191)..(191): n is a, c, g, or t
  misc_feature (196)..(196): n is a, c, g, or t
  misc_feature (200)..(201): n is a, c, g, or t
  misc_feature (206)..(206): n is a, c, g, or t
  misc_feature (212)..(212): n is a, c, g, or t
  misc_feature (215)..(215): n is a, c, g, or t
  misc_feature (220)..(220): n is a, c, g, or t
  misc_feature (226)..(227): n is a, c, g, or t
  misc_feature (229)..(229): n is a, c, g, or t
  misc_feature (288)..(289): n is a, c, g, or t
aaccgngtcantcgatggcatccgcgncgtagaagnnngaanncggtaanaacgaganngcncncntggggannactatattttcgctncntatgctccttgntctttctgcatgtgtctnctcgngcgactntttccntcagtgcncaccagcnccnatagcttcgcttctntcccccntancttnngtnaatgntagnntcagnatgggnaangccanctcttnnancctataggctccaacgagcgaatcgcagcgagcaacatacctttatcacccttgtttcnncaatcgccagccctatctttggtgcagtcattggtaccaaccatcagggcacagcagctgcagcaactcgg

SEQ ID NO: 37366 - protein, 56 aa, Zea mays subsp. mays
  misc_feature (2)..(3): Xaa can be any naturally occurring amino acid
  misc_feature (5)..(5): Xaa can be any naturally occurring amino acid
  misc_feature (7)..(8): Xaa can be any naturally occurring amino acid
  misc_feature (10)..(10): Xaa can be any naturally occurring amino acid
  misc_feature (12)..(13): Xaa can be any naturally occurring amino acid
  misc_feature (32)..(33): Xaa can be any naturally occurring amino acid
MXXSXWXXPXLXXYRLQRANRSEQHTFITLVXXIASPIFGAVIGTNHQGTAAAATR

SEQ ID NO: 37367 - protein, 53 aa, Zea mays subsp. mays
  misc_feature (2)..(2): Xaa can be any naturally occurring amino acid
  misc_feature (4)..(4): Xaa can be any naturally occurring amino acid
  misc_feature (9)..(9): Xaa can be any naturally occurring amino acid
  misc_feature (12)..(15): Xaa can be any naturally occurring amino acid
  misc_feature (17)..(17): Xaa can be any naturally occurring amino acid
  misc_feature (20)..(22): Xaa can be any naturally occurring amino acid
  misc_feature (25)..(25): Xaa can be any naturally occurring amino acid
  misc_feature (30)..(31): Xaa can be any naturally occurring amino acid
  misc_feature (35)..(35): Xaa can be any naturally occurring amino acid
  misc_feature (41)..(42): Xaa can be any naturally occurring amino acid
  misc_feature (45)..(45): Xaa can be any naturally occurring amino acid
  misc_feature (47)..(47): Xaa can be any naturally occurring amino acid
  misc_feature (49)..(49): Xaa can be any naturally occurring amino acid
  misc_feature (52)..(53): Xaa can be any naturally occurring amino acid
NXVXRWHPXRRXXXXVXTRXXXWGXLYFRXXCSLXFLHVSXXATXSXSXHQXX

SEQ ID NO: 37368 - protein, 47 aa, Zea mays subsp. mays
  misc_feature (4)..(4): Xaa can be any naturally occurring amino acid
  misc_feature (10)..(10): Xaa can be any naturally occurring amino acid
  misc_feature (12)..(12): Xaa can be any naturally occurring amino acid
  misc_feature (14)..(14): Xaa can be any naturally occurring amino acid
  misc_feature (16)..(16): Xaa can be any naturally occurring amino acid
  misc_feature (19)..(19): Xaa can be any naturally occurring amino acid
  misc_feature (21)..(22): Xaa can be any naturally occurring amino acid
  misc_feature (27)..(27): Xaa can be any naturally occurring amino acid
  misc_feature (30)..(33): Xaa can be any naturally occurring amino acid
  misc_feature (35)..(38): Xaa can be any naturally occurring amino acid
  misc_feature (40)..(41): Xaa can be any naturally occurring amino acid
  misc_feature (43)..(43): Xaa can be any naturally occurring amino acid
  misc_feature (45)..(46): Xaa can be any naturally occurring amino acid
MLLXLSACVXSXDXFXQCXPXXIASLXSPXXXXNXXXXMXXAXSXXL

SEQ ID NO: 37369 - DNA, 553 bp, Zea mays subsp. mays
ttttttaagggttcaggatgatctcaatgttgcgaaagaaagagacaaggaacagtattataacacggtggaaagactcagagacatgtatcatgaatcaggagcaaggcataaattgatgaagaaggtcttccttttgcttcatgaggaactgcagattattaagcaaagaattaaagatttttcagaggcctattgaaatgagtcactcataacatgtcacttgcaattgtgtttcggagactgtcgctcatcgtaaggctgataatgtctgggcatgagcattatgctttgcctttgtagaagtttgcttgtcttggaaagattcagtcaatggcgcatatcacaggaaacctgagagactccgtgatttctggaatcacatcgtgctgaatttgatagtaatcacggtgaagtggaggcaaggacagttcaaatatcaatggcgttgttggacacaggcaaggacagttcaaatatcaatgacgttgtttgacacctccgcagccccgcacgggggagatagcagaagaaatgattcatcactatcgat

SEQ ID NO: 37370 - protein, 65 aa, Zea mays subsp. mays
FLRVQDDLNVAKERDKEQYYNTVERLRDMYHESGARHKLMKKVFLLLHEELQIIKQRIKDFSEAY

SEQ ID NO: 37371 - protein, 37 aa, Zea mays subsp. mays
MYHESGARHKLMKKVFLLLHEELQIIKQRIKDFSEAY

SEQ ID NO: 37372 - protein, 33 aa, Zea mays subsp. mays
MISMLRKKETRNSIITRWKDSETCIMNQEQGIN

SEQ ID NO: 37373 - DNA, 822 bp, Zea mays subsp. mays
acactcccacccctaccaacgctctgcgccaacgaacgcgtccgcaagtcaaaccaggcccggagccaccagcaaccaaccgagcgcatggaggccgcggcggcgaccgcgctcccgttcgcggcggccgtccccactgcctggagggtgcgcgcgagcccgcggacgcggcggcgctccgtggcggcgaagctggagcgcgggctcggcaagggggttcccaccaccaactacgtggtgccgctcgacaaggccaccgggatgacgcgcccgctcgtcgagatcctgcgggacctcaacaagcgcgtccccgacaagatcatcgaccccgacactaacaccgtcaactggtaccatgccaacagaatgcttagcttttacgcaccaggttggtgtggagaagttcgtgatgttatctattctgagaatggaactgtaaccgtggtatatcgagtgatacttaaaggaactgatggagaggcatacagagatgccacgggcacagcacagttacatgaggggcgcagggaagatgctgttgcagccgcagaggaagctgcattctgcaaagcctgcgcacggttcggttttggcctgtacctgtaccaccaggatgattctcattacgacgaccacttccattgaggctcagtctgcaaaagagctgttcataagctgcaacatgcgttggatatgcctctcgaaaaacttcgcatctagaatcaatttttgctctttgcgtagtatcatactcataacacaaagaagtgaacctatgtagatgctattcgaaaccttctttttattaatattagaattctt

SEQ ID NO: 37374 - protein, 214 aa, Zea mays subsp. mays
TLPPLPTLCANERVRKSNQARSHQQPTERMEAAAATALPFAAAVPTAWRVRASPRTRRRSVAAKLERGLGKGVPTTNYVVPLDKATGMTRPLVEILRDLNKRVPDKIIDPDTNTVNWYHANRMLSFYAPGWCGEVRDVIYSENGTVTVVYRVILKGTDGEAYRDATGTAQLHEGRREDAVAAAEEAAFCKACARFGFGLYLYHQDDSHYDDHFH

SEQ ID NO: 37375 - protein, 185 aa, Zea mays subsp. mays
MEAAAATALPFAAAVPTAWRVRASPRTRRRSVAAKLERGLGKGVPTTNYVVPLDKATGMTRPLVEILRDLNKRVPDKIIDPDTNTVNWYHANRMLSFYAPGWCGEVRDVIYSENGTVTVVYRVILKGTDGEAYRDATGTAQLHEGRREDAVAAAEEAAFCKACARFGFGLYLYHQDDSHYDDHFH

SEQ ID NO: 37376 - protein, 127 aa, Zea mays subsp. mays
MTRPLVEILRDLNKRVPDKIIDPDTNTVNWYHANRMLSFYAPGWCGEVRDVIYSENGTVTVVYRVILKGTDGEAYRDATGTAQLHEGRREDAVAAAEEAAFCKACARFGFGLYLYHQDDSHYDDHFH

SEQ ID NO: 37377 - DNA, 1316 bp, Zea mays subsp. mays
accatcgccacccgtcagtccgtcacccctcgcgcccatagtccccttccccataccatgtccgacctccacccgccggagcaccaagtcgccggccaccgcgcctccgccagcaagctgggcccgctcatcgacggctccggcctcttctacaagccgctccaggccggcgaccgtggggagcacgaggtcgccttctatgaggcgttctccgcccacgccgccgtcccggcccgcatccgagacaccttcttcccccggttccacggcacgcgactcctccccaccgaggcgcagcccggggagccgcatcctcacctcgtcctcgacgacctcctcgcggggtttcaggcgccctgcgtcgcagacatcaagatcggcgccatcacgtggccaccgagttcgccggagccctacatcgccaagtgcctcgccaaggaccgcgggaccacgagcgttctgctcggattccgcgtctccggcgtccgagtcgtcggccccgagggcgccgtgtggcggacggagcgcccggaggtgaaggccatggacaccgccggcgtccgccgcgtgctccggcgctacgtgtcatccgttgccgacgaggggatggactgtgcgctcgccgcggcggtgtacggaggaaaaggtggagtcttgtcacagctgcgcgagctcaaggcgtggttcgaggagcagactctgttccacttctactcggcgtcgattcttctgggctatgatgctgctgcagtcgcagcaggcggagatgggggtggggtgacggtgaagctggtggactttgcccatgtggccgagggtgatggggtgattgaccacaacttcctgggcgggctctgctcgctgatcaagttcgtttctgacattgttccggagactcctcatacgcagcctttgggtccttcttaagagaggatcctggcatttcgatttgataacaaagccctacaagttttgtctggaaaaagaagcgcctccgagttgtgctgggtgtggagatccgtgagacggtcgtcgccccacgtggttgccttgccttcccttccctgcaaacatacggcaacctgctccttttttcgcaacccctttcttcggaagaaacctttttctcacttttggggggttcgattacgttggattggaactggttgtgccactcggtcagaggttgtaagcatggaggcgtgttgatccggcaactgcctgtaccgctgctactagtcagtcttttgcctgctgtagctgcacatatggatggatgtgtatgggttatcagcagtgttccaaagcttatcgat

SEQ ID NO: 37378 - protein, 308 aa, Zea mays subsp. mays
TIATRQSVTPRAHSPLPHTMSDLHPPEHQVAGHRASASKLGPLIDGSGLFYKPLQAGDRGEHEVAFYEAFSAHAAVPARIRDTFFPRFHGTRLLPTEAQPGEPHPHLVLDDLLAGFQAPCVADIKIGAITWPPSSPEPYIAKCLAKDRGTTSVLLGFRVSGVRVVGPEGAVWRTERPEVKAMDTAGVRRVLRRYVSSVADEGMDCALAAAVYGGKGGVLSQLRELKAWFEEQTLFHFYSASILLGYDAAAVAAGGDGGGVTVKLVDFAHVAEGDGVIDHNFLGGLCSLIKFVSDIVPETPHTQPLGPS

SEQ ID NO: 37379 - protein, 289 aa, Zea mays subsp. mays
MSDLHPPEHQVAGHRASASKLGPLIDGSGLFYKPLQAGDRGEHEVAFYEAFSAHAAVPARIRDTFFPRFHGTRLLPTEAQPGEPHPHLVLDDLLAGFQAPCVADIKIGAITWPPSSPEPYIAKCLAKDRGTTSVLLGFRVSGVRVVGPEGAVWRTERPEVKAMDTAGVRRVLRRYVSSVADEGMDCALAAAVYGGKGGVLSQLRELKAWFEEQTLFHFYSASILLGYDAAAVAAGGDGGGVTVKLVDFAHVAEGDGVIDHNFLGGLCSLIKFVSDIVPETPHTQPLGPS

SEQ ID NO: 37380 - protein, 178 aa, Zea mays subsp. mays
PSPPVSPSPLAPIVPFPIPCPTSTRRSTKSPATAPPPASWARSSTAPASSTSRSRPATVGSTRSPSMRRSPPTPPSRPASETPSSPGSTARDSSPPRRSPGSRILTSSSTTSSRGFRRPASQTSRSAPSRGHRVRRSPTSPSASPRTAGPRAFCSDSASPASESSAPRAPCGGRSARR

SEQ ID NO: 37381 - DNA, 2272 bp, Zea mays subsp. mays
  misc_feature (2086)..(2086): n is a, c, g, or t
gagctcactagtcccccccccccctaaatggcttacgcccgaggggcttattcttccttatcatggtatgatataattatcatacaaaaatgttacactgcttttacagggtgtacctcatctatttgcttgtacaattcatcttactactgctttgacaaacattggtctgcactgctttggtctgtgctttaggattctgtttcattgggagaaacaaatgcccttgcttacttttatttatgcttttctgaataattaagaagactagcctcatgttggaatcttcagcgttatatataatacaaaaaaagaggtttgcaatgaaaagttaaaaaggggacttttctccaatacaaggaatcatcttgacagaatataaaacttttcttctaaacatagcatacaatggttttagctgattattgtgtatttcagaagatggtgaattgtgtgaatacttccctagccctttttgctacatcgaggtcttcaggaggaaccttgcttttgacaccaggaatgttgtaagcattacagtatgcaattagttccttctttattaccatatatatgaacttaggtgttcctctactgaccaggcttcagaccaatctggagaagtgtcaggtcatacccatccagttatccatggtcaaacttgcctttgtacaggagattttcagctgtcagattgctcctttcccctgccactacttaggtgttcctctctcaatctacaagcctaaacacagtaaggattaaggagcagccgttgtatacttgtatataattgtggatagaattcccacttggatgggcaacatgctaaatttagctgggcgagctaccttggtgaaggtcacacactctgcaattccgatattcatctccattgacacctgtttgtcggtatgggccattgaacagattgatctgtcaccctactgagcttggtagggtatgccctcatattaaggtgggaatggcttcacataactgacccatatcgtacttggattgatcttctgagtctggcttgatggttcctcaattaagcatgtggctgatctgtgcaactgtgggtagataaattcattggatttttttttgctgaggttgctttttttgcatccgtgtctatgtcgacatagaggcatcattatggtgcatgataataaaaactatttgtaaacctttgttgtacatgcccagattggggaagactttacagtcgataactttactatatacccttctttgtcaaggctttgatgataagccaatggttaaaagggttgtcattgtaacccccacaagcttagttagcaactgggaatctgagataattaagtggttgaaaggcagagtgcaggtgctggccatctgtgaaagcacacgtgctgatgttctttccggaattgaaagtttcttaaaacccttgagccgtctccatgttttcttttgcttactaattatttgttaatatacactatactaaatgaaaatgtagctgcaagttaatgacaatttctgtggtgcatgaataatcttcaggtacttatcatatcttatgagactttccgcatgcattcttcatgcgcgcaccaagtgcgcgcagtgccataccgtggagcgaggtggcgcgcacaggcaggggcccaacctgcacggcctcttcggtcgtcagtcaggcaccaccctcggctaagcctactccacgaccaacaagaacatggtcatcgtctgggaggagggcaccctgtacgactacctcttcaaccccaagaagtacattctaggcacaaagatggtcttcccggggctcaagaagcccaaggagcgaaccgatctcatcgcctacttgacctatcgacgcaacaggggatactcacactgtcatccttagctctgtggcaataagtcgttcgtctgcaacacagccgacagaaaactgagcatgtgcttcagagaccaggcattattgaactttgctgccactaatttacattagatgaactgagttacagcagaatgaatttcctggatcctaaatgcagagaataaataaataaaaatatataanaggaaaaaaaaaaaaaaaaaaaaaaaaaaaaaaaaaaaaaaaaaaaaaaaaaaaaaaaaaaaaaaaaaaaaaaaaaaaaaaaaaaaaaaaaaaaaaaaaaaaaaaaaaaaaaaaaaacccccccggggggggccccgaaccccaatccccccaaaagggggcgaaaaaaaaacccccggcccccct

SEQ ID NO: 37382 - protein, 126 aa, Zea mays subsp. mays
MNNLQVLIISYETFRMHSSCAHQVRAVPYRGARWRAQAGAQPARPLRSSVRHHPRLSLLHDQQEHGHRLGGGHPVRLPLQPQEVHSRHKDGLPGAQEAQGANRSHRLLDLSTQQGILTLSSLALWQ

SEQ ID NO: 37383 - protein, 111 aa, Zea mays subsp. mays
MHSSCAHQVRAVPYRGARWRAQAGAQPARPLRSSVRHHPRLSLLHDQQEHGHRLGGGHPVRLPLQPQEVHSRHKDGLPGAQEAQGANRSHRLLDLSTQQGILTLSSLALWQ

SEQ ID NO: 37384 - protein, 104 aa, Zea mays subsp. mays; identical to SEQ ID NO: 37264

SEQ ID NO: 37385 - DNA, 952 bp, Zea mays subsp. mays
gagtcctgccataccttacctccccttccatcctcgtcctcgagcgagccgttgcaggcgtcacaccgccgccagaggtgcctgctgacggcgaggctgaagccaagacctgtgcaactggcggcgacgaccaccagagggccgacgagtggtccctcgcctcctcctccggctagatggtcccgtcgcccatgtaccccccctttcatggctgtcctcaagcgtgttgttgcaggcatcacgtcgccgccaaaaacacctgtcgacgcgaggacgaggcctatgcagccggcagcgacgacaaccaacagttccagcctaccgagcctaaccagagggtcgaggagccgacttctccgtctagatgctcccgtcgtccgtgcatctccccttccatccccgtcctcgactgcgccgttgcgtacatcgtgccaccgccaatcgtgccgccaccagagtctcctgtcagcggcgaggtcgaggccaatgcctgtgcagccagcgacgatgaccaccaccagctgcagcttgtcgagactcaccagagggacgaggagtggtccctctcctctttctcggtctagatgtagctcagcgacacacactacatgcttgggtgccgagacctacaggtccatcgcctactacgacaagggcctcgagatcttgatggctacgctcggcgagcgtgatcccccatcgcaaagacctgcaggagctggagccatcctaagagatgttcaagcaattggggcgtcccttcgatcctgcgttgtgcacataaattggttatgggatatgtagatccgtgaggtgttgttgaagaaatccaaactctctactaacagcacaaacagtcttgttttctttatttgtccagtgaagttatcaaggttgatttatattttcaaagagtttgagtaataaacttgaactatattttttccttgtc

SEQ ID NO: 37386 - protein, 267 aa, Zea mays subsp. mays
ESCHTLPPLPSSSSSEPLQASHRRQRCLLTARLKPRPVQLAATTTRGPTSGPSPPPPARWSRRPCTPPFMAVLKRVVAGITSPPKTPVDARTRPMQPAATTTNSSSLPSLTRGSRSRLLRLDAPVVRASPLPSPSSTAPLRTSCHRQSCRHQSLLSAARSRPMPVQPATMTTTSCSLSRLTRGTRSGPSPLSRSRCSSATHTTCLGAETYRSIAYYDKGLEILMATLGERDPPSQRPAGAGAILRDVQAIGASLRSCVVHINWLWDM

SEQ ID NO: 37387 - protein, 198 aa, Zea mays subsp. mays
MAVLKRVVAGITSPPKTPVDARTRPMQPAATTTNSSSLPSLTRGSRSRLLRLDAPVVRASPLPSPSSTAPLRTSCHRQSCRHQSLLSAARSRPMPVQPATMTTTSCSLSRLTRGTRSGPSPLSRSRCSSATHTTCLGAETYRSIAYYDKGLEILMATLGERDPPSQRPAGAGAILRDVQAIGASLRSCVVHINWLWDM

SEQ ID NO: 37388 - protein, 173 aa, Zea mays subsp. mays
MQPAATTTNSSSLPSLTRGSRSRLLRLDAPVVRASPLPSPSSTAPLRTSCHRQSCRHQSLLSAARSRPMPVQPATMTTTSCSLSRLTRGTRSGPSPLSRSRCSSATHTTCLGAETYRSIAYYDKGLEILMATLGERDPPSQRPAGAGAILRDVQAIGASLRSCVVHINWLWDM

SEQ ID NO: 37389 - DNA, 612 bp, Zea mays subsp. mays
aatcgaaaaaggagatcgcgagactgttgaaaacatactcagaaatatggtggatgttcgtgatgttgctgacgctcttcttctggcttacgaaaagccagaagcgtctggacgatacatctgcagttcacatgcaataaaagttgctgatatgataaacatactgaagaccttgtatccatcttacccttatcccaaaaattttgtggaagatgatgtcaactctgtatacagctctgagaaactgcagaagctggggtggagcttcaagcctatagaggaatccctccgcgacactgttgaatcctacaaagcatttggcatcctgaattgaacatccagctacgactgttccatctgctgtttttgcctccgaactctttctgaataataatgtatgtaggcagtgaaacagcattgccagcaggttaatcctggcatcatgctggagcagcactgtagttctctctttttttttcatccccaatactatctagtggttcaggaccaaataagtaggccccgtgctgactggtttatggcttgtggcctattgtcgctgctaaaactagaagcgttcgtactatcttgcactgctgcacttgatttctc

SEQ ID NO: 37390 - protein, 110 aa, Zea mays subsp. mays
IEKGDRETVENILRNMVDVRDVADALLLAYEKPEASGRYICSSHAIKVADMINILKTLYPSYPYPKNFVEDDVNSVYSSEKLQKLGWSFKPIEESLRDTVESYKAFGILN

SEQ ID NO: 37391 - protein, 95 aa, Zea mays subsp. mays
MVDVRDVADALLLAYEKPEASGRYICSSHAIKVADMINILKTLYPSYPYPKNFVEDDVNSVYSSEKLQKLGWSFKPIEESLRDTVESYKAFGILN

SEQ ID NO: 37392 - protein, 60 aa, Zea mays subsp. mays
MINILKTLYPSYPYPKNFVEDDVNSVYSSEKLQKLGWSFKPIEESLRDTVESYKAFGILN

SEQ ID NO: 37393 - DNA, 1041 bp, Zea mays subsp. mays
tcggcctttccactttccagcccccagttacgaacaaccccctcatgaagtcatggtcatggcgaagagcgaaggcccgtccgccgccgcggggctccgcccacggcagcggggcgccttccttctgggggagccaacctgggaggacaccggcagcgggcggtggcggtgcgcggagacggggcacgagctgccggagcgggagaaggaggcctacgcgcggtcccgcgcctgccgcctcgcgctcattgaccacgccgtcgcgcacaagaagccgccgctcaacgccttcaagccccaccccgagcacaaaaaaacaagaggaccagatgacttctggtgagatggctgatggacaatctgtgaagtcaaatgaagaagtggcaaagaagagcaagccaagcaagaagtacaagaagaaaactaatgtttccagtccattgccaggagaacctaaaccagagatggatggttcagatgatcgcaatttctgggtgcctcctgtcgagggtcgctgggatgatgatgacgggaaaaaaagatgggagttgtcaccgggaaagcacacattagcaaagaatgaaggtggttctgatgctgctgctggtggtggtgataacgacggtggtgatgaaaatgttacggctgagaaggatgacgctgaatcaagggaacttgcctcaatgacaaagcaaatttcttcctggctgcagctaaagcaacagattcgggcacccgtgagcgcagcctcctttcaaagttcaacgaaagggcctaaaagtcagcaggtagaatctttagaatgtcagcaacaagttattaccagggccggccctgagattttgggggcccagagcaagacttaaacctgaggccctctcttattacaacacatatatacatcttgtatcacttattagtttaggtgctaagcaattgttacaataccggtaagaaaaaaatttcatcctcgaagataaaaacaatatctcagaaattccaaaaaaaaaaaaaaaaaagcttatcgatatgtttaaacac

SEQ ID NO: 37394 - protein, 287 aa, Zea mays subsp. mays
GLSTFQPPVTNNPLMKSWSWRRAKARPPPRGSAHGSGAPSFWGSQPGRTPAAGGGGARRRGTSCRSGRRRPTRGPAPAASRSLTTPSRTRSRRSTPSSPTPSTKKQEDQMTSGEMADGQSVKSNEEVAKKSKPSKKYKKKTNVSSPLPGEPKPEMDGSDDRNFWVPPVEGRWDDDDGKKRWELSPGKHTLAKNEGGSDAAAGGGDNDGGDENVTAEKDDAESRELASMTKQISSWLQLKQQIRAPVSAASFQSSTKGPKSQQVESLECQQQVITRAGPEILGAQSKT

SEQ ID NO: 37395 - protein, 273 aa, Zea mays subsp. mays
MKSWSWRRAKARPPPRGSAHGSGAPSFWGSQPGRTPAAGGGGARRRGTSCRSGRRRPTRGPAPAASRSLTTPSRTRSRRSTPSSPTPSTKKQEDQMTSGEMADGQSVKSNEEVAKKSKPSKKYKKKTNVSSPLPGEPKPEMDGSDDRNFWVPPVEGRWDDDDGKKRWELSPGKHTLAKNEGGSDAAAGGGDNDGGDENVTAEKDDAESRELASMTKQISSWLQLKQQIRAPVSAASFQSSTKGPKSQQVESLECQQQVITRAGPEILGAQSKT

SEQ ID NO: 37396 - protein, 178 aa, Zea mays subsp. mays
MTSGEMADGQSVKSNEEVAKKSKPSKKYKKKTNVSSPLPGEPKPEMDGSDDRNFWVPPVEGRWDDDDGKKRWELSPGKHTLAKNEGGSDAAAGGGDNDGGDENVTAEKDDAESRELASMTKQISSWLQLKQQIRAPVSAASFQSSTKGPKSQQVESLECQQQVITRAGPEILGAQSKT

SEQ ID NO: 37397 - DNA, 767 bp, Zea mays subsp. mays
ctccgtctccggtctccagtctcgctgcttccacaagtccacaaccgtaccagcaccaccgcgccatggcgtcctccgccgatcccgatgccgccacgccaccatccgcgccgcagccggagcccgcacggaaggcagtccgcgtggtggtgaaggggagcgtcacgggggtggggttccgcgactggacggcgtccacggccgagtcgctcggtctcgccggctgggtccgcaaccgccgtgacggcagtgtggaggccctcctctccggagaccccgcgaagatcgaagacatgataacccgccgcctccccgtcggccccccagccgccaccgtcaccgccgtcgtcccgtccggccgagcccgtggatccgtccaccgggttcgagatcaagttcaccgtctgatccccccgtcccgcgacaggttcgcgtctcgccgcgcgttcttggacggtctattcgtgcactactactgcgaatctgcgattaaagatcagaggcgacatctaatgtaccgtagtctgtttacctgaaaagctccgctatctgcttgggttggaattcatgccagattgtgggtgcaaacctgtttccttactacctagtgtccaagtcggaatattaataagctatgccaggattcagatcgaaatatttctgtctctgagagatgtgttgcgtgacaacttttcgaagactgttgcctgaacaatatctgtgtgtttatccctagactctaatgtacaaacagagtcttatacagt

SEQ ID NO: 37398 - protein, 177 aa, Zea mays subsp. mays
PSPVSSLAASTSPQPYQHHRAMASSADPDAATPPSAPQPEPARKAVRVVVKGSVTGVGFRDWTASTAESLGLAGWVRNRRDGSVEALLSGDPAKIEDMITRRLPVGPPAATVTAVVPSGRARGSVHRVRDQVHRLIPPSRDRFASRRAFLDGLFVHYYCESAIKDQRRHLMYRSLFT

SEQ ID NO: 37399 - protein, 156 aa, Zea mays subsp. mays
MASSADPDAATPPSAPQPEPARKAVRVVVKGSVTGVGFRDWTASTAESLGLAGWVRNRRDGSVEALLSGDPAKIEDMITRRLPVGPPAATVTAVVPSGRARGSVHRVRDQVHRLIPPSRDRFASRRAFLDGLFVHYYCESAIKDQRRHLMYRSLFT

SEQ ID NO: 37400 - DNA, 552 bp, Zea mays subsp. mays
aatcgttgggaaaagtttgatgatacggagtggacaattcttggtgtagaaggagaatctgagagagagagagtcatggaagctctgaaaaccgcaacttttagccctatgtcggtgttatccgagaaaagatcagaaccacgaaagcctttctcgctccctaacctctttccaccaaaatcacagagaccaatctcccaagaaagcttcttgaagagattcaatggtggattggctcttctaacttctgttctaagcagtgcaacagctcctgctaaatccctgacgtacgaggaagctctgcaacaatctatgaccacttcttcatcttttgattcggatggtctgattgaagggatatccaattttgtcacagacaatcctttggttattgccggtggagttgctgcattggctgttccatttgttctgtctcaggttctgaacaagaagcccaaatcatggggagttgagtctgctaagaatgcttataccaagttgggtactgatgataatgctcagttgcttgacataagagctactgctgatttc

SEQ ID NO: 37401 - protein, 184 aa, Zea mays subsp. mays
NRWEKFDDTEWTILGVEGESERERVMEALKTATFSPMSVLSEKRSEPRKPFSLPNLFPPKSQRPISQESFLKRFNGGLALLTSVLSSATAPAKSLTYEEALQQSMTTSSSFDSDGLIEGISNFVTDNPLVIAGGVAALAVPFVLSQVLNKKPKSWGVESAKNAYTKLGTDDNAQLLDIRATADF

SEQ ID NO: 37402 - protein, 159 aa, Zea mays subsp. mays
MEALKTATFSPMSVLSEKRSEPRKPFSLPNLFPPKSQRPISQESFLKRFNGGLALLTSVLSSATAPAKSLTYEEALQQSMTTSSSFDSDGLIEGISNFVTDNPLVIAGGVAALAVPFVLSQVLNKKPKSWGVESAKNAYTKLGTDDNAQLLDIRATADF

SEQ ID NO: 37403 - protein, 148 aa, Zea mays subsp. mays
MSVLSEKRSEPRKPFSLPNLFPPKSQRPISQESFLKRFNGGLALLTSVLSSATAPAKSLTYEEALQQSMTTSSSFDSDGLIEGISNFVTDNPLVIAGGVAALAVPFVLSQVLNKKPKSWGVESAKNAYTKLGTDDNAQLLDIRATADF

SEQ ID NO: 37404 - DNA, 741 bp, Zea mays subsp. mays
  misc_feature (710)..(711): n is a, c, g, or t
attgggtaccgggccccccctcgagttttttttttttttttttttgtcacaaagtaacgaaactcatatctaagatatacaagagggatattgtaatgagagataggacaaggttccatcatttcagagatgggaaatgcagttgtggggactactggtaaaatttgggagaggaaataaaacttttattgcttaagaaaatggatccactggacattataagtttaaagtacaatgttttcaactgatgctgagaagttgtgttgcagtccaagactgtcccggctctagcttgacatccccaagctttgcattttccacgcacacaaagtctctgtaacaagcctccatctgagtatgcgggttccacaagaccgcatccgaccaatttgtgtttttgatgattattttatcacccaagccattatcaaactgcaattcattgggagcatcaagatagacggtatccacaaatccaggaaaagtgactgcatccctgtcttctttaccctctattgggttcttagggtctggatccttattgagggttttacaaccctttagacctctcacggaggcccccgcagaagaagcacggaagtaagtatgcagcgcagtgctgaaagaaaatggtttatcgtctgtgtttgtaatctttagctcagtggaaagggagtccgcgccaacaatgaccttgtatagagcctggnnagcaaagtcccacatggctcgactataggg

SEQ ID NO: 37405 - protein, 68 aa, Zea mays subsp. mays
MRVPQDRIRPICVFDDYFITQAIIKLQFIGSIKIDGIHKSRKSDCIPVFFTLYWVLRVWILIEGFTTL

SEQ ID NO: 37406 - protein, 52 aa, Zea mays subsp. mays
WVPGPPSSFFFFFFCHKVTKLISKIYKRDIVMRDRTRFHHFRDGKCSCGDYW

SEQ ID NO: 37407 - DNA, 683 bp, Zea mays subsp. mays
gagtttttttttttttttttttctttttttttttttttttttttttttttttttttttttttttttttttttttttaacccgggctccccaaaaaaaacaaaaaaggcttcgaaaaacgggccaaaacttttctattcaagttccccaaaaaaaacgagccaaagggcttcgaaaaacaaaccaaaacttttctattcaggttccggggaacataccctggaacccctcttaagcatacatagcaaatatcaaagggccccccccccctctggggggatgggcccccaaagctgatcagggaaacttttctactaaagaggcccccccagggggaggaaaatttgggacccatcagggccgcttctgggaaaaagccccaaaacccgcgttcttttttcccttctggagaagcccaacttccccctttttcttttcttggcccatcttcaaagccttaaaaaggcccccctgcttgcgagacttgaaagcagtaccaaaatcatcctcctcccccccccctgggtaacgggcaccccccccacgatcggacggagaatcatcttttgcattcggggatttaccggctccctggtttgacaaacaaaaaaaagcaacgccctcaatttccttcttcagttcatcgaggaattgcttctcaagaatccccagtttcctctttttt

SEQ ID NO: 37408 - protein, 97 aa, Zea mays subsp. mays
SFFFFFFLFFFFFFFFFFFFFFFFFNPGSPKKTKKASKNGPKLFYSSSPKKTSQRASKNKPKLFYSGSGEHTLEPLLSIHSKYQRAPPPSGGMGPQS

SEQ ID NO: 37409 - protein, 76 aa, Zea mays subsp. mays
VFFFFFFFFFFFFFFFFFFFFFFFLTRAPQKKQKRLRKTGQNFSIQVPQKKRAKGLRKTNQNFSIQVPGNIPWNPS

SEQ ID NO: 37410 - DNA, 1027 bp, Zea mays subsp. mays
gaccagatcgctacgagacgccgcgcgatcggacccaggccgacgccgacgacccctctcgccgccggcggccatggcgtacggcgaccgcgtcaccaccttcgaggactccgagaaggagagcgagtacggctatgtccgcaaggtctctggacctgtggttgtggctgatggaatgggtggtgctgccatgtatgaacttgttcgtgtcggacatgataacctcattggggaaattatccgtcttgagggcgattcagctacaatccaagtttatgaggaaacagctggactgatggttaatgaccctgtattgagaacaagaaagcctctttcagttgaattgggacctggaattcttggaaacatttttgacggtatccagcggcctctaaaaaccatcgctattaagtcaggagatgtgtatattcctcgtggtgtttcagttcctgcccttgacaaagatgtattgtgggaatttcagccaacgaagctaggtgttggagatgtcatcacaggtggagatctatacgctactgtttttgagaacacattgatgcagcaccatgttgctcttccaccgggttctatggggaaaataagttacattgcaccagctggccagtacaacctgcaggacacagtgctagaattggaatttcagggcataaaaaagaaatttaccatgcttcagacatggcctgtgcgttcaccaaggcctgttgcatcgaagcttgctgcggatacacctcttctgacagggcagcgtgtactggatgcactattcccctcggttctgggaggcacttgctgtattccaggagcatttggctgtggtaaaactgtcattagtcaggcactttccaagtactccaattccgaagctgtggtttatgtgggctgtggtgaacgaggaaacgagatggctgaggttctcatggactttccccagttgacaatgcaattcgctgatggccgtagagagtctgtcatgaaaagaacaacactggtggctaacacatcaaac

SEQ ID NO: 37411 - protein, 342 aa, Zea mays subsp. mays
TRSLRDAARSDPGRRRRPLSPPAAMAYGDRVTTFEDSEKESEYGYVRKVSGPVVVADGMGGAAMYELVRVGHDNLIGEIIRLEGDSATIQVYEETAGLMVNDPVLRTRKPLSVELGPGILGNIFDGIQRPLKTIAIKSGDVYIPRGVSVPALDKDVLWEFQPTKLGVGDVITGGDLYATVFENTLMQHHVALPPGSMGKISYIAPAGQYNLQDTVLELEFQGIKKKFTMLQTWPVRSPRPVASKLAADTPLLTGQRVLDALFPSVLGGTCCIPGAFGCGKTVISQALSKYSNSEAVVYVGCGERGNEMAEVLMDFPQLTMQFADGRRESVMKRTTLVANTSN

SEQ ID NO: 37412 - protein, 318 aa, Zea mays subsp. mays
MAYGDRVTTFEDSEKESEYGYVRKVSGPVVVADGMGGAAMYELVRVGHDNLIGEIIRLEGDSATIQVYEETAGLMVNDPVLRTRKPLSVELGPGILGNIFDGIQRPLKTIAIKSGDVYIPRGVSVPALDKDVLWEFQPTKLGVGDVITGGDLYATVFENTLMQHHVALPPGSMGKISYIAPAGQYNLQDTVLELEFQGIKKKFTMLQTWPVRSPRPVASKLAADTPLLTGQRVLDALFPSVLGGTCCIPGAFGCGKTVISQALSKYSNSEAVVYVGCGERGNEMAEVLMDFPQLTMQFADGRRESVMKRTTLVANTSN

SEQ ID NO: 37413 - protein, 284 aa, Zea mays subsp. mays
MGGAAMYELVRVGHDNLIGEIIRLEGDSATIQVYEETAGLMVNDPVLRTRKPLSVELGPGILGNIFDGIQRPLKTIAIKSGDVYIPRGVSVPALDKDVLWEFQPTKLGVGDVITGGDLYATVFENTLMQHHVALPPGSMGKISYIAPAGQYNLQDTVLELEFQGIKKKFTMLQTWPVRSPRPVASKLAADTPLLTGQRVLDALFPSVLGGTCCIPGAFGCGKTVISQALSKYSNSEAVVYVGCGERGNEMAEVLMDFPQLTMQFADGRRESVMKRTTLVANTSN

SEQ ID NO: 37414 - DNA, 1679 bp, Zea mays subsp. mays
ggagttttttttgtctcgctcctaggccactaaatttcttgcttgtttcgcatttatgctgaagattggtgaatctacctcgtaataacgcatggcttagtgatggaagcacccagttaagtgccattttacgaacggaatttggtcaaatatatagcccttgaactgttttgtctagcatttagtttgcaatgttttttatattattttgaagtctgttttgagcaatctattactactctataaagccctattgtaggcgtccacaagtgcaccatggttctgccatcctccccctcgcgcaatccctcattcttataaggccctattgtagcctatctaaatatttttaggattagaaaattgttttgtattggtccatcttatacttttatttaacattacaccctcattcttcttggtcttggacgactcttttcagtatcaaatccaaattcatgtttaattgcgtgttgagataatgccaacttattccatgttggcatgtgattgtggaggcatctattttactacttacaggtatgcatcttgactagctcgctgaggggaatggcctggtggatctgttgttggtttgcttgtaggtgattagctagattgtgttgtttttttggctagatgcctagatctgattgatgcgcgtatattgttgagtctgttctccacctcggcgcctgttcgaaaccttctgtttttttactgcatgaaacatattaatgcagtaaagccaatagactttactcttttatccaacgaatcatgaaacatactattaataagtgacaccatgacatgtttaatcatttcgacatgttagcaacacagggaagacaaatatgtttcatactccatatgtattagatatggtattatgggatgtcagtatctgctatttcgtttggaatgtctttttgtgatatttcagtctgtggtccagacacctttactttttgaaaaatgtcgccttctgtagttgcttcaaattccatacgttcgacatctatgaatagaaaattttgacactatatctttgaacaattgatctctcaggaatatatgaggccttggagttgagggatggaggatctgattatcttggcaagggtattcttaagcttttggcttaaaatttgagaggaggagatggcggtcacgatcacgtgggtgaaggcgaggcagatcttcatcagccgcggcaaccccaccgtcgaggtggacgtgggcctcagcgatggcagctacacgagggggcgtacccatcggcgcatccactttatgactgccagcgtcagaatctgatatacctattggcgtttccacattgcagacacacaagagtccagcctgcgccagacgctcctgcagctatctgcactgaagatcaggacacgaagatcgcgagctttatcaaggctcgccatgtgcggaaggtgtattttagtgagatctccaagatgaagcattaggggggggtcaatcgacccagattttacgtgtatctaacttagtagggcacccatgatctataatttattctctgtagttgtagcaacgacctagagctgtcattctgtagcacattgtgtaacatgtaggagagagatgaacacatatccccattctttctactgaaacaccagaaatagttgctcttgctc

SEQ ID NO: 37415 - protein, 51 aa, Zea mays subsp. mays
MAVTITWVKARQIFISRGNPTVEVDVGLSDGSYTRGRTHRRIHFMTASVRI

SEQ ID NO: 37416 - protein, 33 aa, Zea mays subsp. mays
MGCQYLLFRLECLFVIFQSVVQTPLLFEKCRLL

SEQ ID NO: 37417 - DNA, 892 bp, Zea mays subsp. mays
gatgtgggcttttctcgtccacccaacaaactatagaaaaaaaaaactcgatcggctgatacttaatcacccacttgattttgtatttttgtacctttttttttgttgtaatttttccatacacccaatttcccgtggaagaaaaggagtcagctttttcgtttgctttaaagcttgaatctttacatagttccagttactttctatagagcttcataatccctagttgcccaaaaggattctgggttttgtgagaatgatgacgtcatgtcggaatatagatttaggtacgatgatgatggcatgtggttgtggccgtcgtcagtttccttcattagcgaagactgtttgtaagtttagtagcagcaatagaagctatggcggtctggtggggagttgcaaagcggtgccaacgaaatcaaaggagatctctttgctcaatggtattggtcaatctcaaacagtgagttttgatttgaaacaagagtcaaaacagcctatttcgttggtgactctgtttgagctagtagctgttgatctgcagactttgaatgacaatcttttatcgattgttggtgcggaaaatccggttttgatatctgcggctgagcagattttcggagctggtggtaaaagaatgagaccgggtttggtattccttgtatcacatgccacggcggaattagcaggcctaaaggaactaacaacagaacaccggcgtttggctgagatcatcgagatgatacacactgcaagcttgatacacgacgatgtgttagacgagagtgacatgcgaagaggaaaggaaacagttcatgagcttttcggcacaagagtagcggtgctagctggagatttcatgtttgctcaagcgtcatggtacttagcaaat

SEQ ID NO: 37418 - protein, 212 aa, Zea mays subsp. mays
MMTSCRNIDLGTMMMACGCGRRQFPSLAKTVCKFSSSNRSYGGLVGSCKAVPTKSKEISLLNGIGQSQTVSFDLKQESKQPISLVTLFELVAVDLQTLNDNLLSIVGAENPVLISAAEQIFGAGGKRMRPGLVFLVSHATAELAGLKELTTEHRRLAEIIEMIHTASLIHDDVLDESDMRRGKETVHELFGTRVAVLAGDFMFAQASWYLAN

SEQ ID NO: 37419 - protein, 211 aa, Zea mays subsp. mays
MTSCRNIDLGTMMMACGCGRRQFPSLAKTVCKFSSSNRSYGGLVGSCKAVPTKSKEISLLNGIGQSQTVSFDLKQESKQPISLVTLFELVAVDLQTLNDNLLSIVGAENPVLISAAEQIFGAGGKRMRPGLVFLVSHATAELAGLKELTTEHRRLAEIIEMIHTASLIHDDVLDESDMRRGKETVHELFGTRVAVLAGDFMFAQASWYLAN

SEQ ID NO: 37420 - protein, 200 aa, Zea mays subsp. mays
MMMACGCGRRQFPSLAKTVCKFSSSNRSYGGLVGSCKAVPTKSKEISLLNGIGQSQTVSFDLKQESKQPISLVTLFELVAVDLQTLNDNLLSIVGAENPVLISAAEQIFGAGGKRMRPGLVFLVSHATAELAGLKELTTEHRRLAEIIEMIHTASLIHDDVLDESDMRRGKETVHELFGTRVAVLAGDFMFAQASWYLAN

SEQ ID NO: 37421 - DNA, 1087 bp, Zea mays subsp. mays
gaggaagcacgacgtcctctaggaagaagcacagccgcagccgcccgcaggctatggacgatgacatcgacagctcctgctccaccccgttcgccagcgtgccgtccagccccggacgtccccacgccatcggagcctccctttcgctggcggcgtaggaagagatggcagagcgtttgacaagtgcaatcccaagaagtgccgccaggagtgcaagaagagctgccccgtcgccaagcccgtggttgataagcggtgagtactgtcacatgcgccagacgatgcaaaatatacgaagtagtggttgataaacagtgagtactgtcacatgcgctagacgatgcagtggttgataagcagccacaggaccagggacctcttatcttggacaagctgatttctagaagcaaggatgatgctctccttgcataccaaactgctctcgatcttgctgaaaatgaaaaccaggctttcctcctaaatgtgcggaatcagcttgatgcattgagttcacatacttctgcccatgtgtacccatgcgagcagactggttgtacaaaataatcaaactaatgctgctacagaaccatctgaggatgtccagatgagggacgacataaccatgccaaatgacagtgttgccactatggatccaaatgcagcaacacatgctggtaggctgacaaatcaagggtatattgtgaggagagacatctattcagttgacgttgcagttcctatacaaccatatataatagttaataggcctgatcttcaaattttgaagactaagcaagctgtgaaaatgaggaacaatgtctgccacaacgcagggacaacagttgataccttcctcagagaaaacttggtgtggtttgttttatacagtgtacttgctataaactgcttagcattttcaattttaatagaaaccatagcgacgcacgggcacctaactatattatttatgattggcatttttttaaagtattaatcttagtttttagttgctatagtttgcatgtaggttttacatgaaataatcttattaacaacgttgtgatccctcgcccaccgccaagcctgt

SEQ ID NO: 37422 - protein, 155 aa, Zea mays subsp. mays
MCTHASRLVVQNNQTNAATEPSEDVQMRDDITMPNDSVATMDPNAATHAGRLTNQGYIVRRDIYSVDVAVPIQPYIIVNRPDLQILKTKQAVKMRNNVCHNAGTTVDTFLRENLVWFVLYSVLAINCLAFSILIETIATHGHLTILFMIGIFLKY

SEQ ID NO: 37423 - protein, 129 aa, Zea mays subsp. mays
MRDDITMPNDSVATMDPNAATHAGRLTNQGYIVRRDIYSVDVAVPIQPYIIVNRPDLQILKTKQAVKMRNNVCHNAGTTVDTFLRENLVWFVLYSVLAINCLAFSILIETIATHGHLTILFMIGIFLKY

SEQ ID NO: 37424 - protein, 123 aa, Zea mays subsp. mays
MPNDSVATMDPNAATHAGRLTNQGYIVRRDIYSVDVAVPIQPYIIVNRPDLQILKTKQAVKMRNNVCHNAGTTVDTFLRENLVWFVLYSVLAINCLAFSILIETIATHGHLTILFMIGIFLKY

SEQ ID NO: 37425 - DNA, 1715 bp, Zea mays subsp. mays
atatagtttattttatctttgatgagaaagctcttctaattaattcaagactgccttgattttcccagttattactcgagcgcgctgaggcaactctgaactaagctggtagtaggtatgcttccctccagcaccttgaagatcgaggtttttctttttgaaaagcggatttatccatcgtctttgtttgttaaagtaaagtaaagtatggaattctcaccaagagctgcggaacttacgactctattagaaagtagaatgatcaacttttacacgaatttgaaagtggatgagatcggtcgagtggtctcagttggagatggagagcccgcgcagccccgaggcggagatcggccaccgggtggaggacctctgggaggtggcggagccgcagctctcgccgtcggagaagctcaactcctgcttcgaggacatccccgtcgcgtccttcccgcgcacgcacccgtcccaagtcattgagattccttcagatgcaagtcttgctgaaactgtagaaatattatccaaaaacaaaatcttgagtgcacccataagaaatgttgaggctccagaagatgctagttggatggacaaatacatcggcattgtggaatttgctggtattgccatgtggttgctcagtcagtctgatgctgcagttaatgggacggttggttcgggaccaggatcgcctgtctccagtctagtttcgaggttgggttctttcacattcagaaggacatcatctggaagattagaaactgctactgattctgaatcagacgaagcagcatcggttggtgggagcttttttgaaaccctgacttcctctgaattctacaagaatacaaaggttggcgatatctcagggagcttccgctgggcaccatttcttgcactgcagacatctgacacattccttaccatgttgctgcttctatccaagtacagaatgaagagccttccagttgtagaagtgggaggagataagattgagaacattatcacacaatcctctgtcgtacacatgcttgcagagtgtgttgggctctcctggtttgagaactggggaaagggagttggtggcttgccagtcatggacacaagtggagcaaatgccattggtaatattagcatcagagatgtccagtatcttttaactgctcccaagatatacaaagagcacaggtcaatcacgacaaaggatttccttagtgctgttcgacaccacctccaggagcagcgtgaggcctcaccgttgctgcatgatgtcatcacttgcaaaaaggatgatacaatcaaggacatcatactgaagctggactctgagaagatccacaggatctacgttgtggatgacaaagggaacaccgagggagtcatcaccttgagggacataatctccaagctggtgcatgagccacgccattactttggggatttctttgatggtgttgttcccctgcctgcaaacagcaccgtatgacacatcttcgcggtccaatcacactgatgtatctgtgcaaatgtacattttgagctattctcttctgaagttgcttctagtgtattccttttctcagccttctcggttctcaggtaaacagaccattgcctacatggagaaaaggactaatgctctaatggatggatggcaatgttgtacattgaataatcaaaaaaaaaaaaaaaaaaaactcgagggggggcccggt

SEQ ID NO: 37426 - protein, 398 aa, Zea mays subsp. mays
MRSVEWSQLEMESPRSPEAEIGHRVEDLWEVAEPQLSPSEKLNSCFEDIPVASFPRTHPSQVIEIPSDASLAETVEILSKNKILSAPIRNVEAPEDASWMDKYIGIVEFAGIAMWLLSQSDAAVNGTVGSGPGSPVSSLVSRLGSFTFRRTSSGRLETATDSESDEAASVGGSFFETLTSSEFYKNTKVGDISGSFRWAPFLALQTSDTFLTMLLLLSKYRMKSLPVVEVGGDKIENIITQSSVVHMLAECVGLSWFENWGKGVGGLPVMDTSGANAIGNISIRDVQYLLTAPKIYKEHRSITTKDFLSAVRHHLQEQREASPLLHDVITCKKDDTIKDIILKLDSEKIHRIYVVDDKGNTEGVITLRDIISKLVHEPRHYFGDFFDGVVPLPANSTV

SEQ ID NO: 37427 - protein, 388 aa, Zea mays subsp. mays
MESPRSPEAEIGHRVEDLWEVAEPQLSPSEKLNSCFEDIPVASFPRTHPSQVIEIPSDASLAETVEILSKNKILSAPIRNVEAPEDASWMDKYIGIVEFAGIAMWLLSQSDAAVNGTVGSGPGSPVSSLVSRLGSFTFRRTSSGRLETATDSESDEAASVGGSFFETLTSSEFYKNTKVGDISGSFRWAPFLALQTSDTFLTMLLLLSKYRMKSLPVVEVGGDKIENIITQSSVVHMLAECVGLSWFENWGKGVGGLPVMDTSGANAIGNISIRDVQYLLTAPKIYKEHRSITTKDFLSAVRHHLQEQREASPLLHDVITCKKDDTIKDIILKLDSEKIHRIYVVDDKGNTEGVITLRDIISKLVHEPRHYFGDFFDGVVPLPANSTV

SEQ ID NO: 37428 - protein, 299 aa, Zea mays subsp. mays
MDKYIGIVEFAGIAMWLLSQSDAAVNGTVGSGPGSPVSSLVSRLGSFTFRRTSSGRLETATDSESDEAASVGGSFFETLTSSEFYKNTKVGDISGSFRWAPFLALQTSDTFLTMLLLLSKYRMKSLPVVEVGGDKIENIITQSSVVHMLAECVGLSWFENWGKGVGGLPVMDTSGANAIGNISIRDVQYLLTAPKIYKEHRSITTKDFLSAVRHHLQEQREASPLLHDVITCKKDDTIKDIILKLDSEKIHRIYVVDDKGNTEGVITLRDIISKLVHEPRHYFGDFFDGVVPLPANSTV

SEQ ID NO: 37429 - DNA, 1655 bp, Zea mays subsp. mays
gacacataagtttctctcacgttctcttttttaattttaatttctcgccggaaacaatctcatctcccggcgaacgaaacttccggtgtggtactgcaaacggagaaaaaaataaccaaagaagagagaaactcaaaagctactaagatggaatcagaattccagcaacatcacttccttctccacgatcatcaacaccagagaccaagaaactcaggattgattcgttaccaatcagcaccaagttcgtacttttcgagtttcggtgaatcaatcgaagagtttttagatcgacccacaagtcctgaaactgagcgaatcttatctggctttttacaaaccaccgacacaagcgacaacgttgatagtttccttcaccatacttttaacagtgatggaactgagaagaaacctccggaagttaaaacagaggacgaagatgctgaaattccggtgactgcgacggcgacggcgatggaggttgttgtttccggtgatggtgaaatctcagtgaatcctgaagtatcgattgggtatgtggcttcggtttcgaggaataagagaccaagagagaaagatgatcggactccggtgaataatctagctcgtcataatagttcaccggccggattattttcatccattgatgttgaaacagcttatgcagctgtaatgaaaagtatgggaggttttggaggaagtaatgtgatgagtacaagcaatactgaagcttcgtctcttactcctagaagcaagttacttcctcctacttctagagcgatgagtccgatctctgaggttgatgttaaacccggtttctcgtctagattgcctcctcggacgctttccggtgggtttaatcgttcttttgggaatgaagggtctgcttcttccaagcttacagctcttgctaggacccaatctggaggtctagatcaatacaaaaccaaggatgaggattcagcaagtagacgtcctcctttggcacatcacatgagtttgcccaagtctttatcagatattgaacagttactgtcagattctatcccatgtaagatcagagccaagcggggttgtgcaactcatcctcgaagcatagccgagagggtgagaagaaccaagatcagtgaaagaatgaggaagctgcaagaccttgttccaaacatggacacgcaaacaaacacagcagacatgttggatcttgcggttcagtacatcaaggacctgcaagaacaagtgaaggcgctcgaagagagtcgggcaagatgtagatgctctagtgcgtgaaactagaagtgggagtatgcgcgagtgctagccagggagggagttgtgcatagaagtatcggttcggcctttggagaaaagtcgaagatagcgagttagagaagagatcatgaacaaagctaaatttggttggatgatggtgaaaagggttttgtaaagttggaaccttttttttggtagggaagaaagtagcaaggttgtgtaatggtccgaactccaatgctattgtatgttcttacaccccaaaaaaaagaaaagcagaagagaagtgatgtacaatgagaagcttattttattgtaactcaagaataattcagggtaattagtttaaaaaaaaaaaaaaaaaaactcgagggggggcccggtac

SEQ ID NO: 37430 - protein, 379 aa, Zea mays subsp. mays
MESEFQQHHFLLHDHQHQRPRNSGLIRYQSAPSSYFSSFGESIEEFLDRPTSPETERILSGFLQTTDTSDNVDSFLHHTFNSDGTEKKPPEVKTEDEDAEIPVTATATAMEVVVSGDGEISVNPEVSIGYVASVSRNKRPREKDDRTPVNNLARHNSSPAGLFSSIDVETAYAAVMKSMGGFGGSNVMSTSNTEASSLTPRSKLLPPTSRAMSPISEVDVKPGFSSRLPPRTLSGGFNRSFGNEGSASSKLTALARTQSGGLDQYKTKDEDSASRRPPLAHHMSLPKSLSDIEQLLSDSIPCKIRAKRGCATHPRSIAERVRRTKISERMRKLQDLVPNMDTQTNTADMLDLAVQYIKDLQEQVKALEESRARCRCSSA

SEQ ID NO: 37431 - protein, 270 aa, Zea mays subsp. mays
MEVVVSGDGEISVNPEVSIGYVASVSRNKRPREKDDRTPVNNLARHNSSPAGLFSSIDVETAYAAVMKSMGGFGGSNVMSTSNTEASSLTPRSKLLPPTSRAMSPISEVDVKPGFSSRLPPRTLSGGFNRSFGNEGSASSKLTALARTQSGGLDQYKTKDEDSASRRPPLAHHMSLPKSLSDIEQLLSDSIPCKIRAKRGCATHPRSIAERVRRTKISERMRKLQDLVPNMDTQTNTADMLDLAVQYIKDLQEQVKALEESRARCRCSSA

SEQ ID NO: 37432 - protein, 204 aa, Zea mays subsp. mays
MKSMGGFGGSNVMSTSNTEASSLTPRSKLLPPTSRAMSPISEVDVKPGFSSRLPPRTLSGGFNRSFGNEGSASSKLTALARTQSGGLDQYKTKDEDSASRRPPLAHHMSLPKSLSDIEQLLSDSIPCKIRAKRGCATHPRSIAERVRRTKISERMRKLQDLVPNMDTQTNTADMLDLAVQYIKDLQEQVKALEESRARCRCSSA

SEQ ID NO: 37433 - DNA, 1518 bp, Zea mays subsp. mays
gactctactactcaatctcagtaaacataaagaacacaaccatgcttaggtttgattacttactaatcacggcacttgccatttcaactgtttcggttgtcatggcccaagtccctcccgagaaacaattcagagtgctcaacgaacccggctacgccccatacatcaccgagtacgacgcgagttaccgattcctcaactcacagaatcagaatttcttcacaattcctttccagctcatgttttacaatacaactcctagcgcctacgtgttagctctccgagtcggaacgaggcgtgacatgagtttcacgcgttggatctgggacgccaatcgcaacaaccccgtcggagacaactccacactctcattcggccgaaacggaaaccttgtgctcgctgagttaaacggccaagtcaagtggcagactaacacagccaacaaaggcgtcaccggattccaaatcttgcccaatggaaacatggtgctacacgacaaacatggaaaattcgtttggcagagtttcgatcatcccaccgatacactcctcgtcggccaatccctaaaagttaacggagttaacaaactcgttagccgtacatctgatatgaacggctccgatggtccgtacagcatggtgttggacaacaaaggcttaaccatgtacgttaacaaaaccggtacgccgttagtttacgggggatggacggatcacgacttccgcggtaccgtcacgttcgccgttacaagagagttcgataatttaacggagccgtcagcttacgagcttctcttagaacccgcaccacaacccgctacgaacccgggtaataaccgccggttactccaagttagaccaatcggaagcggaggaggaactttaaacttaaacaaaatcaactacaatggaacgatatcgtatctgagacttggatccgacggtagcctcaaggccttctcgtatttccctgccgcgacgtatctcgaatgggaagagactttcgctttcttctccaattacttcgtccgtcaatgcggtttgccgacgttttgcggcgattacggttactgcgatcgaggaatgtgcgtcggatgccctacaccgaaaggtctgttagcttggagtgataaatgcgctccacctaaaacgacgcagttttgcagcggaggcaagggtaaagctgtcaattattacaagatagtcggtgttgagcattttactgggccgtatgttaatgatggacaaggcccaacttctgtgaacgattgcaaggctaagtgcgatcgtgattgcaagtgtttgggttacttctacaaggagaaggacaagaaatgtttgcttgctcctcttcttggtacacttatcaaagatgccaacacttcttccgttgcttacatcaaatattagcgagatttataaaccgaaaccaacgtgaattctcatagatttaatgaataattggtgttgttacaaaaaaaaaaaaaaaaaaaactcgagggggggcccggtacccaat

SEQ ID NO: 37434 - protein, 468 aa, Zea mays subsp. mays
LYYSISVNIKNTTMLRFDYLLITALAISTVSVVMAQVPPEKQFRVLNEPGYAPYITEYDASYRFLNSQNQNFFTIPFQLMFYNTTPSAYVLALRVGTRRDMSFTRWIWDANRNNPVGDNSTLSFGRNGNLVLAELNGQVKWQTNTANKGVTGFQILPNGNMVLHDKHGKFVWQSFDHPTDTLLVGQSLKVNGVNKLVSRTSDMNGSDGPYSMVLDNKGLTMYVNKTGTPLVYGGWTDHDFRGTVTFAVTREFDNLTEPSAYELLLEPAPQPATNPGNNRRLLQVRPIGSGGGTLNLNKINYNGTISYLRLGSDGSLKAFSYFPAATYLEWEETFAFFSNYFVRQCGLPTFCGDYGYCDRGMCVGCPTPKGLLAWSDKCAPPKTTQFCSGGKGKAVNYYKIVGVEHFTGPYVNDGQGPTSVNDCKAKCDRDCKCLGYFYKEKDKKCLLAPLLGTLIKDANTSSVAYIKY

SEQ ID NO: 37435 - protein, 455 aa, Zea mays subsp. mays
MLRFDYLLITALAISTVSVVMAQVPPEKQFRVLNEPGYAPYITEYDASYRFLNSQNQNFFTIPFQLMFYNTTPSAYVLALRVGTRRDMSFTRWIWDANRNNPVGDNSTLSFGRNGNLVLAELNGQVKWQTNTANKGVTGFQILPNGNMVLHDKHGKFVWQSFDHPTDTLLVGQSLKVNGVNKLVSRTSDMNGSDGPYSMVLDNKGLTMYVNKTGTPLVYGGWTDHDFRGTVTFAVTREFDNLTEPSAYELLLEPAPQPATNPGNNRRLLQVRPIGSGGGTLNLNKINYNGTISYLRLGSDGSLKAFSYFPAATYLEWEETFAFFSNYFVRQCGLPTFCGDYGYCDRGMCVGCPTPKGLLAWSDKCAPPKTTQFCSGGKGKAVNYYKIVGVEHFTGPYVNDGQGPTSVNDCKAKCDRDCKCLGYFYKEKDKKCLLAPLLGTLIKDANTSSVAYIKY

SEQ ID NO: 37436 - protein, 435 aa, Zea mays subsp. mays
MAQVPPEKQFRVLNEPGYAPYITEYDASYRFLNSQNQNFFTIPFQLMFYNTTPSAYVLALRVGTRRDMSFTRWIWDANRNNPVGDNSTLSFGRNGNLVLAELNGQVKWQTNTANKGVTGFQILPNGNMVLHDKHGKFVWQSFDHPTDTLLVGQSLKVNGVNKLVSRTSDMNGSDGPYSMVLDNKGLTMYVNKTGTPLVYGGWTDHDFRGTVTFAVTREFDNLTEPSAYELLLEPAPQPATNPGNNRRLLQVRPIGSGGGTLNLNKINYNGTISYLRLGSDGSLKAFSYFPAATYLEWEETFAFFSNYFVRQCGLPTFCGDYGYCDRGMCVGCPTPKGLLAWSDKCAPPKTTQFCSGGKGKAVNYYKIVGVEHFTGPYVNDGQGPTSVNDCKAKCDRDCKCLGYFYKEKDKKCLLAPLLGTLIKDANTSSVAYIKY

SEQ ID NO: 37437 - DNA, 1106 bp, Zea mays subsp. mays
  misc_feature (964)..(964): n is a, c, g, or t
gctccccgcggtggcggccgctctagaactagtggatcccccgggctgcaggcccccccccccccccccgtctctatttctccccctacaaacaagcaaatgagctactgctatggttacaaattcatgaattgtcccctgttttcaggttcagggaagatgcaacctcatgagaaggttgctgttctgaagcctgttgcctccaggcctttctccagcttctggcccttcccaaagtttctgcacgacttcaacgccacttgttccccaacaatcaccttcccacaggagactgagctaatcaggccaaaagccactcggttggcatcgctgccgggtgaccttccaacacagattgcagcaacgacagatgccgggtcggataccatgtctgaggaggtggaagggtatgcaaaacatcacacgtatcgtgaccatgcaacagcgtgccaagctgcgaggcggaatggtgagcgcagtcgcctgtcacttgacgggtacagctggaggaaatacgggcaaaagaaagtgaaaggcagcgagttcccgcggagctactacaagtgcactcaccctagctgccctgtgaagaggaaggtggagacgacgccagacggccaggttgctgagatcgtgtacagtggtgagcacaaccacctgaagccgggcaagccttgtcccccgaggaagccattgctgtcgacaagcacagatgctgtgatgtgtgacacgcatggtattgacgacatgacgccgccggagtagagacgaagacaaccaggagttcagattcttcgttccagtacttaaatctagctaagctgctggtttcacaattccattaaagattgctgcctttacttttctttattttgtttacaactccaagtcactcttacagttgtcataccagctgtttgattcatcattcatacacatcaatggcaattgcatgctctcttanaaaaaaaaaaaaaaaaaaaaaaaaaaaaaaaaaaaaaaaaaaaaaaaaaaaaaaaaaaacctcgaggggggccccggaaccaaattcccccaaaagggagccaaataaaaattcactggccgccttttaaaaacgccggaac

SEQ ID NO: 37438 - protein, 254 aa, Zea mays subsp. mays
APRGGGRSRTSGSPGLQAPPPPPVSISPPTNKQMSYCYGYKFMNCPLFSGSGKMQPHEKVAVLKPVASRPFSSFWPFPKFLHDFNATCSPTITFPQETELIRPKATRLASLPGDLPTQIAATTDAGSDTMSEEVEGYAKHHTYRDHATACQAARRNGERSRLSLDGYSWRKYGQKKVKGSEFPRSYYKCTHPSCPVKRKVETTPDGQVAEIVYSGEHNHLKPGKPCPPRKPLLSTSTDAVMCDTHGIDDMTPPE

SEQ ID NO: 37439 - protein, 221 aa, Zea mays subsp. mays
MSYCYGYKFMNCPLFSGSGKMQPHEKVAVLKPVASRPFSSFWPFPKFLHDFNATCSPTITFPQETELIRPKATRLASLPGDLPTQIAATTDAGSDTMSEEVEGYAKHHTYRDHATACQAARRNGERSRLSLDGYSWRKYGQKKVKGSEFPRSYYKCTHPSCPVKRKVETTPDGQVAEIVYSGEHNHLKPGKPCPPRKPLLSTSTDAVMCDTHGIDDMTPPE

SEQ ID NO: 37440 - protein, 212 aa, Zea mays subsp. mays
MNCPLFSGSGKMQPHEKVAVLKPVASRPFSSFWPFPKFLHDFNATCSPTITFPQETELIRPKATRLASLPGDLPTQIAATTDAGSDTMSEEVEGYAKHHTYRDHATACQAARRNGERSRLSLDGYSWRKYGQKKVKGSEFPRSYYKCTHPSCPVKRKVETTPDGQVAEIVYSGEHNHLKPGKPCPPRKPLLSTSTDAVMCDTHGIDDMTPPE

SEQ ID NO: 37441 - DNA, 1319 bp, Zea mays subsp. mays
tctctaatttcctttctctctcaagcttctcagaaagtctgacactttcgagaatctaatctccaaatttcttgtctttttggagaaggaatcgaattatgtacaaggaacgtagtggaggaggtggtggtgggtcatcgagatcagagatcctcggtggagctattgatcggaaacgaatcaacgatgcactcaataagaaactagagaaatcttcaacttccaccaccacatctagggttttctcttctaaagacaaagatcccttttccttcacatctactaaaactcagcttcctgatgtggaatcggaaactgatagtgaagggtctgatgtgagtggatcggagggtgatgatacgtcgtggatctcttggttttgtaatttgagagggaatgatttcttctgtgaagtcgatgaagattatattcaagatgatttcaatctttgtggtttaagtggtcaagtcccttactatgattatgcacttgatctcattttagatgttgatgcttccaacagtgagatgtttactgatgaacagcatgaaatggtggaatcagctgctgagatgctatatggtcttattcatgttcgttacattttgactactaaaggaatggctgcaatgactgagaagtacaagaactgtgatttcgggagatgcccgagagttttctgttgcggtcagtcttgtcttccagttggacaatccgatatcccgagatcgagtactgtgaagatatactgccctaaatgcgaggatatatcttacccgcgatctaaattccaaggcaatattgatggagcgtactttggaaccacattccctcacttgttcttgatgacttacgggaacttaaagccgcagaagcctactcaaagctatgtcccaaaaatctttggcttcaaggtacacaaaccatgatactagtgctctgcattctcaatggatacatttagtggctctgtaattgcatccggatgagcaactgaaatgatagctgcggtgactggagcatacatcaaccattgggttagaggatgagagctgaagttgaaagatggaatcttgaaagaatctcatgaagttccaagaaaacttagaagtgcaacagcctggctcattgggggaaaagaacgacatacttgggtcttgttgttgtctccgaaaagattttccccagttagttggattttgttttgaactgttggattattattcgtttttctaatttcatgtaaaactcataaatttcaactgaagtataacttagatcgaaaaaaaaaaaaaaaaaaactcgagggggggcccggt

SEQ ID NO: 37442 - protein, 276 aa, Zea mays subsp. mays
MYKERSGGGGGGSSRSEILGGAIDRKRINDALNKKLEKSSTSTTTSRVFSSKDKDPFSFTSTKTQLPDVESETDSEGSDVSGSEGDDTSWISWFCNLRGNDFFCEVDEDYIQDDFNLCGLSGQVPYYDYALDLILDVDASNSEMFTDEQHEMVESAAEMLYGLIHVRYILTTKGMAAMTEKYKNCDFGRCPRVFCCGQSCLPVGQSDIPRSSTVKIYCPKCEDISYPRSKFQGNIDGAYFGTTFPHLFLMTYGNLKPQKPTQSYVPKIFGFKVHKP

SEQ ID NO: 37443 - DNA, 1960 bp, Zea mays subsp. mays
gaacttcagtagattgagggatctaagagagtcaagggtagctgaagtagttccattgaaagaagttgaagaggaaatcatgtccagaaggcatacagaaatttctgatgataatacaccacctgagcaggaaagagagccaaagcaaggtgggaccggaaaaccaagtcagttggtggatacttcaaccaaagctacatctgagcaggttgctgcaaagttggaggaaagtgaaatggaaaaagaattatgtgcagaggcagaggacccttcagagttcatcactcatcgagccaaagattttgtgtcgagcatgaaggacattgaaacccggtttatgcgtgcagctgaagcaggaaatgaggtttccagaatgcttgaaaccaagaagatccgacttgacatatgtgctaaaataccaggttctccagtcaagctaccttctgcccgatttgtgtcagcacttcgagtgtgctgcaatcgtgatgttattctcaaccaggaaactgcgcagcatgtttcaaaggttgtcacatggaagcgttctgtctcatctctttcatcatcatctaagagtgcacttatgacatcgataatgaaagatgatgtggatgacagtaatagtgattttgttgaggaattcgccatggtatccggaagccattcttctacgttggacaggctacacgcatgggagagaaaactatatgatgaaatcaaggcaagtgaaaatgttaggaaggcctatgatgagaaatgtaacctactccgacgccaatttgcacgaggcctaaatgcgcaggtgattgataagactagagctgttgtgaaggatctccattccagggtatctgttgtgattcaagctgttgatgcaatctccaaaagaattgagaagataagggatgaagaactgcagccacagcttgtcgagctaattcaagggctaatcagaatgtggaaactgatgctggaatgtcaccacaaacagttcatcacgatcacattagcataccacgtgaaagactcgacctcggcgcgtcaaggtgagcaccaccatcaccgccaggcggcgatgcatctgtggaatgagatggacagcttctcctccagcttcagaaactgggtcaccgctcacaaatcgtacgtcgaggccctcaacgcgtggctccagaagtgcgtcctgcagccgccccaggaccggcgcaggcgcaaacgcaaggtctccttccctcctcggcaggccgtctcccctcccatattcatcctctgcggggactggctcgccaggacagaacctctccctgctgacgagctatgcagatccctcaaagacgtgatgcagctcctccgcgactcgttcgagcaccgcgacgagcagaacaggcccagaagcggcgagtcgcaggagtgcgggatgctggagaacagtagcgagcaggaggcggcggctaagagtgggagttgtgcagcatcagctgaagggctgcagtcgagactgacggcggttcttgaccgcctgacaaagttctcggaggcatcactgaagtgctacgaggagctcaagcagaactacgagatggcctgtgctgattataggagagttggaccaaatgctcagcttgcttaggattgatgttggttgtggtgtgtgacttcttgctatctctgttctggatgacaaattctctagtgttttggtatatattttgtgaacaatcaggtgatagcacaatctttggccgaatattactgatgatttagtgctatcagttatgtatgctccactgtgggccctgccctgatgcttcgaaaggcctatgagaaccgttttcaccacgatataacaggcaaaatataccatgatttctgtgcgctaaaaaaaaaaaaaaaaaaaactcgagggggggcccggtacccaattcgtgttaaacacaataaagttggaacgggagggggg

SEQ ID NO: 37444 - protein, 542 aa, Zea mays subsp. mays
NFSRLRDLRESRVAEVVPLKEVEEEIMSRRHTEISDDNTPPEQEREPKQGGTGKPSQLVDTSTKATSEQVAAKLEESEMEKELCAEAEDPSEFITHRAKDFVSSMKDIETRFMRAAEAGNEVSRMLETKKIRLDICAKIPGSPVKLPSARFVSALRVCCNRDVILNQETAQHVSKVVTWKRSVSSLSSSSKSALMTSIMKDDVDDSNSDFVEEFAMVSGSHSSTLDRLHAWERKLYDEIKASENVRKAYDEKCNLLRRQFARGLNAQVIDKTRAVVKDLHSRVSVVIQAVDAISKRIEKIRDEELQPQLVELIQGLIRMWKLMLECHHKQFITITLAYHVKDSTSARQGEHHHHRQAAMHLWNEMDSFSSSFRNWVTAHKSYVEALNAWLQKCVLQPPQDRRRRKRKVSFPPRQAVSPPIFILCGDWLARTEPLPADELCRSLKDVMQLLRDSFEHRDEQNRPRSGESQECGMLENSSEQEAAAKSGSCAASAEGLQSRLTAVLDRLTKFSEASLKCYEELKQNYEMACADYRRVGPNAQLA

SEQ ID NO: 37445 - protein, 516 aa, Zea mays subsp. mays
MSRRHTEISDDNTPPEQEREPKQGGTGKPSQLVDTSTKATSEQVAAKLEESEMEKELCAEAEDPSEFITHRAKDFVSSMKDIETRFMRAAEAGNEVSRMLETKKIRLDICAKIPGSPVKLPSARFVSALRVCCNRDVILNQETAQHVSKVVTWKRSVSSLSSSSKSALMTSIMKDDVDDSNSDFVEEFAMVSGSHSSTLDRLHAWERKLYDEIKASENVRKAYDEKCNLLRRQFARGLNAQVIDKTRAVVKDLHSRVSVVIQAVDAISKRIEKIRDEELQPQLVELIQGLIRMWKLMLECHHKQFITITLAYHVKDSTSARQGEHHHHRQAAMHLWNEMDSFSSSFRNWVTAHKSYVEALNAWLQKCVLQPPQDRRRRKRKVSFPPRQAVSPPIFILCGDWLARTEPLPADELCRSLKDVMQLLRDSFEHRDEQNRPRSGESQECGMLENSSEQEAAAKSGSCAASAEGLQSRLTAVLDRLTKFSEASLKCYEELKQNYEMACADYRRVGPNAQLA

SEQ ID NO: 37446 - protein, 464 aa, Zea mays subsp. mays
MEKELCAEAEDPSEFITHRAKDFVSSMKDIETRFMRAAEAGNEVSRMLETKKIRLDICAKIPGSPVKLPSARFVSALRVCCNRDVILNQETAQHVSKVVTWKRSVSSLSSSSKSALMTSIMKDDVDDSNSDFVEEFAMVSGSHSSTLDRLHAWERKLYDEIKASENVRKAYDEKCNLLRRQFARGLNAQVIDKTRAVVKDLHSRVSVVIQAVDAISKRIEKIRDEELQPQLVELIQGLIRMWKLMLECHHKQFITITLAYHVKDSTSARQGEHHHHRQAAMHLWNEMDSFSSSFRNWVTAHKSYVEALNAWLQKCVLQPPQDRRRRKRKVSFPPRQAVSPPIFILCGDWLARTEPLPADELCRSLKDVMQLLRDSFEHRDEQNRPRSGESQECGMLENSSEQEAAAKSGSCAASAEGLQSRLTAVLDRLTKFSEASLKCYEELKQNYEMACADYRRVGPNAQLA

SEQ ID NO: 37447 - DNA, 703 bp, Zea mays subsp. mays
gatcacaaccatttctctctctcgtcttcgtcttcttcttcttcaacgttcctctccaaaatcctcagaccaagaaatcatcatggccgtcgatctaatgcgtttccctaagatagatgatcaaacggctattcaggaagctgcatcgcaaggtttacaaagtatggaacatctgatccgtgtcctctctaaccgtcccgaacaacaacacaacgttgactgctccgagatcactgacttcaccgtttctaaattcaaaaccgtcatttctctccttaaccgtactggtcacgctcggttcagacgcggaccggttcactccacttcctctgccgcatctcagaaactacagagtcagatcgttaaaaatactcaacctgaggctccgattgtttctcagccagtgagaacaactacgaatcaccctcaaatcgttcctccaccgtctagtgtaacactcgatttctctaaaccaagcatcttcggcaccaaagctaagagcgccgagctggaattctccaaagaaaacttcagtgtttctttaaactcctcattcatgtcgtcggcgataaccggagacggcagcgtctccaatggaaaaatcttccttgcttctgctccgtcgcagcctgttaactcttccggaaaaccaccgttggctggtcatccttacagaaagagatgtctcgagggggggcccggt

SEQ ID NO: 37448 - protein, 234 aa, Zea mays subsp. mays
ITTISLSRLRLLLLQRSSPKSSDQEIIMAVDLMRFPKIDDQTAIQEAASQGLQSMEHLIRVLSNRPEQQHNVDCSEITDFTVSKFKTVISLLNRTGHARFRRGPVHSTSSAASQKLQSQIVKNTQPEAPIVSQPVRTTTNHPQIVPPPSSVTLDFSKPSIFGTKAKSAELEFSKENFSVSLNSSFMSSAITGDGSVSNGKIFLASAPSQPVNSSGKPPLAGHPYRKRCLEGGPG

SEQ ID NO: 37449 - protein, 207 aa, Zea mays subsp. mays
MAVDLMRFPKIDDQTAIQEAASQGLQSMEHLIRVLSNRPEQQHNVDCSEITDFTVSKFKTVISLLNRTGHARFRRGPVHSTSSAASQKLQSQIVKNTQPEAPIVSQPVRTTTNHPQIVPPPSSVTLDFSKPSIFGTKAKSAELEFSKENFSVSLNSSFMSSAITGDGSVSNGKIFLASAPSQPVNSSGKPPLAGHPYRKRCLEGGPG

SEQ ID NO: 37450 - protein, 202 aa, Zea mays subsp. mays
MRFPKIDDQTAIQEAASQGLQSMEHLIRVLSNRPEQQHNVDCSEITDFTVSKFKTVISLLNRTGHARFRRGPVHSTSSAASQKLQSQIVKNTQPEAPIVSQPVRTTTNHPQIVPPPSSVTLDFSKPSIFGTKAKSAELEFSKENFSVSLNSSFMSSAITGDGSVSNGKIFLASAPSQPVNSSGKPPLAGHPYRKRCLEGGPG

SEQ ID NO: 37451 - DNA, 2805 bp, Zea mays subsp. mays
ggaaaagatcccctgcagaggacatgagaaacggcgttgcagattccaaaacccatcagaaaacttctgtcttttctggacaaaaggttcgtgaagttttccaattaaaacgcggaacatattcagatcttactgctgccaagatttcagagatgatgcactctaatagcttagataatgcaccgacacagtcgcttattagtgttgttaatggtattttggatgaaagcatagaaaggaaaaagggagaaataccacatcgtgtagtttacttactgcggaaagtcgttcaagagattgagcaccgtctctgtattcaagcagagcacataagaagtcaaaatgttaccatcaagacaagagaacaaaagtactgttcaaaaattaaagcacttgaaatgttggtaaatggcacaaatgaagaaaaccagatggcaataaacaggcttcagatagtcaagaatgagaagtcacaaatcgaagagaaaaaagaactctgtgagaaagatgttcaacgattaatgaaagagaaagaatattccaaaagcatcataatgaacctaacaaaagatatggaagccatgaatagattgcatgagcagcaacttgagcaaattggaagaaaggcaaaggaaatggaggaacaattaaccaccagggtaaaagaagtagagtatctcttgctacaatcgaataagaaagttgaagaacttgagattgcttctaagctaaaatcacagttatgggatcagaaagagaacatttttcagagttacatggataatcaacaattagttatcaaggacataagaatattgtcacagtcatatgaaaatgatatgtatgcacttcaaatgcagtggagaaatgaaatctctaacttaggatctgggttaaaatgtttggttgatgccgctgaaaattatcataaagtcctgacagagaaccaaaagttatttaatgaagtgcaagaactaaaaggtaatataagagtatattgtcgtgttaggccatttctttccggtcaagataaaaagtccaccacaattgactacatgggggaaaatggtgagcttcttatatcaaatccatttaagcaagggaaggacggacatagaatgttcaagtttaataaagtgtttactccatttgcttcccaagctgaggttttttctgacatacaaccactgatccgatcagttctggatggattcaacgtttgtatttttgcatatggccagactggttctggcaaaacttacactatgagtgggcctaccacatcaaaacaagattggggtgtcaattatcgagctttaaatgatttgtttgatatttcactaagtaggagaaatgccttctcatatgaggtgggggtacaaatggttgagatatacaatgaacaagtccgtgatctgctatcaaatgatattgcacaaagaagacttgggatttggaacacttctcaacccaatgggcttgttgttccagatgcaagcttgcactcagttaagtcgacatctgatgtattagacttgatggagattggacaagcaaatagagcagttggttcaacagcgctaaatgaacgaagtagtcggtcacacagtattctaactgtacatgttcgagggatggatttgaagaatggatcaacctctaggggttgtttgcatcttattgatcttgctggtagtgagagggtagagaagtctgaagtaaccggcgatagattaaaagaagctcaatacattaacaaatcactctctgcgttaggtgatgttatttttgctttgtcacagaaaagtgcccatgtgccttatagaaacagcaagttaacacaagttcttcaaagttctttaggtggacaagcaaaaactctaatgtttgttcagataaatcctgatgttgagtcatattcagaaactataagtactttaaagtttgctgaaagggtgtctggagtagagttaggtgctgctagaagtaacaaggagggaaaagatataaaagagctattggaacaggttgcgtctttgaaagacacaattttgcgcaaagatatggaaatagagcagatccaggtcatcaaagacaaagtaaaatccccaaatttgttgttagatagaaatgtgcctggcttgacgaagactacagcaaaccaacctagccaactattatcaggcgaacgaatgcttaagtctagtgacagagttctatcggatcgtcagagttacggcgaggtgaatgtagatcctaaccaccatgtgatggatactgcaccagtgagcatagatgaagcaggatatgagaacaatgcatcggatgatggtttatcgggtgaaaccgagaatgataattcagctgctgagatgacagcggaacggctgcatagatttccatcaagaataagcaggttcactctcacaaagaacgggcagccatctatgtctagatcgaacccaaaggatgctaagactccaagcaatacgaaagctccatcgagccggttgacaggaggctcttcagccaggtctaaaagacggcagtagagcacgatcatgttgctcgttttgatgtgcattgtagttgaaatgtgaatttggtgggtagttgtaggaccgttttatgattgtaactttagaaaatgtcagacactgatggcagaatatttgagacatttgtttgatcatttgcttatgccgagcaaaacagcaaacaatgctcgattgtatgtgaaacactctgacctgtgaccatttgaatgtcggtgcgcctccggaagtccggagttgtgtatatacc

SEQ ID NO: 37452 - protein, 849 aa, Zea mays subsp. mays
KRSPAEDMRNGVADSKTHQKTSVFSGQKVREVFQLKRGTYSDLTAAKISEMMHSNSLDNAPTQSLISVVNGILDESIERKKGEIPHRVVYLLRKVVQEIEHRLCIQAEHIRSQNVTIKTREQKYCSKIKALEMLVNGTNEENQMAINRLQIVKNEKSQIEEKKELCEKDVQRLMKEKEYSKSIIMNLTKDMEAMNRLHEQQLEQIGRKAKEMEEQLTTRVKEVEYLLLQSNKKVEELEIASKLKSQLWDQKENIFQSYMDNQQLVIKDIRILSQSYENDMYALQMQWRNEISNLGSGLKCLVDAAENYHKVLTENQKLFNEVQELKGNIRVYCRVRPFLSGQDKKSTTIDYMGENGELLISNPFKQGKDGHRMFKFNKVFTPFASQAEVFSDIQPLIRSVLDGFNVCIFAYGQTGSGKTYTMSGPTTSKQDWGVNYRALNDLFDISLSRRNAFSYEVGVQMVEIYNEQVRDLLSNDIAQRRLGIWNTSQPNGLVVPDASLHSVKSTSDVLDLMEIGQANRAVGSTALNERSSRSHSILTVHVRGMDLKNGSTSRGCLHLIDLAGSERVEKSEVTGDRLKEAQYINKSLSALGDVIFALSQKSAHVPYRNSKLTQVLQSSLGGQAKTLMFVQINPDVESYSETISTLKFAERVSGVELGAARSNKEGKDIKELLEQVASLKDTILRKDMEIEQIQVIKDKVKSPNLLLDRNVPGLTKTTANQPSQLLSGERMLKSSDRVLSDRQSYGEVNVDPNHHVMDTAPVSIDEAGYENNASDDGLSGETENDNSAAEMTAERLHRFPSRISRFTLTKNGQPSMSRSNPKDAKTPSNTKAPSSRLTGGSSARSKRRQ

SEQ ID NO: 37453 - protein, 842 aa, Zea mays subsp. mays
MRNGVADSKTHQKTSVFSGQKVREVFQLKRGTYSDLTAAKISEMMHSNSLDNAPTQSLISVVNGILDESIERKKGEIPHRVVYLLRKVVQEIEHRLCIQAEHIRSQNVTIKTREQKYCSKIKALEMLVNGTNEENQMAINRLQIVKNEKSQIEEKKELCEKDVQRLMKEKEYSKSIIMNLTKDMEAMNRLHEQQLEQIGRKAKEMEEQLTTRVKEVEYLLLQSNKKVEELEIASKLKSQLWDQKENIFQSYMDNQQLVIKDIRILSQSYENDMYALQMQWRNEISNLGSGLKCLVDAAENYHKVLTENQKLFNEVQELKGNIRVYCRVRPFLSGQDKKSTTIDYMGENGELLISNPFKQGKDGHRMFKFNKVFTPFASQAEVFSDIQPLIRSVLDGFNVCIFAYGQTGSGKTYTMSGPTTSKQDWGVNYRALNDLFDISLSRRNAFSYEVGVQMVEIYNEQVRDLLSNDIAQRRLGIWNTSQPNGLVVPDASLHSVKSTSDVLDLMEIGQANRAVGSTALNERSSRSHSILTVHVRGMDLKNGSTSRGCLHLIDLAGSERVEKSEVTGDRLKEAQYINKSLSALGDVIFALSQKSAHVPYRNSKLTQVLQSSLGGQAKTLMFVQINPDVESYSETISTLKFAERVSGVELGAARSNKEGKDIKELLEQVASLKDTILRKDMEIEQIQVIKDKVKSPNLLLDRNVPGLTKTTANQPSQLLSGERMLKSSDRVLSDRQSYGEVNVDPNHHVMDTAPVSIDEAGYENNASDDGLSGETENDNSAAEMTAERLHRFPSRISRFTLTKNGQPSMSRSNPKDAKTPSNTKAPSSRLTGGSSARSKRRQ

SEQ ID NO: 37454 - protein, 799 aa, Zea mays subsp. mays
MMHSNSLDNAPTQSLISVVNGILDESIERKKGEIPHRVVYLLRKVVQEIEHRLCIQAEHIRSQNVTIKTREQKYCSKIKALEMLVNGTNEENQMAINRLQIVKNEKSQIEEKKELCEKDVQRLMKEKEYSKSIIMNLTKDMEAMNRLHEQQLEQIGRKAKEMEEQLTTRVKEVEYLLLQSNKKVEELEIASKLKSQLWDQKENIFQSYMDNQQLVIKDIRILSQSYENDMYALQMQWRNEISNLGSGLKCLVDAAENYHKVLTENQKLFNEVQELKGNIRVYCRVRPFLSGQDKKSTTIDYMGENGELLISNPFKQGKDGHRMFKFNKVFTPFASQAEVFSDIQPLIRSVLDGFNVCIFAYGQTGSGKTYTMSGPTTSKQDWGVNYRALNDLFDISLSRRNAFSYEVGVQMVEIYNEQVRDLLSNDIAQRRLGIWNTSQPNGLVVPDASLHSVKSTSDVLDLMEIGQANRAVGSTALNERSSRSHSILTVHVRGMDLKNGSTSRGCLHLIDLAGSERVEKSEVTGDRLKEAQYINKSLSALGDVIFALSQKSAHVPYRNSKLTQVLQSSLGGQAKTLMFVQINPDVESYSETISTLKFAERVSGVELGAARSNKEGKDIKELLEQVASLKDTILRKDMEIEQIQVIKDKVKSPNLLLDRNVPGLTKTTANQPSQLLSGERMLKSSDRVLSDRQSYGEVNVDPNHHVMDTAPVSIDEAGYENNASDDGLSGETENDNSAAEMTAERLHRFPSRISRFTLTKNGQPSMSRSNPKDAKTPSNTKAPSSRLTGGSSARSKRRQ

SEQ ID NO: 37455 - DNA, 388 bp, Zea mays subsp. mays
  misc_feature (75)..(75): n is a, c, g, or t
  misc_feature (103)..(103): n is a, c, g, or t
  misc_feature (111)..(111): n is a, c, g, or t
  misc_feature (119)..(119): n is a, c, g, or t
  misc_feature (122)..(122): n is a, c, g, or t
  misc_feature (124)..(124): n is a, c, g, or t
  misc_feature (126)..(126): n is a, c, g, or t
  misc_feature (136)..(137): n is a, c, g, or t
  misc_feature (150)..(150): n is a, c, g, or t
  misc_feature (156)..(157): n is a, c, g, or t
  misc_feature (160)..(160): n is a, c, g, or t
  misc_feature (167)..(167): n is a, c, g, or t
  misc_feature (169)..(169): n is a, c, g, or t
  misc_feature (174)..(174): n is a, c, g, or t
  misc_feature (178)..(178): n is a, c, g, or t
  misc_feature (181)..(183): n is a, c, g, or t
  misc_feature (185)..(185): n is a, c, g, or t
  misc_feature (192)..(192): n is a, c, g, or t
  misc_feature (206)..(206): n is a, c, g, or t
  misc_feature (213)..(214): n is a, c, g, or t
  misc_feature (227)..(227): n is a, c, g, or t
  misc_feature (234)..(234): n is a, c, g, or t
  misc_feature (236)..(238): n is a, c, g, or t
  misc_feature (241)..(242): n is a, c, g, or t
  misc_feature (249)..(249): n is a, c, g, or t
  misc_feature (258)..(261): n is a, c, g, or t
  misc_feature (266)..(267): n is a, c, g, or t
  misc_feature (273)..(273): n is a, c, g, or t
  misc_feature (277)..(278): n is a, c, g, or t
  misc_feature (283)..(283): n is a, c, g, or t
  misc_feature (286)..(288): n is a, c, g, or t
  misc_feature (290)..(290): n is a, c, g, or t
  misc_feature (314)..(314): n is a, c, g, or t
  misc_feature (337)..(337): n is a, c, g, or t
  misc_feature (357)..(357): n is a, c, g, or t
gatccagaaaaagacgaacaacaatggcgttgcaatggctgattctatcgtatgtggtggccgtcgaagtagtantcaccctcgtgttgactctcccttaccntatgcttnttaatatnttntncncctattttcnnttttccctccccnttcccnnctntttcatnanatccncctnttnnntnttcttanttttctttactctnttatcanntatttttttctcnttttatntnnnccnntttttcntcctccccnnnnttccnnctcctnctannttatntannntnatccccccttcaaccccccttctntccctttttttttccctctattntgttcttcttttctcgtccncctgtttcttcactccttcttgttttttttt

SEQ ID NO: 37456 - protein, 128 aa, Zea mays subsp. mays
  misc_feature (25)..(25): Xaa can be any naturally occurring amino acid
  misc_feature (34)..(34): Xaa can be any naturally occurring amino acid
  misc_feature (37)..(37): Xaa can be any naturally occurring amino acid
  misc_feature (39)..(42): Xaa can be any naturally occurring amino acid
  misc_feature (45)..(45): Xaa can be any naturally occurring amino acid
  misc_feature (50)..(50): Xaa can be any naturally occurring amino acid
  misc_feature (52)..(53): Xaa can be any naturally occurring amino acid
  misc_feature (55)..(56): Xaa can be any naturally occurring amino acid
  misc_feature (58)..(61): Xaa can be any naturally occurring amino acid
  misc_feature (64)..(64): Xaa can be any naturally occurring amino acid
  misc_feature (68)..(68): Xaa can be any naturally occurring amino acid
  misc_feature (71)..(71): Xaa can be any naturally occurring amino acid
  misc_feature (75)..(75): Xaa can be any naturally occurring amino acid
  misc_feature (78)..(80): Xaa can be any naturally occurring amino acid
  misc_feature (83)..(83): Xaa can be any naturally occurring amino acid
  misc_feature (86)..(89): Xaa can be any naturally occurring amino acid
  misc_feature (91)..(92): Xaa can be any naturally occurring amino acid
  misc_feature (94)..(96): Xaa can be any naturally occurring amino acid
  misc_feature (104)..(104): Xaa can be any naturally occurring amino acid
  misc_feature (112)..(112): Xaa can be any naturally occurring amino acid
  misc_feature (119)..(119): Xaa can be any naturally occurring amino acid
SRKRRTTMALQWLILSYVVAVEVVXTLVLTLPYXMLXNXXXXYFXFSLPXPXXFXXSXXXXFLXFFTXLSXIFFXFYXXXFFXLPXXXXPXXLXXXIPPSTPLXSLFFSLYXVLLFSSXCFFTPSCFF

SEQ ID NO: 37457 - protein, 121 aa, Zea mays subsp. mays
  misc_feature (18)..(18): Xaa can be any naturally occurring amino acid
  misc_feature (27)..(27): Xaa can be any naturally occurring amino acid
  misc_feature (30)..(30): Xaa can be any naturally occurring amino acid
  misc_feature (32)..(35): Xaa can be any naturally occurring amino acid
  misc_feature (38)..(38): Xaa can be any naturally occurring amino acid
  misc_feature (43)..(43): Xaa can be any naturally occurring amino acid
  misc_feature (45)..(46): Xaa can be any naturally occurring amino acid
  misc_feature (48)..(49): Xaa can be any naturally occurring amino acid
  misc_feature (51)..(54): Xaa can be any naturally occurring amino acid
  misc_feature (57)..(57): Xaa can be any naturally occurring amino acid
  misc_feature (61)..(61): Xaa can be any naturally occurring amino acid
  misc_feature (64)..(64): Xaa can be any naturally occurring amino acid
  misc_feature (68)..(68): Xaa can be any naturally occurring amino acid
  misc_feature (71)..(73): Xaa can be any naturally occurring amino acid
  misc_feature (76)..(76): Xaa can be any naturally occurring amino acid
  misc_feature (79)..(82): Xaa can be any naturally occurring amino acid
  misc_feature (84)..(85): Xaa can be any naturally occurring amino acid
  misc_feature (87)..(89): Xaa can be any naturally occurring amino acid
  misc_feature (97)..(97): Xaa can be any naturally occurring amino acid
  misc_feature (105)..(105): Xaa can be any naturally occurring amino acid
  misc_feature (112)..(112): Xaa can be any naturally occurring amino acid
MALQWLILSYVVAVEVVXTLVLTLPYXMLXNXXXXYFXFSLPXPXXFXXSXXXXFLXFFTXLSXIFFXFYXXXFFXLPXXXXPXXLXXXIPPSTPLXSLFFSLYXVLLFSSXCFFTPSCFF

SEQ ID NO: 37458 - protein, 94 aa, Zea mays subsp. mays
  misc_feature (3)..(3): Xaa can be any naturally occurring amino acid
  misc_feature (5)..(8): Xaa can be any naturally occurring amino acid
  misc_feature (11)..(11): Xaa can be any naturally occurring amino acid
  misc_feature (16)..(16): Xaa can be any naturally occurring amino acid
  misc_feature (18)..(19): Xaa can be any naturally occurring amino acid
  misc_feature (21)..(22): Xaa can be any naturally occurring amino acid
  misc_feature (24)..(27): Xaa can be any naturally occurring amino acid
  misc_feature (30)..(30): Xaa can be any naturally occurring amino acid
  misc_feature (34)..(34): Xaa can be any naturally occurring amino acid
  misc_feature (37)..(37): Xaa can be any naturally occurring amino acid
  misc_feature (41)..(41): Xaa can be any naturally occurring amino acid
  misc_feature (44)..(46): Xaa can be any naturally occurring amino acid
  misc_feature (49)..(49): Xaa can be any naturally occurring amino acid
  misc_feature (52)..(55): Xaa can be any naturally occurring amino acid
  misc_feature (57)..(58): Xaa can be any naturally occurring amino acid
  misc_feature (60)..(62): Xaa can be any naturally occurring amino acid
  misc_feature (70)..(70): Xaa can be any naturally occurring amino acid
  misc_feature (78)..(78): Xaa can be any naturally occurring amino acid
  misc_feature (85)..(85): Xaa can be any naturally occurring amino acid
MLXNXXXXYFXFSLPXPXXFXXSXXXXFLXFFTXLSXIFFXFYXXXFFXLPXXXXPXXLXXXIPPSTPLXSLFFSLYXVLLFSSXCFFTPSCFF

SEQ ID NO: 37459 - DNA, 845 bp, Zea mays subsp. mays
ctcactagtcccccccccccagacataaccctaacttggtctcttactctaacccgcgagataatggctcctccacaaaatctcttccttgtcgctattgccttcgccgtcattttcacggcctccatcgtacatggtcgtcataatggtgcagaagatattgtgcattcatcctgcgaacacgcgagctatccatcactatgcgtccgtactctttcgtcatactccggtccaaccatcaccaaccgccgcgatctagctcaagccgccataaaaatcagcctctcccacgctcaaagcgccgcgaagaaactcgcggtggtgcgagactcggtggggaagaagaagcaagagaaagcggcgcttgtagactgtgtggagatgattggagactcggtggacgagctaagccgtacgctcggcgttttgaagcacctccgtgtctctggcggttcagctaaagagttccggtggcagatgagcaatgcacagacgtgggctagcgcggcacttacggatgacgacacgtgtctcgacgggtttcaagggatggacgacggtgaaatcaaaacggaggtgaagcagtggatgacgaaggtggccagggttacgagcaacgcgctttacatgatcaaccagctagatgagacacgtggcaaaccccacgacgtacatctttgatgttaatgcactagatcgttttaatggacggtctttattgtgtgtgttggtttttcgttcatgtgttttaagtgtgagattatctatcgctacgatatatagaaatgagtttttgattttggataaaaaaaaaaaaaaaaaaactcgagggggggcccggtacc

SEQ ID NO: 37460 - protein, 226 aa, Zea mays subsp. mays
LTSPPPPDITLTWSLTLTREIMAPPQNLFLVAIAFAVIFTASIVHGRHNGAEDIVHSSCEHASYPSLCVRTLSSYSGPTITNRRDLAQAAIKISLSHAQSAAKKLAVVRDSVGKKKQEKAALVDCVEMIGDSVDELSRTLGVLKHLRVSGGSAKEFRWQMSNAQTWASAALTDDDTCLDGFQGMDDGEIKTEVKQWMTKVARVTSNALYMINQLDETRGKPHDVHL

SEQ ID NO: 37461 - protein, 205 aa, Zea mays subsp. mays
MAPPQNLFLVAIAFAVIFTASIVHGRHNGAEDIVHSSCEHASYPSLCVRTLSSYSGPTITNRRDLAQAAIKISLSHAQSAAKKLAVVRDSVGKKKQEKAALVDCVEMIGDSVDELSRTLGVLKHLRVSGGSAKEFRWQMSNAQTWASAALTDDDTCLDGFQGMDDGEIKTEVKQWMTKVARVTSNALYMINQLDETRGKPHDVHL

SEQ ID NO: 37462 - DNA, 821 bp, Zea mays subsp. mays
aagatcgccttcgcttgattccaacaacccattggcagtggcaggcaaaaaattcgccttctatatgtgccgcggcctcccaactccagctccagctccagcgcttcaatttcagtcccaggattgcagtcggcagcagcgaggtactacccaagcaccgcccggccgagcgagcgagtccgtgcgtgcgtgcatggcagcagagaggaaggcggcctcccgcccggccgcctgcgggcgaatgcgcggcgccgagggtgccaagccgcggggccgtcaggcaaaggcagcgcgggcaccaccgggccaggggtacttcacggcggggctggcggcgctgttcctttgcctcaccacgctgctcgtgttcctgcctctcgtgctgccgccgctgccgccgccgccgttgctgctgctgctcgtgcccgtgggcctcatggctgtactgcttgcgctggcgctcgtgccgtccgacggccgggccgccgccgccgccgtcgcttcttcatcgtgcgtgtgctgaagacggacgacgcatcgcacgtgtgctagacacgccgagagactgtactgtaaaaatgtggcggtttaacatttgttttgttaatttgatataaggaatagtgatttcctacttctctctctgtgttctgaaatgatctttcagttgttaatcctgaggcagttttactgttttcatgctccaagataaaatggtagtagcgtagctatcacgccacatctgtgaaaagctctcggtcattggaccgtggttttttttaattttgaatcttcttaataatgttataataataaccgtc

SEQ ID NO: 37463 - protein, 204 aa, Zea mays subsp. mays
DRLRLIPTTHWQWQAKNSPSICAAASQLQLQLQRFNFSPRIAVGSSEVLPKHRPAERASPCVRAWQQRGRRPPARPPAGECAAPRVPSRGAVRQRQRGHHRARGTSRRGWRRCSFASPRCSCSCLSCCRRCRRRRCCCCSCPWASWLYCLRWRSCRPTAGPPPPPSLLHRACAEDGRRIARVLDTPRDCTVKMWRFNICFVNLI

SEQ ID NO: 37464 - protein, 173 aa, Zea mays subsp. mays
RSPSLDSNNPLAVAGKKFAFYMCRGLPTPAPAPALQFQSQDCSRQQRGTTQAPPGRASESVRACMAAERKAASRPAACGRMRGAEGAKPRGRQAKAARAPPGQGYFTAGLAALFLCLTTLLVFLPLVLPPLPPPPLLLLLVPVGLMAVLLALALVPSDGRAAAAAVASSSCVC

SEQ ID NO: 37465 - protein, 152 aa, Zea mays subsp. mays
MCRGLPTPAPAPALQFQSQDCSRQQRGTTQAPPGRASESVRACMAAERKAASRPAACGRMRGAEGAKPRGRQAKAARAPPGQGYFTAGLAALFLCLTTLLVFLPLVLPPLPPPPLLLLLVPVGLMAVLLALALVPSDGRAAAAAVASSSCVC

SEQ ID NO: 37466 - DNA, 1057 bp, Zea mays subsp. mays
attcgatccgttcccttgccctaagacccacccctgatttcatttccccaatcatggcggcggctctgtcggggacggcggtgtccacggcagcgcttctagccccaatccgagctccaaccagcgcgtttatccggcgctcccagctcacctgtcatcgcctccactcactaaaatgccgccgcgctgggcccatcgtccccgcggccgctgctgccgcggcgggcagcagctcgccgtcgtcagccgttttccacggcgagtgcttcgtggtgggcgacaatatcgacaccgaccagatcatccccgccgagcacctcactctggtgccctccaagccggacgagtaccgcaagctcggttccttcgccttcgcggggctcccatccgcggcctacccgacgccgttcgtcgctccgggtgaggagtcctcccgctacgccatcattgtcggcggagccaacttcgggtgcggttcctctcgcgagcacgcgcccgtcgcgcttggggccgctggcgcacgcgccattgttgcggagggctacgcgcgcatcttttttcgcaactccgtggccactggggaagtgtaccctctggagctcacggacgttggggcctggaaggagtgcaagacaggggatgtggtcaccgtggaccttgctaactccgtttttattaaccacacctctggcaaggagtacaagctgaaaccaattggtgatgctggccctgtaattgaggccggagggatctttgcctacgcccggaagacaggaatgattgcgtcgaaagctgctgcatgagggaaagatcagcttaggcagccgagcctctgcggagatgaagaagtaagctggagttaggactaagagttactgcacctacttgatgtcgacggtgtctcaaaataagttgcggcctaccgaaattatgatgaatcaatcaatttggtctttgtcacagatcgtttttttttgtttgttactagtacttgtacaattgtactcctgcctgctactgtccttatctgtttgaataactgctgtgttgccatctt

SEQ ID NO: 37467 - protein, 266 aa, Zea mays subsp. mays
SIRSLALRPTPDFISPIMAAALSGTAVSTAALLAPIRAPTSAFIRRSQLTCHRLHSLKCRRAGPIVPAAAAAAAGSSSPSSAVFHGECFVVGDNIDTDQIIPAEHLTLVPSKPDEYRKLGSFAFAGLPSAAYPTPFVAPGEESSRYAIIVGGANFGCGSSREHAPVALGAAGARAIVAEGYARIFFRNSVATGEVYPLELTDVGAWKECKTGDVVTVDLANSVFINHTSGKEYKLKPIGDAGPVIEAGGIFAYARKTGMIASKAAA

SEQ ID NO: 37468 - protein, 249 aa, Zea mays subsp. mays
MAAALSGTAVSTAALLAPIRAPTSAFIRRSQLTCHRLHSLKCRRAGPIVPAAAAAAAGSSSPSSAVFHGECFVVGDNIDTDQIIPAEHLTLVPSKPDEYRKLGSFAFAGLPSAAYPTPFVAPGEESSRYAIIVGGANFGCGSSREHAPVALGAAGARAIVAEGYARIFFRNSVATGEVYPLELTDVGAWKECKTGDVVTVDLANSVFINHTSGKEYKLKPIGDAGPVIEAGGIFAYARKTGMIASKAAA

SEQ ID NO: 37469 - DNA, 1226 bp, Zea mays subsp. mays
aaattgcaaacccgttctccttttccgtctcctcgacgcaactcgtcgccgtcttctccaactcgcacctcgttcctcgccccaccatttgccgctcccgcctacgatgtcgacgagtgaggtgtggagcttgtccgatttcgaaatcagcaagtacatcggtgagggcaggttcggcaaggtctacctcgcccgcgagaagcagagcgggtacgtggtggcgctcaaggtgatatttaaggcgaaactgcagaagtaccacttccacgcgcacctgcggcgggagatcgagatccagcagagtctcgaccaccctaacgtgctccgcctcttcacctggttccacgacgaagagcgagtcgtcctcgtcctcgagtacgcggcccgtggcgagctctacaaggtccttcgcgctgctggccgcttcaccgagcgcacgtccgccacatatgtagcgagtcttgctggtgcactggcatactgtcacaaaaagcaagtcattcatagggacatcaagcctgagaatttgctaatcgacatcgagggccggcttaaaattgcagattttggatgggcggctcgttcaaatgctaaacgccacacactctgtggcacaatcgattatctggcaccagagatggtagagaaaaaagctcatgaccatgctgtggacaactggacattaggaatcctgtgctatgagttcttatatggttcacctccttttgaagctgatgaacaggatgataccttgagaaggatagttagggtggatttggcattcccttcatctccttgtgtatcttcagaggctaaggatctcatttccaagcttctagttaaggattcaagcaagaggctttgccttgaagacatcatgaagcatccatggataaagaagaatgcagacccttcaggcagttgcattaagcaaaaagatgtcacaagatcaaaggtaaaacgataagtgaatatgcaagatatcttctgagccatggtgtttagtgttcttgttccttggagataaccatggtgtttagtgtaagtagaagccagcctatgtactgtgatcttagttatggaccatgtgtcgaagttgctaaacttctgttgcctgcctcatctggggaggcaattaatcttagcttttgtgtggatacagtagttccataaaaaaaaaaaaaaaaaagcttatcgataccgtcgacctcgagggggggcccggt

SEQ ID NO: 37470 - protein, 321 aa, Zea mays subsp. mays
NCKPVLLFRLLDATRRRLLQLAPRSSPHHLPLPPTMSTSEVWSLSDFEISKYIGEGRFGKVYLAREKQSGYVVALKVIFKAKLQKYHFHAHLRREIEIQQSLDHPNVLRLFTWFHDEERVVLVLEYAARGELYKVLRAAGRFTERTSATYVASLAGALAYCHKKQVIHRDIKPENLLIDIEGRLKIADFGWAARSNAKRHTLCGTIDYLAPEMVEKKAHDHAVDNWTLGILCYEFLYGSPPFEADEQDDTLRRIVRVDLAFPSSPCVSSEAKDLISKLLVKDSSKRLCLEDIMKHPWIKKNADPSGSCIKQKDVTRSKVKR

SEQ ID NO: 37471 - protein, 286 aa, Zea mays subsp. mays
MSTSEVWSLSDFEISKYIGEGRFGKVYLAREKQSGYVVALKVIFKAKLQKYHFHAHLRREIEIQQSLDHPNVLRLFTWFHDEERVVLVLEYAARGELYKVLRAAGRFTERTSATYVASLAGALAYCHKKQVIHRDIKPENLLIDIEGRLKIADFGWAARSNAKRHTLCGTIDYLAPEMVEKKAHDHAVDNWTLGILCYEFLYGSPPFEADEQDDTLRRIVRVDLAFPSSPCVSSEAKDLISKLLVKDSSKRLCLEDIMKHPWIKKNADPSGSCIKQKDVTRSKVKR

SEQ ID NO: 37472 - DNA, 660 bp, Zea mays subsp. mays
aacagttaaaacgccgtagcagctagcaacgctaccacagtgggcgcttgaagataggttaaccgccgcttcttcttatcctcagttccaaccccttttcccagctcctcagttctcgtcatcgtcctcgcgctcagtgtcatttgcagttcccggcaacagccatggcgtcggtgcagctgtctgggccgcgggtggtggcggctgcgaaaccggctgcgttgggcgggctcctcctgacgccgtcccttgcggtgccaaaggggcggagggccagggggctcgtggtgagggccgccacggtcgtgtcacctaagtatacatccataaaaccattgggagacagagtacttgtgaagatcaagacctctgaggctaaatctgatggagggattttacttccagtatcagttcagacaagaccacaaggaggggaaattgttgcggttggagaagggagaagttttggaagtaaccgcattgagatcagtgttccggttggtgcacaagttgtctactcgaaatatgcaggcacagaattgaaattcaatgacgccgaccatctcattttgaaagaagatgacataattggtattctcgacagtgatgatgtgaaggatatgaaaccactgaatgatcgcattctgattaaggttgctg

SEQ ID NO: 37473 - protein, 165 aa, Zea mays subsp. mays
MASVQLSGPRVVAAAKPAALGGLLLTPSLAVPKGRRARGLVVRAATVVSPKYTSIKPLGDRVLVKIKTSEAKSDGGILLPVSVQTRPQGGEIVAVGEGRSFGSNRIEISVPVGAQVVYSKYAGTELKFNDADHLILKEDDIIGILDSDDVKDMKPLNDRILIKVA

SEQ ID NO: 37474 - DNA, 659 bp, Zea mays subsp. mays
tttttttttttttttttcttttttttttttttttttttttttttttttttttttttttttttttttttttaaaacaaccaacgggatttctttcgaaaaaaagccccgatcctgatcgccctcccatgtacatgtactgtacgtctgtacccagtaatatacaataccaagggggttattgggcaaattaaaaagatcagccaaaagggaagggtattatacaatattttgcagttctagaaacccttccgcataaatatgggcaacaccgagcccaagcacctgggactgttatttttccagttcaaaaaggtgagcccgtttctcggaagttttcctcctgaaaaaaataccccaccgcatcgcagctttgattttcacccacccgaaaacagttttgccggaaaagggagcgcggtcgtcctcataaaatccaaaggttggggcaggaaacggttataaaaaaaagccgtaaacgttgttcaggccggtcggcgccccgcccacgctcaggaaccgcagaatatggtgcatctcatcgttctccaatagctcggggctcctcgcccttatctcatccatcaagtactcatcgacgttgctctcctgaaaccgaaaccagtcggaaaaagggttggtccctgaagggtgtggggact

SEQ ID NO: 37475 - protein, 67 aa, Zea mays subsp. mays
MGNTEPKHLGLLFFQFKKVSPFLGSFPPEKNTPPHRSFDFHPPENSFAGKGSAVVLIKSKGWGRKRL

SEQ ID NO: 37476 - protein, 62 aa, Zea mays subsp. mays
FFFFFLFFFFFFFFFFFFFFFFLKQPTGFLSKKSPDPDRPPMYMYCTSVPSNIQYQGGYWAN

SEQ ID NO: 37477 - protein, 37 aa, Zea mays subsp. mays
FFFFFSFFFFFFFFFFFFFFFFFKTTNGISFEKKPRS

SEQ ID NO: 37478 - DNA, 1841 bp, Zea mays subsp. mays
gaggaagcacgacgtcctctaggaagaagcacagccgcagccgcccgcaggctatggacgatgacatcgacagctcctgctccaccccgttcgccagcgtgccgtccagccccggacgtccccacgccatcggagcctccctttcgctggcggcgtaggaagagatggcagagcgtttgacaagtgcaatcccaagaagtgccgccaggagtgcaagaagagctgccccgtcgccaagcccgtggttgataagcggtgagtactgtcacatgcgccagacgatgcaaaatatacgaagtagtggttgataaacagtgagtactgtcacatgcgctagacgatgcagtggttgataagcagccacaggaccagggacctcttatcttggacaagctgatttctagaagcaaggatgatgctctccttgcataccaaactgctctcgatcttgctgaaaatgaaaaccaggctttcctcctaaatgtgcggaatcagcttgatgcattgagttcacatacttctgcccatgtgtacccatgcgagcagactggttgtacaaagtaatcaaactaatgctgctacagaaccatctgaggatgtccagatgagggacgacataaccatgccaaatgacagtgttgccactatggatccaaatgcagcaacacatgctggtaggctgacaaatcaagggtatattgtgaggagagacatctattcagttgacgttgcagttcctatacaaccatatataatagttaataggcctgatcttcaaattttgaagactaagcaagctgtgaaaatgaggaacaatgtctgccacaacgcagggacaacagttgataccttcctcagagaaaacttggtgtggtttgttttatacagtgtacttgctataaactgcttagcattttcaattttaatagaaaccatagcgacgcacgggcacctaactatattatttatgattggcatttttttaaagtattaatcttagtttttagttgctatagtttgcatgtaggttttacatgaaataatcttattaacaacgttgtgatccctcgcccaccgccaagcctgtgctctctctagcatcgtctccctccgttggcaaaagcgcccagcggttgtcctcgcccgcaaacccaaattttgagtttttacagctacgaatgtgctattttggattttagctcatttgattgacaaaagttgcctgtaataggctgaatcaaactggagagactcttattatgtacttactattcttagacattgggagtttgtcatgtatgctatattgttgttgagtacaagtctcatgaagtcataattttgttttatttagctctcgttatagaagtattatttgtgtttttattcttctgtgctatgcatttttgtctacatttttagtaatattatttttttactattttagtggtatcattatgttgttttattccatttgcagattctataatctcttatattcaaagagatcatatggaaaccatatgtcccagatttagcatcaatatgggcaagaaaaactgtaatagtttttgacctggaggttgggatatgcaagaacgaggggttgtgcaatctgaagagcaaggactgggacctttccttcaggcttcagcacccacgtgttgcacattatattttagggccagctaattgagggataagtaggttctgctaatcaagggaaaaactacttttgaatttgatggctcctatgtattgaatttatcacttttgtggactcctcaatagtttcataattctaaaaaaaaaaaaaaaaaaaactcgagggggggcccggt

SEQ ID NO: 37479 - protein, 155 aa, Zea mays subsp. mays
MCTHASRLVVQSNQTNAATEPSEDVQMRDDITMPNDSVATMDPNAATHAGRLTNQGYIVRRDIYSVDVAVPIQPYIIVNRPDLQILKTKQAVKMRNNVCHNAGTTVDTFLRENLVWFVLYSVLAINCLAFSILIETIATHGHLTILFMIGIFLKY

SEQ ID NO: 37480 - protein, 129 aa, Zea mays subsp. mays; identical to SEQ ID NO: 37423

SEQ ID NO: 37481 - protein, 123 aa, Zea mays subsp. mays; identical to SEQ ID NO: 37424

SEQ ID NO: 37482 - DNA, 1422 bp, Zea mays subsp. mays
atctttcctcttaaagaagaaccataacaatggctgtcaaaatacaaccatcttcttcttcttcttccttagtattcatcatgtccttgttcttactacttctttcacttattgtcccttcatcagttctatcagcaactcttcgatctgatattcaagctctagagtctataatacgcagcgttgatccaagttccatctctccatcctcttacctcagcacatgggacttctctgaagacccgtgtgaaggctcagggacgttcttgggagttatgtgttctttccctctggagaacacaacaagccgggttatagagatcgatcttgatgatgacggttatgacggtttcctctctgatgaagtaggaaacctaactgagctcactgtccttagcctcaacaagaacagattccgcggtccagtaccagaatctgtgttccagctccggaaacttaccaaactctcactagcagaaaatttcttcactggagacataccagcagaaatcacgcggctcaaggagctcaaaaccatcgacctgtcgaaaaacagtatcgccggtgaaatccctccaaggatctcagccttgagaagtttgactcacctggtcctatcaaacaaccatctcgatggaagaatacctgcgctcaacggcttgtggaagctacaagtattagaactcggtaacaatcatctttatggaatgcttcctaagcttcccccaagtctaagaactctatcactctgtttcaacagccttgcaggacgtatatcgcccttgcataggctaaaacagcttgtgtcattagatgtgagccagaacagattctcaggcaccgttggccatgaaatcctaacattccctgagattgcacgcatcaatgtgtcttttaaccagttcatatccatagaggttattaaagttacaggatcacgcctgcgcatgcttgatgctgaaggaaaccatttacaggggcaccttccgctgaacctggcaacttatgaaaacctaaaggatatcaatctacggagcaacatgttctctggcgatattcctaggatttatgggaaaagactggagaattcatggagaagcttatacttggagaacaactacctgtcaggtacacttcctgaggagtttcaaaaaattaccaaacagatcagaggaaacctatcgaacaactgtctgcaatgtcccaagaatgttcaaatctgccaaggaacacaaaaaccaaaatcacaatgcaccaatgcaatgctggggagcttggagtagagatcatgcgcatgggaagcagtttctgttagaaagcataattaccaaagcaaatttcatgtccttgttcgattttcaatcatgttagaaatgtagtatatgaaaaaaaaaaaaaaaaaaactcgagggggggcccggt

SEQ ID NO: 37483 - protein, 417 aa, Zea mays subsp. mays
MAVKIQPSSSSSSLVFIMSLFLLLLSLIVPSSVLSATLRSDIQALESIIRSVDPSSISPSSYLSTWDFSEDPCEGSGTFLGVMCSFPLENTTSRVIEIDLDDDGYDGFLSDEVGNLTELTVLSLNKNRFRGPVPESVFQLRKLTKLSLAENFFTGDIPAEITRLKELKTIDLSKNSIAGEIPPRISALRSLTHLVLSNNHLDGRIPALNGLWKLQVLELGNNHLYGMLPKLPPSLRTLSLCFNSLAGRISPLHRLKQLVSLDVSQNRFSGTVGHEILTFPEIARINVSFNQFISIEVIKVTGSRLRMLDAEGNHLQGHLPLNLATYENLKDINLRSNMFSGDIPRIYGKRLENSWRSLYLENNYLSGTLPEEFQKITKQIRGNLSNNCLQCPKNVQICQGTQKPKSQCTNAMLGSLE

SEQ ID NO: 37484 - protein, 400 aa, Zea mays subsp. mays
MSLFLLLLSLIVPSSVLSATLRSDIQALESIIRSVDPSSISPSSYLSTWDFSEDPCEGSGTFLGVMCSFPLENTTSRVIEIDLDDDGYDGFLSDEVGNLTELTVLSLNKNRFRGPVPESVFQLRKLTKLSLAENFFTGDIPAEITRLKELKTIDLSKNSIAGEIPPRISALRSLTHLVLSNNHLDGRIPALNGLWKLQVLELGNNHLYGMLPKLPPSLRTLSLCFNSLAGRISPLHRLKQLVSLDVSQNRFSGTVGHEILTFPEIARINVSFNQFISIEVIKVTGSRLRMLDAEGNHLQGHLPLNLATYENLKDINLRSNMFSGDIPRIYGKRLENSWRSLYLENNYLSGTLPEEFQKITKQIRGNLSNNCLQCPKNVQICQGTQKPKSQCTNAMLGSLE

SEQ ID NO: 37485 - protein, 335 aa, Zea mays subsp. mays
MCSFPLENTTSRVIEIDLDDDGYDGFLSDEVGNLTELTVLSLNKNRFRGPVPESVFQLRKLTKLSLAENFFTGDIPAEITRLKELKTIDLSKNSIAGEIPPRISALRSLTHLVLSNNHLDGRIPALNGLWKLQVLELGNNHLYGMLPKLPPSLRTLSLCFNSLAGRISPLHRLKQLVSLDVSQNRFSGTVGHEILTFPEIARINVSFNQFISIEVIKVTGSRLRMLDAEGNHLQGHLPLNLATYENLKDINLRSNMFSGDIPRIYGKRLENSWRSLYLENNYLSGTLPEEFQKITKQIRGNLSNNCLQCPKNVQICQGTQKPKSQCTNAMLGSLE

SEQ ID NO: 37486 - DNA, 608 bp, Zea mays subsp. mays
gaccagtcctccaacctcccagcgaacccaccccacacctttccccggcgaagcagcagcagccgcagcggcatccatggcccccaaggcggagaagaagccggtggcggagaaggccgagaagaccactgcggcgaagaagaccaaggccgagaagcggccgccggcgtccaaggagggcggcgagaagaagggcaagaagaagtcgaagaagagcgtggagacgtacaagatctacatcttcaaggtgctgaagcaggtgcacccggacatcggcatctcctccaaggccatgtccatcatgaactccttcatcaacgacatcttcgagaagctcgccggcgagtccgccaagctcgcccgctacaacaagaagcccaccatcacgtcccgggagatccagacctccgtccgcctcgtcctccccggcgagctcgccaagcacgccgtctccgagggcaccaaggccgtcaccaagttcacctccgcttagatagtctgttccggtttcttggtcgatcgatggtactctgtaatagtcatgtgttcggaccatgtcgtcttgtaagtgtttcattatcttgtgaaatagtaatggcgcttctttg

SEQ ID NO: 37487 - protein, 202 aa, Zea mays subsp. mays
DQSSNLPANPPHTFPRRSSSSRSGIHGPQGGEEAGGGEGREDHCGEEDQGREAAAGVQGGRREEGQEEVEEERGDVQDLHLQGAEAGAPGHRHLLQGHVHHELLHQRHLREARRRVRQARPLQQEAHHHVPGDPDLRPPRPPRRARQARRLRGHQGRHQVHLRLDSLFRFLGRSMVLCNSHVFGPCRLVSVSLSCEIVMALL

SEQ ID NO: 37488 - protein, 163 aa, Zea mays subsp. mays
TSPPTSQRTHPTPFPGEAAAAAAASMAPKAEKKPVAEKAEKTTAAKKTKAEKRPPASKEGGEKKGKKKSKKSVETYKIYIFKVLKQVHPDIGISSKAMSIMNSFINDIFEKLAGESAKLARYNKKPTITSREIQTSVRLVLPGELAKHAVSEGTKAVTKFTSA

SEQ ID NO: 37489 - protein, 138 aa, Zea mays subsp. mays
MAPKAEKKPVAEKAEKTTAAKKTKAEKRPPASKEGGEKKGKKKSKKSVETYKIYIFKVLKQVHPDIGISSKAMSIMNSFINDIFEKLAGESAKLARYNKKPTITSREIQTSVRLVLPGELAKHAVSEGTKAVTKFTSA

SEQ ID NO: 37490 - DNA, 622 bp, Zea mays subsp. mays
ctcttctccccctctcccccgccgccgccgccgccgtctcctcctcctcttcgccgctcccgctcccgctcccgccgccgcgccaccgccgtcagccatggcaccgaagaaggagaaggccccggcggcgtcgtccaagccggccaagtccggcggcggcaagcagaagaagaagaagtggagcaagggcaagcaaaaggagaaggtgaacaacgcggtgctgttcgaccaggccacctacgacaagctgctcaccgaggtgcccaagtacaagcagatcacgccctccgtcctctccgagcgcctcaggatcaacgggtctctggctcgcagggctatcaaagacctgatggagagggggctcatcaggatggtctcaatccactccagccagcagatcttcaccagggcgacaaacacctgatttatcatcatcatgtgttctgtgtctgtttttagtccagtagactgaggtgttgctgttatattcaagttcactatgtccaggggggcacactgtgccaccagtaatgttgaattgcttttgagttttggtacactttaagatcgttttgtcagcgcaatgaaatctaccttatatattgccgtattgggtcttttt

SEQ ID NO: 37491 - protein, 152 aa, Zea mays subsp. mays
LFSPSPPPPPPPSPPPLRRSRSRSRRRATAVSHGTEEGEGPGGVVQAGQVRRRQAEEEEVEQGQAKGEGEQRGAVRPGHLRQAAHRGAQVQADHALRPLRAPQDQRVSGSQGYQRPDGEGAHQDGLNPLQPADLHQGDKHLIYHHHVFCVCF

SEQ ID NO: 37492 - protein, 140 aa, Zea mays subsp. mays
SSPPLPRRRRRRLLLLFAAPAPAPAAAPPPSAMAPKKEKAPAASSKPAKSGGGKQKKKKWSKGKQKEKVNNAVLFDQATYDKLLTEVPKYKQITPSVLSERLRINGSLARRAIKDLMERGLIRMVSIHSSQQIFTRATNT

SEQ ID NO: 37493 - protein, 108 aa, Zea mays subsp. mays; identical to SEQ ID NO: 29310

SEQ ID NO: 37494 - DNA, 638 bp, Zea mays subsp. mays
atattcaaaggaagtggctggacacggagctattgcacctcactactataaattccatggaattcgaaatggaattgatcctgacatttgggatccatatactgacagatttattccggttcattatacatcagagaatgttcttgagggcaagagtgctgcaaaaaaggcattgcagcagatgcttggattacagcaaactgatagccctgttgttggaatcatcactcgtctaacagtgcagaagggaatccaccttatcaaacatgcaatgcatcgagctcttgaacgcaatgggcaggtggttttactgggttctgcaccagatcatcgcatacaaggtgactttacaaatttagccagtaagctgcatggtgaataccatggccgggtgaagctatgtttaacctatgacgagccactgtcacatttgatatatgctggcgcagacttcattcttgttccttccatcttcgaaccttgtggtttaacacagcttattgctatgcgctacggatccatcccgattgttcggaaaactggaggcctgtacgacaccgtctttgacgtcgacgatgataaggatcgggctcaagcacaaggcctcgagccaaatggatttgttaaacacaataaag

SEQ ID NO: 37495 - protein, 212 aa, Zea mays subsp. mays
YSKEVAGHGAIAPHYYKFHGIRNGIDPDIWDPYTDRFIPVHYTSENVLEGKSAAKKALQQMLGLQQTDSPVVGIITRLTVQKGIHLIKHAMHRALERNGQVVLLGSAPDHRIQGDFTNLASKLHGEYHGRVKLCLTYDEPLSHLIYAGADFILVPSIFEPCGLTQLIAMRYGSIPIVRKTGGLYDTVFDVDDDKDRAQAQGLEPNGFVKHNK

SEQ ID NO: 37496 - protein, 152 aa, Zea mays subsp. mays
MLGLQQTDSPVVGIITRLTVQKGIHLIKHAMHRALERNGQVVLLGSAPDHRIQGDFTNLASKLHGEYHGRVKLCLTYDEPLSHLIYAGADFILVPSIFEPCGLTQLIAMRYGSIPIVRKTGGLYDTVFDVDDDKDRAQAQGLEPNGFVKHNK

SEQ ID NO: 37497 - protein, 122 aa, Zea mays subsp. mays
MHRALERNGQVVLLGSAPDHRIQGDFTNLASKLHGEYHGRVKLCLTYDEPLSHLIYAGADFILVPSIFEPCGLTQLIAMRYGSIPIVRKTGGLYDTVFDVDDDKDRAQAQGLEPNGFVKHNK

SEQ ID NO: 37498 - DNA, 1414 bp, Zea mays subsp. mays
ctctctcttcccgcagcggcagtcgacggcaaaaccctagatccctctccctcttaaaccctctacgagtgcgggaggatgtcggagccttccaaggtaatccacatccgcaacgtcgggcacgagattgccgagtctgatctccttcagctgctgcagccgttcggcgtggtctccaagatcgtcatgttgcgtgccaagaaccaaactcttctgcagatggaagacatacatgcttccgtgagtgcgctgcaatattacacttccgttcaacctagcataaggggaaggaatgtttacatgcagttctcatctcaccaagagcttaccacagaccagagctcgcatggaaggaattctgatcaggttttcaagctcttattcagtttcactcgcgccaagaagctgtggaagcatttggttctttgcatggaaggaacatatatgatggttgctgccagctagatattcaatattcaaatctcagtgaactgcaagtccattacaacaacgaccgatctagagatttcacaaatccatcattacctacagaacaacgccctagggcctctcagcaagcttatcctgatccagctaatctctatgccttccaacaagctggagcttcatatgcacagaaaattgatgaggataagctcttcaatctgttttccttgtacggaaacatagttcgtatcaaggtactgcgtaataaaccagatcatgctcttgttgagatggctgacgggttgcaggctgagctagctgtgcattatttgaagggggctatactatttgggaagaagctggaagttaactactcaaagtaccctaacattacacctgccccagatgcccacgactacttgaactcgagcctaaaccgattcaacagcaacatggtaaaaaactaccgacattgctgctctccaacaaagatgatccacatctctgccctcccccaagagatctctgaggaagcaatcctgaaccatttgtctgagcacggtactgttgtcaacaccaagctatttgaggtgaatggcaagaggcaggctctcgttttatttgagactgaagaggcagcgaccgaggccctcgtgtcaaagcatgccagcacacttgagggtaacacgatccggatctctttctcccagatgcagagtatataagccacctcaagggaaagctcatgtcgccctcgcttaccacccggcgagcactatttaggaagcatttcagactaagatgtgaatcctctgcgccattctccaagacatgctgtctgagctgtacctccccctgaccttcgggttttcttttcactctacactggccttgcaccaaaaggtttctgtgtttctttccaaatcctgttggctaggttatcaaaggacatttaccccttgtcgtg

SEQ ID NO: 37499 - protein, 144 aa, Zea mays subsp. mays
MADGLQAELAVHYLKGAILFGKKLEVNYSKYPNITPAPDAHDYLNSSLNRFNSNMVKNYRHCCSPTKMIHISALPQEISEEAILNHLSEHGTVVNTKLFEVNGKRQALVLFETEEAATEALVSKHASTLEGNTIRISFSQMQSI

SEQ ID NO: 37500 - protein, 128 aa, Zea mays subsp. mays
MSEPSKVIHIRNVGHEIAESDLLQLLQPFGVVSKIVMLRAKNQTLLQMEDIHASVSALQYYTSVQPSIRGRNVYMQFSSHQELTTDQSSHGRNSDQVFKLLFSFTRAKKLWKHLVLCMEGTYMMVAAS

SEQ ID NO: 37501 - protein, 92 aa, Zea mays subsp. mays
MLRAKNQTLLQMEDIHASVSALQYYTSVQPSIRGRNVYMQFSSHQELTTDQSSHGRNSDQVFKLLFSFTRAKKLWKHLVLCMEGTYMMVAAS

SEQ ID NO: 37502 - DNA, 755 bp, Zea mays subsp. mays
gcacactaaccgaagtcccaatcccaatggcgccaacctgccgtcctcggccggatgcggcgctcctgctgctgctgctgacggcgagtagcgtcggcgtcgcacgggcggcgccgcgggtgccggcggtgatcgtgttcggggactcgacggtggacacgggcaacaacaaccagatccccaccccgctgcgcgccgacttcccgccctacggtcgcgacatgccgggcgggccgcgcgccaccggccggttcggcaacgggcggctgcccccggacctcatctccgaggcgctcggcctgccgccgctggtgccggcctacctcgacccggcctacggcatcgacgacttcgcgcgcggcgtctgcttcgcgtccgcgggcaccggcatcgacaacgccaccgccggagtcttggtaagtctccgccgtacgcctccagccgatacttgctgttctttgtcgatccatcatctgtgctcgttaagtcttcactgccgaatagtatcgccacacaagcatttctgcagaacagaattgtgcacggcccatccgcattccaaagcagagaagtgtgtggcttacctgcgtacacttcagtttgattgagtgtaggtgttgctcgcgcattagaccgtctcaacaagagttttatcagagtttggtggcattaaatatgttgatatggtatggaataaacgataagagatgatgaaagttttacgatatcaaatgaatttgagcaggatgaaacct

SEQ ID NO: 37503 - protein, 201 aa, Zea mays subsp. mays
TLTEVPIPMAPTCRPRPDAALLLLLLTASSVGVARAAPRVPAVIVFGDSTVDTGNNNQIPTPLRADFPPYGRDMPGGPRATGRFGNGRLPPDLISEALGLPPLVPAYLDPAYGIDDFARGVCFASAGTGIDNATAGVLVSLRRTPPADTCCSLSIHHLCSLSLHCRIVSPHKHFCRTELCTAHPHSKAEKCVAYLRTLQFD

SEQ ID NO: 37504 - protein, 193 aa, Zea mays subsp. mays
MAPTCRPRPDAALLLLLLTASSVGVARAAPRVPAVIVFGDSTVDTGNNNQIPTPLRADFPPYGRDMPGGPRATGRFGNGRLPPDLISEALGLPPLVPAYLDPAYGIDDFARGVCFASAGTGIDNATAGVLVSLRRTPPADTCCSLSIHHLCSLSLHCRIVSPHKHFCRTELCTAHPHSKAEKCVAYLRTLQFD

SEQ ID NO: 37505 - protein, 128 aa, Zea mays subsp. mays
MPGGPRATGRFGNGRLPPDLISEALGLPPLVPAYLDPAYGIDDFARGVCFASAGTGIDNATAGVLVSLRRTPPADTCCSLSIHHLCSLSLHCRIVSPHKHFCRTELCTAHPHSKAEKCVAYLRTLQFD

SEQ ID NO: 37506 - DNA, 1565 bp, Zea mays subsp. mays
ccccctctcactcgcctcgacgcgcctctgaaagttcggagccgccggcccgtccgcctccctctccgcctcccgtccccaaggccaatagttttcaagtggcaatggcggaccaggctaaccaacccactgtccttcataagctcggtggccagttccacctgcgctcgatcatctctgaaggtgtacgggcccgtaacatatgcccatctgtctcatcttatgaaaggagatttgccacaaggaactacatgacccagagcctttggggcccttcaatgtctgttagcggtggcatcaatgtcccagtgatgcagaccccgctctgtgctaatgctcctgctgagaaaggaggcaagaacttcatgattgatttcatgatgggcggtgtttcagctgctgtttcaaagactgctgctgctcccatcgagcgtgtgaagctgcttattcagaaccaagatgagatgattaagtctggtaggctatcagagccgtacaagggtattgttgactgcttcaaacgtaccattaaggatgaaggtttctcttccttgtggaggggtaacactgctaatgttattcgttacttccctactcaggctttgaactttgcatttaaggactacttcaagaggttgttcaacttcaagaaggatagggatggctattggaagtggtttgctggcaacctggcctctggtggtgctgctggtgcttcctctttgttttttgtgtactccctggactacgcgagaacaaggttggctaatgacgcgaaggctgccaagggaggaggtgaaaggcagttcaatgggcttgtcgatgtctaccgcaagacactcaagtctgatggtattgctgggctttaccgtggatttaacatctcctgtgttggaatcattgtttatcgtggtctgtactttgggctctatgattccatcaagccagttgtccttactggcaacctccaggacaatttctttgccagtttcgctctgggttggctgatcactaatggtgctggtcttgcatcttaccccatcgataccgtccgcagaaggatgatgatgacatctggtgaggctgtcaagtacaagagctccttggacgcgttccagcagattcttaagaaggaagggcccaagtccctgttcaagggtgctggtgctaacattcttcgtgccattgctggtgctggtgtgctttctggctatgaccagctccagatcctcttcttcggaaagaagtacggctccggcggtgcttaaatggagaaatatgatgacgaacaagagcagtgtgtgttcccggtcctttccaatcaggatctggtgaagtttttgcctttcatatcgaagaaattaataattcatgtagagggaggattcttccaacaatttgttttggatggagacttagatctccaaacactcgtaactatcctactaggtggtgacatcggtccccaaaaacatttatggtcatagagtctgcccttcgtttgtcagtcgggcaatttttcttgcatacaatgccttcgtttaagtatcggatgagttgctgcg

SEQ ID NO: 37507 - protein, 421 aa, Zea mays subsp. mays
PSHSPRRASESSEPPARPPPSPPPVPKANSFQVAMADQANQPTVLHKLGGQFHLRSIISEGVRARNICPSVSSYERRFATRNYMTQSLWGPSMSVSGGINVPVMQTPLCANAPAEKGGKNFMIDFMMGGVSAAVSKTAAAPIERVKLLIQNQDEMIKSGRLSEPYKGIVDCFKRTIKDEGFSSLWRGNTANVIRYFPTQALNFAFKDYFKRLFNFKKDRDGYWKWFAGNLASGGAAGASSLFFVYSLDYARTRLANDAKAAKGGGERQFNGLVDVYRKTLKSDGIAGLYRGFNISCVGIIVYRGLYFGLYDSIKPVVLTGNLQDNFFASFALGWLITNGAGLASYPIDTVRRRMMMTSGEAVKYKSSLDAFQQILKKEGPKSLFKGAGANILRAIAGAGVLSGYDQLQILFFGKKYGSGGA

SEQ ID NO: 37508 - protein, 387 aa, Zea mays subsp. mays
MADQANQPTVLHKLGGQFHLRSIISEGVRARNICPSVSSYERRFATRNYMTQSLWGPSMSVSGGINVPVMQTPLCANAPAEKGGKNFMIDFMMGGVSAAVSKTAAAPIERVKLLIQNQDEMIKSGRLSEPYKGIVDCFKRTIKDEGFSSLWRGNTANVIRYFPTQALNFAFKDYFKRLFNFKKDRDGYWKWFAGNLASGGAAGASSLFFVYSLDYARTRLANDAKAAKGGGERQFNGLVDVYRKTLKSDGIAGLYRGFNISCVGIIVYRGLYFGLYDSIKPVVLTGNLQDNFFASFALGWLITNGAGLASYPIDTVRRRMMMTSGEAVKYKSSLDAFQQILKKEGPKSLFKGAGANILRAIAGAGVLSGYDQLQILFFGKKYGSGGA

SEQ ID NO: 37509 - protein, 338 aa, Zea mays subsp. mays
MTQSLWGPSMSVSGGINVPVMQTPLCANAPAEKGGKNFMIDFMMGGVSAAVSKTAAAPIERVKLLIQNQDEMIKSGRLSEPYKGIVDCFKRTIKDEGFSSLWRGNTANVIRYFPTQALNFAFKDYFKRLFNFKKDRDGYWKWFAGNLASGGAAGASSLFFVYSLDYARTRLANDAKAAKGGGERQFNGLVDVYRKTLKSDGIAGLYRGFNISCVGIIVYRGLYFGLYDSIKPVVLTGNLQDNFFASFALGWLITNGAGLASYPIDTVRRRMMMTSGEAVKYKSSLDAFQQILKKEGPKSLFKGAGANILRAIAGAGVLSGYDQLQILFFGKKYGSGGA

SEQ ID NO: 37510 - DNA, 1709 bp, Zea mays subsp. mays
gagctactactgttgaagcgattctcactaaaaccctcgaacacatcgcctttatctctttctctagatctactcgctatggctactatcaccgttgttaaggctagacagatcttcgacagtcgtggtaatcccaccgttgaggtggatatccacacgtcaaatggtgttaaggttacagcagctgttccaagtggagcttccactggtatctatgaggctcttgagctgagggatggaggatctgactaccttggaaagggtgtatctaaggctgttggcaatgtgaacaacatcatcgggccagcacttattggaaaggacccaactcagcagactgctattgacaacttcatggtccatgaacttgacggaacccaaaacgagtgggggtggtgcaagcaaaagcttggagccaatgcgattcttgctgtgtctcttgctgtctgcaaagctggggctgttgtcagcggcattcctctatacaagcacattgccaaccttgctggtaaccccaagattgtgctaccagttcctgccttcaacgtcatcaatggtggatcccatgccggaaacaagcttgctatgcaggagtttatgatcctccctgttggagctgcttctttcaaggaagccatgaagatgggtgtggaagtttaccaccacttgaagtctgtgattaagaagaagtacggccaggatgccacaaatgttggtgatgaaggtgggtttgcaccaaacattcaggagaacaaggagggtcttgaattgctcaagactgctatcgagaaggctggatacactggaaaggttgtcattggaatggatgttgccgcttcagagttctactcagaagacaagacctacgacttgaacttcaaagaagagaacaacaatggctctcagaagatttctggtgatgctctaaaggacctgtacaagtcctttgtcgctgagtacccaatcgtgtccattgaggacccatttgaccaagatgactgggagcactatgctaagatgaccactgagtgtggaaccgaggttcagattgtcggtgatgatttgttggtcactaaccccaagagagttgctaaggcaatcgccgagaagtcttgcaatgctcttcttttgaaggttaaccaaatcggatctgtaaccgagagtatcgaggcagttaagatgtcgaagaaagcaggttggggagtgatgaccagccacagaagtggtgaaaccgaggacacattcattgctgacttagccgttggcttgtctactggacaaatcaaaaccggtgctccttgcagatccgagcgtcttgccaagtacaaccagcttttgcgtattgaggaggagttgggatcagaggcaatttacgctggagtcaacttccgcaaacctgtagaaccctactaaatggagcttttagaagcaaagtggtcttctttgtgacgaggagaagatgacctgagtttgatcatttgctttaattaaataaaacgttctgtttttgtttcttctttgtttggtttcttacgtcttttgttgaaccctttttgggaaaagttactcatttttgtaagggaaacatgagaatgctctgcctttgtcgaggacggtagccccttatttcaatctaatttcggctttactcaaaaaaaaaaaaaaaaaaaactcgagggggggcccggtacccaattgttaaacacaat

SEQ ID NO: 37511 - protein, 470 aa, Zea mays subsp. mays
ELLLLKRFSLKPSNTSPLSLSLDLLAMATITVVKARQIFDSRGNPTVEVDIHTSNGVKVTAAVPSGASTGIYEALELRDGGSDYLGKGVSKAVGNVNNIIGPALIGKDPTQQTAIDNFMVHELDGTQNEWGWCKQKLGANAILAVSLAVCKAGAVVSGIPLYKHIANLAGNPKIVLPVPAFNVINGGSHAGNKLAMQEFMILPVGAASFKEAMKMGVEVYHHLKSVIKKKYGQDATNVGDEGGFAPNIQENKEGLELLKTAIEKAGYTGKVVIGMDVAASEFYSEDKTYDLNFKEENNNGSQKISGDALKDLYKSFVAEYPIVSIEDPFDQDDWEHYAKMTTECGTEVQIVGDDLLVTNPKRVAKAIAEKSCNALLLKVNQIGSVTESIEAVKMSKKAGWGVMTSHRSGETEDTFIADLAVGLSTGQIKTGAPCRSERLAKYNQLLRIEEELGSEAIYAGVNFRKPVEPY

SEQ ID NO: 37512 - protein, 444 aa, Zea mays subsp. mays
MATITVVKARQIFDSRGNPTVEVDIHTSNGVKVTAAVPSGASTGIYEALELRDGGSDYLGKGVSKAVGNVNNIIGPALIGKDPTQQTAIDNFMVHELDGTQNEWGWCKQKLGANAILAVSLAVCKAGAVVSGIPLYKHIANLAGNPKIVLPVPAFNVINGGSHAGNKLAMQEFMILPVGAASFKEAMKMGVEVYHHLKSVIKKKYGQDATNVGDEGGFAPNIQENKEGLELLKTAIEKAGYTGKVVIGMDVAASEFYSEDKTYDLNFKEENNNGSQKISGDALKDLYKSFVAEYPIVSIEDPFDQDDWEHYAKMTTECGTEVQIVGDDLLVTNPKRVAKAIAEKSCNALLLKVNQIGSVTESIEAVKMSKKAGWGVMTSHRSGETEDTFIADLAVGLSTGQIKTGAPCRSERLAKYNQLLRIEEELGSEAIYAGVNFRKPVEPY

SEQ ID NO: 37513 - protein, 352 aa, Zea mays subsp. mays
MVHELDGTQNEWGWCKQKLGANAILAVSLAVCKAGAVVSGIPLYKHIANLAGNPKIVLPVPAFNVINGGSHAGNKLAMQEFMILPVGAASFKEAMKMGVEVYHHLKSVIKKKYGQDATNVGDEGGFAPNIQENKEGLELLKTAIEKAGYTGKVVIGMDVAASEFYSEDKTYDLNFKEENNNGSQKISGDALKDLYKSFVAEYPIVSIEDPFDQDDWEHYAKMTTECGTEVQIVGDDLLVTNPKRVAKAIAEKSCNALLLKVNQIGSVTESIEAVKMSKKAGWGVMTSHRSGETEDTFIADLAVGLSTGQIKTGAPCRSERLAKYNQLLRIEEELGSEAIYAGVNFRKPVEPY

SEQ ID NO: 37514 - DNA, 2163 bp, Zea mays subsp. mays
ggttgcagccaggggggagcagtcacacttctctgtctggctttcacctggaggcttgcctgcagagtgggtgaaacatcttggtagatccttcaggagcctgctgcgtagaacaagggacatgaggctgaggctgcagttggcaactctggcgacaggcttcattgacgtccttgttatttgcaatagagttttggacaaagtcccggacaatgctggcccgctgatcctaaggaagggacatggtggagcataccttcctctcatgtagatatttcccttctctttttggtgcattggattcagaacttaattcttggcagttaggctatatattgaaaggcagatgaatcttgcaaatattatatgtatcagctttctttggttcagcatctttaaagtcaagcttggctgcagtcttggacatggattctcatcgatgatgccatgaaagacttttgtgattgtatgtgcagcattttgagcggaaaagctggcagaaatgggattttttcagcttcatccggcaggtgttttcgcacccatgatatattgtatgttttgcatgtacgaagatccgccccgtatttgttttcctctttttttttggttttgcaagtgtcatgtaggtcgatttgctgtctgtgatttggactgcaagtctgcaaccagacggcagatgcgtcgagacgtcgagtgtccagtccagcgaaagcgtaaatacaaagcacatggacgttaaccagacggcagatagcctttgtttgttgttctactggtaatgttcttattttctaaccatggttttacaacccaggggatcttgtcctggcaactgctgagatcaactcatcacaagttgaatctcatagagctctatcggatacctgtactcaggcagtcttcaaaacgttttctactattccccgagtgaagtctttagcatggggatactgttctgatgcttttgatgactcaagttttaatgaaattctagtggtatcaagtgatgcttctatcacagtccatgcattctgccattctcgcaaaagcacactaacagttaattcaatgtctgatgctaaagagttgcatggggagtggaaagagtggcgccctactgaatgttcagtgttggaggatggtgagtcaggtccagaaaattggttttgttctttcctaactacagtcactgtgtctgtttctaatggaaaataccaagccagattgcccatgaaatctttattgcctaattcagcagaagttgtatcctttagcatatatgacattactctctctttcttgaaatattggtatagcaaatgttctctgaagactatggcggaaactgacagtgaatcaccacgacgttttcttagagcatcgtgcagttgtcagtgggagtgtctaaaagttttgtctagctcgtcatgttatttgatcggcttagttctgactcctaatgaatcagtacgttgtgaggcccatccatccaatgcggagtgtattttggttactgttctggagctaaaccactggggcatacagtggaactttgtggcagaccttcaggatgtatctgatggtattacgccaagtccaaaatgggttgattttcagttatcagatgtgtttcttgcctgccttaatacagcaggttttgttgccatttggaacgtgaaaactggtggtcttgtgacgtcattcagtgttcttcaacaatgcagaactgatctggaaatgcctctgaggagctctatgtccattgtgacaaatttggacgagggaaatatccatgttgagaactttgttggcagaatgtttaagcggttagttttggcatcatattcttatcttcttgctgttgtagatgaggttggagtagtgtatgtgttctatgcggatgacatcttaaacttcaaagctaatgtgcacgaaaactttgatctgcctgttatgaatcagtttgctgattgtttttcaaaaaaaaaaaaaagaaaaaaaaaaaaaaaaaaaaaaaaaaaaaaaaaaaaaaaaaaaaaaaaaaaaaaaaaaaaaaaaaaaaaaaaaaaaaaaaaaaaaaaaaaaaaaaaaaaaaaccccggggggggggcccgaaaccccattccccaaaaagggggggaaaaaaaaattccgggggcc

SEQ ID NO: 37515 - protein, 364 aa, Zea mays subsp. mays
MSDAKELHGEWKEWRPTECSVLEDGESGPENWFCSFLTTVTVSVSNGKYQARLPMKSLLPNSAEVVSFSIYDITLSFLKYWYSKCSLKTMAETDSESPRRFLRASCSCQWECLKVLSSSSCYLIGLVLTPNESVRCEAHPSNAECILVTVLELNHWGIQWNFVADLQDVSDGITPSPKWVDFQLSDVFLACLNTAGFVAIWNVKTGGLVTSFSVLQQCRTDLEMPLRSSMSIVTNLDEGNIHVENFVGRMFKRLVLASYSYLLAVVDEVGVVYVFYADDILNFKANVHENFDLPVMNQFADCFSKKKKRKKKKKKKKKKKKKKKKKKKKKKKKKKKKKKKKKNPGGGARNPIPQKGGEKKIPGA

SEQ ID NO: 37516 - protein, 310 aa, Zea mays subsp. mays
MKSLLPNSAEVVSFSIYDITLSFLKYWYSKCSLKTMAETDSESPRRFLRASCSCQWECLKVLSSSSCYLIGLVLTPNESVRCEAHPSNAECILVTVLELNHWGIQWNFVADLQDVSDGITPSPKWVDFQLSDVFLACLNTAGFVAIWNVKTGGLVTSFSVLQQCRTDLEMPLRSSMSIVTNLDEGNIHVENFVGRMFKRLVLASYSYLLAVVDEVGVVYVFYADDILNFKANVHENFDLPVMNQFADCFSKKKKRKKKKKKKKKKKKKKKKKKKKKKKKKKKKKKKKKNPGGGARNPIPQKGGEKKIPGA

SEQ ID NO: 37517 - protein, 275 aa, Zea mays subsp. mays
MAETDSESPRRFLRASCSCQWECLKVLSSSSCYLIGLVLTPNESVRCEAHPSNAECILVTVLELNHWGIQWNFVADLQDVSDGITPSPKWVDFQLSDVFLACLNTAGFVAIWNVKTGGLVTSFSVLQQCRTDLEMPLRSSMSIVTNLDEGNIHVENFVGRMFKRLVLASYSYLLAVVDEVGVVYVFYADDILNFKANVHENFDLPVMNQFADCFSKKKKRKKKKKKKKKKKKKKKKKKKKKKKKKKKKKKKKKNPGGGARNPIPQKGGEKKIPGA

SEQ ID NO: 37518 - DNA, 1545 bp, Zea mays subsp. mays
agagagagagagagagagagctcactagtcccccccccccccccccctttagtcggagagactgatatgcgacagaggatccaacgtcgcgactgaaacctagatcccaattctccgtttccaccactgtctctcctccgtcgttagggtttctcaggttcacatctgttggaaacttattgcaactcctaaaggcatttcacatatttgcttttatgcgtacgaggcttgggggatatttatataatccgaaagaactcttttcttatcatggagactctgtggactcttttgtatttgctagaacctgctccagctactctcattgtcacagctgtcaccgtgacatttgcatccgctttccgtgcacttaactacgggaaagagatggagagaaaccgtgacttctctgaagcatccataacactagatagctctcaggccttgatgatcccagttatgagctcttgcagtttgcttctcatgttctatttgttctcttctgtttctcagctcctgaccgcgtttacagccatcgcctctgtttcttctctcttctattggttatcaccatatgcggtatatatgaagacgcagcttggtctatctgatccctttctttcacgctgctgctccaaatcgtttacaagaatccaaggattgctacttgtggcttgtgctatgacagttgtggcatggctcatctctggccattgggtgttgaacaatttgctcggaatctccatttgtattgcgtttgttagccatgttcgtcttcctaatatcaaaatctgtgcaatgctcctcgtgtgtctctttgtatatgacatattctgggttttcttctctgagagattctttggtgctaacgttatggtggccgtggcaacccagcaagcatcaaacccagttcacacagtggctaacagtttgaatcttcctggactgcaattgatcacaaagaaactggaactacctgttaaaattgtgtttcctcggaacctattgggcggtgtggtgcccggtgtgagtgcctcagatttcatgatgcttggtcttggtgacatggctatccctgcaatgcttttggctttggtcctctgctttgaccatcgaaaaactagagatgtggtgaatatttttgatctaaaatcttccaagggacacaaatacatttggtatgcacttcccggatatgccattggcttggtggcggctctagctgcaggtgtcttgacccactcacctcagccagctctactttatctggtaccatctacgttaggaccggtgatcttcatgtcatggcggagaaaggatcttgcggagctgtgggaaggacctgcattatctaatcccattgagaaatctcatgaaatagagatctgagtttattatatcaatcaagatgattcagaaatctaaaacatattacataaaacaaagacgcttagtaggaaaacatcagatcaagaattcttgtattcttaagttcccaaaaaaagaaaaaaaaaaaaaaaaaaaactcgagggggggcccggtac

SEQ ID NO: 37519 - protein, 372 aa, Zea mays subsp. mays
METLWTLLYLLEPAPATLIVTAVTVTFASAFRALNYGKEMERNRDFSEASITLDSSQALMIPVMSSCSLLLMFYLFSSVSQLLTAFTAIASVSSLFYWLSPYAVYMKTQLGLSDPFLSRCCSKSFTRIQGLLLVACAMTVVAWLISGHWVLNNLLGISICIAFVSHVRLPNIKICAMLLVCLFVYDIFWVFFSERFFGANVMVAVATQQASNPVHTVANSLNLPGLQLITKKLELPVKIVFPRNLLGGVVPGVSASDFMMLGLGDMAIPAMLLALVLCFDHRKTRDVVNIFDLKSSKGHKYIWYALPGYAIGLVAALAAGVLTHSPQPALLYLVPSTLGPVIFMSWRRKDLAELWEGPALSNPIEKSHEIEI

SEQ ID NO: 37520 - protein, 333 aa, Zea mays subsp. mays
MERNRDFSEASITLDSSQALMIPVMSSCSLLLMFYLFSSVSQLLTAFTAIASVSSLFYWLSPYAVYMKTQLGLSDPFLSRCCSKSFTRIQGLLLVACAMTVVAWLISGHWVLNNLLGISICIAFVSHVRLPNIKICAMLLVCLFVYDIFWVFFSERFFGANVMVAVATQQASNPVHTVANSLNLPGLQLITKKLELPVKIVFPRNLLGGVVPGVSASDFMMLGLGDMAIPAMLLALVLCFDHRKTRDVVNIFDLKSSKGHKYIWYALPGYAIGLVAALAAGVLTHSPQPALLYLVPSTLGPVIFMSWRRKDLAELWEGPALSNPIEKSHEIEI

SEQ ID NO: 37521 - protein, 313 aa, Zea mays subsp. mays
MIPVMSSCSLLLMFYLFSSVSQLLTAFTAIASVSSLFYWLSPYAVYMKTQLGLSDPFLSRCCSKSFTRIQGLLLVACAMTVVAWLISGHWVLNNLLGISICIAFVSHVRLPNIKICAMLLVCLFVYDIFWVFFSERFFGANVMVAVATQQASNPVHTVANSLNLPGLQLITKKLELPVKIVFPRNLLGGVVPGVSASDFMMLGLGDMAIPAMLLALVLCFDHRKTRDVVNIFDLKSSKGHKYIWYALPGYAIGLVAALAAGVLTHSPQPALLYLVPSTLGPVIFMSWRRKDLAELWEGPALSNPIEKSHEIEI

SEQ ID NO: 37522 - DNA, 560 bp, Zea mays subsp. mays
  misc_feature (2)..(4): n is a, c, g, or t
gnnntttttttttttttttttttctttttttttttttttttttttttttttttttttttttttttttttttttttttttttttttgggaaaagaaaggtaccccgggctacctaaccccctaaaaagaccgaaaatccccgggaaactgggggaaatatttcaaaataaatttaccttttacaaaacccaaaaaggcctggtaggggataaaaaggaaaaaagaccccggataaaccccattgggggaaacccccttttcaacctggactgggaaaaggccaaaaacaaaagggacgacacccaaggttccaatgggatttgggaaaagccaaaccgacgggggaaccctggtcgcttcttcccccctaaaaattggtgtaacttgggcaaaggctgttgggggaacccccaatggagggtggggggtttgagggaagggccccttgccattgatcccttgaaacggttccccccccgggaaggggtcaccttggtcaaaaaaaatggtggtctcatcttcaaaatggacaaaaacaaccccctttctcttggggggggg

SEQ ID NO: 37523 - protein, 186 aa, Zea mays subsp. mays
  misc_feature (1)..(1): Xaa can be any naturally occurring amino acid
XFFFFFFLFFFFFFFFFFFFFFFFFFFLGKERYPGLPNPLKRPKIPGKLGEIFQNKFTFYKTQKGLVGDKKEKRPRINPIGGNPLFNLDWEKAKNKRDDTQGSNGIWEKPNRRGNPGRFFPPKNWCNLGKGCWGNPQWRVGGLREGPLAIDPLKRFPPREGVTLVKKNGGLIFKMDKNNPLSLGGG

SEQ ID NO: 37524 - DNA, 1666 bp, Zea mays subsp. mays
ccccccccccccccccccgaaaatactttctcgataagaataaaaaaatctattcgtcgtaataataaaaacacaactcaaacgattcacgggtttcacttggaatcgtttggttttctcatttccgaaatataaaaagatggccaaagcgccaccgtcaatctctcttctcctcctcctctgcgccgccgtattcctcaccatccccgccgtgatctccgccatcggtgttaactacggaactctcggaaacctcccaccaccgactcaggtggctaactttatcaagacacaaacttcgattgatagcgtcaagatcttcgatgtgaatcccgatatcctacgtgccttcgctggaactggtatctccgtcgttgtcaccgttcctaacggtgatattccggcgttggctaacggaagacaagctcgtcggtgggtttcggttaacattttgccgtttcatcctcagacgaagattaagtatatctcagtcggaaatgagattctgctcaccggagataataacatgatcaataatctcttaccggcgatgaggaatcttaacaacgctttggttcgtgctggtgtcagagatgttaaggttacaaccgcacactcacttaacatcatagcctatgacctgaccggtgcaccaagcagcggtagattcaggccgggttgggacaaaggcatattggctccaatcctagcttaccatcgccgaaccaagtctcctttcatggttaacccgtacccttactttggttttgaccccaaaaacgtcaacttcgcaattttccgaacaccgtacaaggcagtccgtgacccgttcacccgccacgtctacaccaacatgtttgatgcactcatggactcgacatactcagccatgaaagctcttggatacggtgatgttaacattgtcgttggcgagactggctggccatctgcttgtgacgcaccttggtgctcgcctgcgaatgctgcttggttcaacctcaacattatcaaacgtgcacaaggccaagggacacctctcatgcctaacagacggttcgagacatacattttcggtctcttcaacgaagaaggcaaacccggtccgaccgcagagcgtaactggggacttttccgagcagatttctccccggtttacgatgttggtcttctccgaaacggacaaggcggtggaggccgcccagcattgcccgcacctagtactgccggcggtaaatggtgtgtagcgaggtccggggcgacgaatactcagctgcaagacagtattaattgggtgtgtggtcagggtgttgactgtaaaccgatccaagctggtggttcgtgctttaacccgagcagtttgaggacgcacgcatcttttgttatgaatgcttatttccagagccacggccgcactgatggtgcttgtaacttcagtggaactggtatgatcgtagggaacaacccaagcaatggtgcatgtaagtactaaggagattgtctatgtagtagtatttgtctggaaagtcctaacataatggttctgaggaactttggatttgagagatcatcagctttgtgtttaatttcggattatcctaattttaagatttttttgttaattattttttcgctgattccttttatttaaataaagtggaacttccat

SEQ ID NO: 37525 - protein, 449 aa, Zea mays subsp. mays; identical to SEQ ID NO: 3316

SEQ ID NO: 37526 - protein, 320 aa, Zea mays subsp. mays; identical to SEQ ID NO: 3317

SEQ ID NO: 37527 - protein, 312 aa, Zea mays subsp. mays; identical to SEQ ID NO: 3318

SEQ ID NO: 37528 - DNA, 1521 bp, Zea mays subsp. mays
agaacatcctaatcgaattttcttctcccctattccctcttcttgttcttggagttgttggtgtccccggagctacaaaggccccgccttttggctcattctcagactttagtactttaccatctgctccaagaaagcgtcttggagatggcgcgcaccgagaagctcaccagcgatggctgctccggcggcgaagtccaagtggaggtggagctcggcatgggggtggacgggaaggggatcatagagtgccggatatgccaggaggagggggaggaggccgctatggactcaccttgcgcttgcgctggcacactcaagtttgcccacaggaaatgcatacagagatggtgcaacaagaagggaaatattacatgcgaaatctgcaaccaggtttactccccgaattatgtcatccctccaccgaaatgttgttcagatgaaatggacatgaatcttaggcaaaactgggtcggacgaatcgatccccatgattcccatttcctagccatcgccatcgcagagcagcagcttctgcaagctgaatttgatgactgtgtatctgcaaattctagcggtgccacatgctgccgatccattgctttaattgtgatgttccttttgctcgtacgccatgtaattgtcattgtgagggatgttagcatgctacaagatgcaacggtgctgttcagcgcaactcttcagtttgcgggattctttcttccttgttatgtaatagctcgttcttgctatgctttgcagcatcggagacggagacaggtgtagggaggctcacctgaaccttaagggcttgtttgggagcaagtgaaatgaaggggattgagggtgctagaatccctcactatttaaaattgaatagtggggtattctagccccttcaatcctctccattactcttcctcccaaacaagccctaaagaacacaaagacgcaccaattgaagcgccgtctcggcggtaccaccgaagataggaggactacatggaagcttgcgaagtgagcctccccgttgttgcttggattcaccgcaaagcatttggtttctgtcctgaagacgtcggcggtttaattaggttgattgagtagcgagagcaggcgctgtgaagctcaagtgtacatacgttgagggggacaaggccttttttttttacagctgagaggaagcaaaatgtagcctcacacatttctgctgcaaataaaagaacaatcgcccgtcagcgcctctgaagtttatgcttggtttgggattgctggcttgcacctcgcagttgaagagtaggtagtagtagtacagggcggctgctacctgctgctgctggacaagtgcgtacagagggtggtttctgaatgggacagacgtggagtcacgggctcagtgccgctctaatgctccgttaagtgccggattgtctcttcgtcagtaattatgacattgcaatcgcctgtaattttcagtacacccatcatgaggaacacggtggcaaccctcgtcacttcgtc

SEQ ID NO: 37529 - protein, 212 aa, Zea mays subsp. mays
MARTEKLTSDGCSGGEVQVEVELGMGVDGKGIIECRICQEEGEEAAMDSPCACAGTLKFAHRKCIQRWCNKKGNITCEICNQVYSPNYVIPPPKCCSDEMDMNLRQNWVGRIDPHDSHFLAIAIAEQQLLQAEFDDCVSANSSGATCCRSIALIVMFLLLVRHVIVIVRDVSMLQDATVLFSATLQFAGFFLPCYVIARSCYALQHRRRRQV

SEQ ID NO: 37530 - protein, 188 aa, Zea mays subsp. mays
MGVDGKGIIECRICQEEGEEAAMDSPCACAGTLKFAHRKCIQRWCNKKGNITCEICNQVYSPNYVIPPPKCCSDEMDMNLRQNWVGRIDPHDSHFLAIAIAEQQLLQAEFDDCVSANSSGATCCRSIALIVMFLLLVRHVIVIVRDVSMLQDATVLFSATLQFAGFFLPCYVIARSCYALQHRRRRQV

SEQ ID NO: 37531 - protein, 166 aa, Zea mays subsp. mays
MDSPCACAGTLKFAHRKCIQRWCNKKGNITCEICNQVYSPNYVIPPPKCCSDEMDMNLRQNWVGRIDPHDSHFLAIAIAEQQLLQAEFDDCVSANSSGATCCRSIALIVMFLLLVRHVIVIVRDVSMLQDATVLFSATLQFAGFFLPCYVIARSCYALQHRRRRQV

SEQ ID NO: 37532 - DNA, 906 bp, Zea mays subsp. mays
accgtgtctgcctcaaagctatgccaggacgccacgtccaagcaaagcacccgatgccattgccacctcccagcactcacgcgtgagcgtgactataaaaaacgcaccctctgcatccgcccccgtctgcctgccctatcgaatctttcgccgccccatcagcccagcaattcttcgctgttcgttgccgttggttccatcggttgatcgaccggccggaagcagagagagagagatgggcaagtcctgggcgctcatcagccacctccacaccgtcgccgggccgagcatcaccctgctgtaccctctgtacgcgtcggtgtgcgcgatggagagcccgtccaaggcggacgacgagcagtggctgtcctactggatcatacactccttcgtcaccctcctggagatgctcgccgagccgctcctccactgggtacccgtgtggtacccggccaaggtgctgttcgcggcgtggctggcgctgccgcagttcaagggcgcctccttcgtctacgagaagctcgtcagggaacagctccggaactaccgcgccaggtacccgcgcaagggcgccgccgccgccgccgccgtcggcgacgacgacgacgaccataaggtgcacatagccaaggtaggctgaggctgagcacgaccatgtgcagtgaaagcgtgtggagacgacgcaggagctgaccggagatcatcacaggaacttctgtagatctggtgttccaaggtgttcatttgatgtatcctacgtgtctctgtagctcttgtggactgccggtgtcgcgtaatgtatctgaactctcttcgcgagtgcgacggaaccccccctccccttgcagcacgagatgcttctgtaagaacgataacatgtagacaagccaagcgcctcagctcctt

SEQ ID NO: 37533 - protein, 212 aa, Zea mays subsp. mays
PCLPQSYARTPRPSKAPDAIATSQHSRVSVTIKNAPSASAPVCLPYRIFRRPISPAILRCSLPLVPSVDRPAGSREREMGKSWALISHLHTVAGPSITLLYPLYASVCAMESPSKADDEQWLSYWIIHSFVTLLEMLAEPLLHWVPVWYPAKVLFAAWLALPQFKGASFVYEKLVREQLRNYRARYPRKGAAAAAAVGDDDDDHKVHIAKVG

SEQ ID NO: 37534 - protein, 134 aa, Zea mays subsp. mays
MGKSWALISHLHTVAGPSITLLYPLYASVCAMESPSKADDEQWLSYWIIHSFVTLLEMLAEPLLHWVPVWYPAKVLFAAWLALPQFKGASFVYEKLVREQLRNYRARYPRKGAAAAAAVGDDDDDHKVHIAKVG

SEQ ID NO: 37535 - DNA, 679 bp, Zea mays subsp. mays
aaggcataacaaaccggcaatcccctcaccatgagggtaatgtaataatgtttatccaaagcacacatatacgtgatggttaaatcgaattgttgaactggtccagacaaatggcaagcaatggtacaggtgtcgatccctcactcgagggaaagaacaaataacagggcaccaaattaaactggtgcatcagcgataccaattcgttaaatgaaaatcaagtagaaagaggaaggaaaaaaaaacaaacaaaaggaagacgaaggtgtgccactgccaccgccgtgcccaatcagagcacgcccacgcatcgggaatgcgcgggagcagcagagcagcgcagcgcagccaagtctctccccccaccttggtctcttccctccggctccggctcctcgtccggcggctcagtgaatgtagtacgcgaagaaggaggccacggcggccccgacgatggcgggtgcgaccgcggaggagccgctggtgggagacggagccggcgcctccgcggccagcgccacggtggccgaggcggcgacgaggacggcgcaggcgatcttcttcatctccatccctggatgcggcggcttattagcgaccgtagagacggcggcggcgggatgggatggaggcgaggaagtctctctctgctccgacgatcgcttgcctgggtagtacg

SEQ ID NO: 37536 - protein, 92 aa, Zea mays subsp. mays
MRGSSRAAQRSQVSPPTLVSSLRLRLLVRRLSECSTRRRRPRRPRRWRVRPRRSRWWETEPAPPRPAPRWPRRRRGRRRRSSSSPSLDAAAY

SEQ ID NO: 37537 - protein, 73 aa, Zea mays subsp. mays
MAGATAEEPLVGDGAGASAASATVAEAATRTAQAIFFISIPGCGGLLATVETAAAGWDGGEEVSLCSDDRLPG

SEQ ID NO: 37538 - DNA, 1101 bp, Zea mays subsp. mays
tggattgactggtttgcagacgtggaaatacccaattcctcagggtgaaatacatcatgtcatgaaccctgatccttatcgggggactttcgggtctgatgctgcagcttatgctaaggaagtcgaagaacacataacttatggaagttcaggaagggttgcaggcttcattgcagaaacattccaaggtgtgggaggtgctgttgaactagctcctggatacctaaagttagcttatgacattgtgcgcaaggctggtggcgtttgtattgctgatgaagtccagagtggttttggccgtactggcagtcattactggggattccagacacaaggtgtcattcctgacatagtcaccatggcaaagggaattggcaatggcctaccattgggggcagttgtgacaactcctgagattgcaagtgtgttagctcaaaaaatccaatttaacacatttggtggaaatccagtttgttctgctggtgggttagctgtgcttaaggttcttgacaaggagaaacgccaggcacattgtgctgatgttggatctcacttgttggagcgtctaaaatcgcttcaggagaagcacgaaatcataggtgatgttagaggaaggggactgatgcttggggtggaactcgttacgggcagaaaggagaagacccctgccaagtcagaaaccattgaactgtttgagaagctcagagatctcggggtactagttggaaagggcggtctgcatcgtaacgtcttcagaataaaaccaccgatgtgcttttcgaaggacgatgcagacttcttggtggactccatggactacgcaatgtcaaggctctgaaggaacatgctctgagttgacaatgtgtctgcgtggaaacaacacttcctgcaaccgcaagatgcatggcctgaaatgaaactgaaaggcagatgatttaatgggcatgctccccgggtggtatgttggtgttatggtgaagtttaatagtccccctcccccgaataaattgatgaaaggggacagaacgtcttgcccagcttgtgaactgtttgtagaagaactgcagttaataaatagaatagcgagcaagcaagcgtgat

SEQ ID NO: 37539 - protein, 278 aa, Zea mays subsp. mays
GLTGLQTWKYPIPQGEIHHVMNPDPYRGTFGSDAAAYAKEVEEHITYGSSGRVAGFIAETFQGVGGAVELAPGYLKLAYDIVRKAGGVCIADEVQSGFGRTGSHYWGFQTQGVIPDIVTMAKGIGNGLPLGAVVTTPEIASVLAQKIQFNTFGGNPVCSAGGLAVLKVLDKEKRQAHCADVGSHLLERLKSLQEKHEIIGDVRGRGLMLGVELVTGRKEKTPAKSETIELFEKLRDLGVLVGKGGLHRNVFRIKPPMCFSKDDADFLVDSMDYAMSRL

SEQ ID NO: 37540 - protein, 258 aa, Zea mays subsp. mays
MNPDPYRGTFGSDAAAYAKEVEEHITYGSSGRVAGFIAETFQGVGGAVELAPGYLKLAYDIVRKAGGVCIADEVQSGFGRTGSHYWGFQTQGVIPDIVTMAKGIGNGLPLGAVVTTPEIASVLAQKIQFNTFGGNPVCSAGGLAVLKVLDKEKRQAHCADVGSHLLERLKSLQEKHEIIGDVRGRGLMLGVELVTGRKEKTPAKSETIELFEKLRDLGVLVGKGGLHRNVFRIKPPMCFSKDDADFLVDSMDYAMSRL

SEQ ID NO: 37541 - protein, 159 aa, Zea mays subsp. mays
MAKGIGNGLPLGAVVTTPEIASVLAQKIQFNTFGGNPVCSAGGLAVLKVLDKEKRQAHCADVGSHLLERLKSLQEKHEIIGDVRGRGLMLGVELVTGRKEKTPAKSETIELFEKLRDLGVLVGKGGLHRNVFRIKPPMCFSKDDADFLVDSMDYAMSRL

SEQ ID NO: 37542 - DNA, 503 bp, Zea mays subsp. mays
gaacatgattattgcaagtcaagacatcgtcatataattattccaatatcaagtatgatgcaaaatcaagggatgggaactccatctgttcaacaatcagagagctcagggtcagaaccatacaggttcagaacattgactggtttgtttgatgcaactgaacaagtgcatcactttgagtatagtggagtgtgcatgctggcagctgatgaacctgcatgtgtggaacaggctctttcacaggactgctggaaaagagctatggaggttgaactgaagttaattcaagaaaatcagacctgggagattgctgatctgccaagggatcactaaggctataggactcaaatgggttttcaaagtaaagagggatccaacattagtgcgaacaattgtattttagtttagatttagagtacacttatgtatgagttgtttgacaatgcttatttatgagacattaaaatgtacttatttatattatattaattataatgttgttc

SEQ ID NO: 37543 - protein, 110 aa, Zea mays subsp. mays
EHDYCKSRHRHIIIPISSMMQNQGMGTPSVQQSESSGSEPYRFRTLTGLFDATEQVHHFEYSGVCMLAADEPACVEQALSQDCWKRAMEVELKLIQENQTWEIADLPRDH

SEQ ID NO: 37544 - protein, 92 aa, Zea mays subsp. mays
MMQNQGMGTPSVQQSESSGSEPYRFRTLTGLFDATEQVHHFEYSGVCMLAADEPACVEQALSQDCWKRAMEVELKLIQENQTWEIADLPRDH

SEQ ID NO: 37545 - protein, 91 aa, Zea mays subsp. mays
MQNQGMGTPSVQQSESSGSEPYRFRTLTGLFDATEQVHHFEYSGVCMLAADEPACVEQALSQDCWKRAMEVELKLIQENQTWEIADLPRDH

SEQ ID NO: 37546 - DNA, 833 bp, Zea mays subsp. mays
  misc_feature (576)..(576): n is a, c, g, or t
agaaaagctcgcagaagtgacctccctctgtgtctctccgctcggcgctcggaccaccgcggaacggcggaaccctccgatagaatcatagaaccaaaccctcctcctcgcaccgcgccgctgcagctgaccaccctacttgaccggccggggagagagatagagataaagacatagacaaacagacggcgggcaggcatgggcggcgtcacgtccaccatcgccgcgcgcttcgccttcttcccgcccacgccgccgtcctacaccgtcgtggtcgccgacgctgcgacaggccgcctcgccatcccggagatctcacgggccctctcgcgccgccggaggcgggacggcgccggcgctgggggctcctcctcggcctcctccgtcgcggccgccgagaacgaggagggcgcggaggtggtgcgcctccggacccgccgcgggaacggagatcgtgggggtgtacgtgcgccacgcgcgggcctccgccacgctgctctactcccacggcaacgccgccgacctcggccagatgttcggcctcttcgtcgagctcagccgccgcctccgcgtcancctcttcgggtatgattattctggttatgggagatctacagggaagcccactgagtgtaatacatatgcagacattgaagcagcatataactgcctcaaggaaaaatatagtgtcgcagatgaggatataatcttatacggccagtctgttggaagtggtccaaccattgatcttgcttcacgattgccagacttgcgagctgtggttttgcatagtcctattttatctggagtaagagtactatatccagtcaaac

SEQ ID NO: 37547 - protein, 130 aa, Zea mays subsp. mays
  misc_feature (126)..(126): Xaa can be any naturally occurring amino acid
MGGVTSTIAARFAFFPPTPPSYTVVVADAATGRLAIPEISRALSRRRRRDGAGAGGSSSASSVAAAENEEGAEVVRLRTRRGNGDRGGVRAPRAGLRHAALLPRQRRRPRPDVRPLRRAQPPPPRXPLRV

SEQ ID NO: 37548 - protein, 100 aa, Zea mays subsp. mays
  misc_feature (15)..(15): Xaa can be any naturally occurring amino acid
MFGLFVELSRRLRVXLFGYDYSGYGRSTGKPTECNTYADIEAAYNCLKEKYSVADEDIILYGQSVGSGPTIDLASRLPDLRAVVLHSPILSGVRVLYPVK

SEQ ID NO: 37549 - DNA, 534 bp, Zea mays subsp. mays
ctcatcacaggcaacaaggcaccacaccttcttcctcctcttcctcctcctagcacagctagcgcctgctccccttcgtctgtgatcatgtcttgcagcagcggcaagtgcaactgcggctccagctgctcctgcggcagctcatgcaactgcatgtcccctgacgtggagaccgccgccgccagcagcatcaagaccatggtcctcgctgcgccgaccaccaaggccagcgccggcggcttcgaggcggccaccgagggcggcggctgcgactgcaacacctgcaactgcggcaccagctgcggctgctcctgctgcagctgcaactgagccggcccgcccggcccggcgatggcgcacgagagtcgagaggacgacgacgacgaggcgtataaatataatagcagcgtctaaataagatcctgtcaactgcacccgccattatcgatccatggtcgctcctggggttcatgttcatctgtgtaacgtgctcgcggtcatgtccgtctcgtgccggaattaatatttatatgc

SEQ ID NO: 37550 - protein, 109 aa, Zea mays subsp. mays
LITGNKAPHLLPPLPPPSTASACSPSSVIMSCSSGKCNCGSSCSCGSSCNCMSPDVETAAASSIKTMVLAAPTTKASAGGFEAATEGGGCDCNTCNCGTSCGCSCCSCN

SEQ ID NO: 37551 - protein, 80 aa, Zea mays subsp. mays
MSCSSGKCNCGSSCSCGSSCNCMSPDVETAAASSIKTMVLAAPTTKASAGGFEAATEGGGCDCNTCNCGTSCGCSCCSCN

SEQ ID NO: 37552 - protein, 58 aa, Zea mays subsp. mays
MSPDVETAAASSIKTMVLAAPTTKASAGGFEAATEGGGCDCNTCNCGTSCGCSCCSCN

SEQ ID NO: 37553 - DNA, 1080 bp, Zea mays subsp. mays
atttctcaaacaagagcagattccattacatatgatgttaaagttcagatgattgaaatatacaatgagcaagagggatttattaatgactgatggtgcaaacaaaagattagagatacgcaataattctcatgtaaatggactcaacatcccagatgccaatattgtgccagtcaagtgcgcacaagatgttttggatctgatgaaagttggccagagaaaccgagcagttggatcaactgctcttaatgaacgaagtagccgctcacacagtgtgttgacagctcatgtacaaggaaaggaggtaatttcaggctcaactctaagagggtgtcttcatctagtggatctcgcgggaagtgagagggtagacaaatctgaagcgactggagaaagactaactgaagccaagcacataaacaaatctctgtcagcacttggtgatgttatatctgcacttgcccaaaagagttcccatgttccatatagaaatagcaagtttacacaagtgctgcaggatgccttaggtggtcaagcaaaaacattgatgtttgtgcatgtgaaccctgaaacagactcttttagtgaaacaatgagcactctcaaattcgctgagcgtgtagctacaatagaacttggtgccgcccgtgcaaacaaggaagcaggccaggtcaaagacctaaaggaagagatcgccaagcttaaattggcattagatgaaaaggaaaatgaagtggcacagtttaaagatcttgctaaccgtgtgacttctgagatgagaaatgcaagaacaagatcacctttaaccgccagcatgtccttgaaacctgaagtcagtcaagaatccagtgtagacacctgtacaagtgagataagaagttcatcatctggcaagcaaagaaggttccgttcaccgttgtcagtgagagagctagacgataagtcacctgtcatcagcagggaactgtacctgagtgcgcgaaagtacaagactccctctcctccggttagaagctcactctctgtcgagagaggcagctttgccaaaatcgtggagaacactggaagcatcgactgcac

SEQ ID NO: 37554 - protein, 338 aa, Zea mays subsp. mays
MSKRDLLMTDGANKRLEIRNNSHVNGLNIPDANIVPVKCAQDVLDLMKVGQRNRAVGSTALNERSSRSHSVLTAHVQGKEVISGSTLRGCLHLVDLAGSERVDKSEATGERLTEAKHINKSLSALGDVISALAQKSSHVPYRNSKFTQVLQDALGGQAKTLMFVHVNPETDSFSETMSTLKFAERVATIELGAARANKEAGQVKDLKEEIAKLKLALDEKENEVAQFKDLANRVTSEMRNARTRSPLTASMSLKPEVSQESSVDTCTSEIRSSSSGKQRRFRSPLSVRELDDKSPVISRELYLSARKYKTPSPPVRSSLSVERGSFAKIVENTGSIDC

SEQ ID NO: 37555 - protein, 331 aa, Zea mays subsp. mays
MTDGANKRLEIRNNSHVNGLNIPDANIVPVKCAQDVLDLMKVGQRNRAVGSTALNERSSRSHSVLTAHVQGKEVISGSTLRGCLHLVDLAGSERVDKSEATGERLTEAKHINKSLSALGDVISALAQKSSHVPYRNSKFTQVLQDALGGQAKTLMFVHVNPETDSFSETMSTLKFAERVATIELGAARANKEAGQVKDLKEEIAKLKLALDEKENEVAQFKDLANRVTSEMRNARTRSPLTASMSLKPEVSQESSVDTCTSEIRSSSSGKQRRFRSPLSVRELDDKSPVISRELYLSARKYKTPSPPVRSSLSVERGSFAKIVENTGSIDC

SEQ ID NO: 37556 - protein, 292 aa, Zea mays subsp. mays
MKVGQRNRAVGSTALNERSSRSHSVLTAHVQGKEVISGSTLRGCLHLVDLAGSERVDKSEATGERLTEAKHINKSLSALGDVISALAQKSSHVPYRNSKFTQVLQDALGGQAKTLMFVHVNPETDSFSETMSTLKFAERVATIELGAARANKEAGQVKDLKEEIAKLKLALDEKENEVAQFKDLANRVTSEMRNARTRSPLTASMSLKPEVSQESSVDTCTSEIRSSSSGKQRRFRSPLSVRELDDKSPVISRELYLSARKYKTPSPPVRSSLSVERGSFAKIVENTGSIDC

SEQ ID NO: 37557 - DNA, 645 bp, Zea mays subsp. mays
gaacggagagttcgacctagcacgcccggccgccgccgcagcccgcaatggcgtcccttttcaaggaccccagcaagctctcggcgtacagggaccgccggttcaaggggacgcaggaggagtatgaggcggcgctgcttgcgtcgacaacgctgtacatcggtaatatgtccttctacaccacggaggagcaggcctacgagctcttctcccgcgccggcgagatcaagaagatcatcatggggctcgacaagaactccaagaccccatgcggtttctgctttgtactgtgcgggcctcttcccttccttgatacgtcgcgttaattggctctttgattttggattcggtgctgtagtttccttcaatctacaggaacataaccttcgccctagtttaattagaaggggagatagtcccaattgttctgctggaatgtagtttgatgcaattagacgctgagtagatgggttccagacctgtttatgtattgatttgtttcctcagtagtgtgagttgttcatctgctagttgcaattggacattgcttcgtgaaattttatttgctgccaggaacatgtgagatgcctagaacatgaatagagaactgtgctatctcagcatgtacattcctcaggatattgc

SEQ ID NO: 37558 - protein, 146 aa, Zea mays subsp. mays
ERRVRPSTPGRRRSPQWRPFSRTPASSRRTGTAGSRGRRRSMRRRCLRRQRCTSVICPSTPRRSRPTSSSPAPARSRRSSWGSTRTPRPHAVSALYCAGLFPSLIRRVNWLFDFGFGAVVSFNLQEHNLRPSLIRRGDSPNCSAGM

SEQ ID NO: 37559 - protein, 105 aa, Zea mays subsp. mays
MRRRCLRRQRCTSVICPSTPRRSRPTSSSPAPARSRRSSWGSTRTPRPHAVSALYCAGLFPSLIRRVNWLFDFGFGAVVSFNLQEHNLRPSLIRRGDSPNCSAGM

SEQ ID NO: 37560 - protein, 92 aa, Zea mays subsp. mays
MASLFKDPSKLSAYRDRRFKGTQEEYEAALLASTTLYIGNMSFYTTEEQAYELFSRAGEIKKIIMGLDKNSKTPCGFCFVLCGPLPFLDTSR

SEQ ID NO: 37561 - DNA, 1677 bp, Zea mays subsp. mays
aacgtctcgctgcaccatttttcatcgttgatcagtcgtcgatcctcttgagtgatttgattttagactttctagttatcaaactcgaaagatggattctgtccttgtagtgggcattgcatcggttattctcggtgcgttgatcgctgtactcttcttcggtagctacttccggaagcggacatcggaggtgcaatccatggccaaagcggagcctcaggatccgatccggaatccaaagtcgaatcatcctgctccgaagaagaatcatcccaaatctcaagcgtccgataagaatcagaacaaacggcatcatcctttagatttaaacacgttgaaaggccacggtgatgctgttactggactctgtttctcgtccgatggaaagagcttggccacagcttgcgctgatggtttaatcagggtgttcaagctagatgatgcatcaagcaaaagcttcaaatttttaaggataaatcttcctgctggaggacatccaaccgccgtggcatttgctgacgatgcctcatctattgttgtggcttgtcatcatatgtctggttcatctttgtacatgtacggtgaagataagcaaaaggatcagcaagggaagcttcctcttcctagtatcaaatgggaccaccatcatattcatgagaagagatcagtgcttaccatctctggaactactgcaacttacggtactgctgatggaagtgttgtcattgcctcttgttctgaagggactgatatcgtcctttggcatgggaaaactgggaggaatttgggacatgttgatacaaaccagttgaagaaccacatggcagctgtatcaccaaatggacgttttttggcagctgcagcatttactgcagatgtgaaagtgtgggaaattgtgtatcagaaagatggttctgtgaaagaggtttcaagagttatgcaacttaaaggccacaagagtgcagtgacttggttatgcttttctccaaactcagagaaaatcatcaccgcttcaaaagatggttcaataagagtctggaacatcaatgtccgttatcatcttgatgaggatccaaagactttgaaggtgttcccgattccactttgcgactcaggaggcaatccgttgcactatgatcgtctcagcttatgcccagagggaaagatattggcagcaagccatggttccacattgcagtggttatgtgctgaaactggaaatgtcttggacacagctgagaaagcccacgaaggggatatcacatgcatatcttgggcacccaaggctattacagttgggtaaagacatgccatggttttggggacatcaggcgatgacaagaaagtgaagctgtgggaagctccaaagtcgcaatctttgtaggctctcgcatacacgtagtcccttgatgacatgaggcgtatttaaacggtacaacttgcgaggaaaaaaactctaataggttttgtttcgagtcccaagttgggatcaaatgaagggtggtttaaagtccttcttgttaccaagtgtcttttaacttctgaagttttgaattttgctcataggactagtacaacactcacagtcttctatgttttccaaattaaggaaatttaaaaagcacacaacaacactaagaaaaaaaaaaaaaaaaaaaactcgagggggggcccggt

SEQ ID NO: 37562 - protein, 403 aa, Zea mays subsp. mays
MDSVLVVGIASVILGALIAVLFFGSYFRKRTSEVQSMAKAEPQDPIRNPKSNHPAPKKNHPKSQASDKNQNKRHHPLDLNTLKGHGDAVTGLCFSSDGKSLATACADGLIRVFKLDDASSKSFKFLRINLPAGGHPTAVAFADDASSIVVACHHMSGSSLYMYGEDKQKDQQGKLPLPSIKWDHHHIHEKRSVLTISGTTATYGTADGSVVIASCSEGTDIVLWHGKTGRNLGHVDTNQLKNHMAAVSPNGRFLAAAAFTADVKVWEIVYQKDGSVKEVSRVMQLKGHKSAVTWLCFSPNSEKIITASKDGSIRVWNINVRYHLDEDPKTLKVFPIPLCDSGGNPLHYDRLSLCPEGKILAASHGSTLQWLCAETGNVLDTAEKAHEGDITCISWAPKAITVG

SEQ ID NO: 37563 - protein, 367 aa, Zea mays subsp. mays
MAKAEPQDPIRNPKSNHPAPKKNHPKSQASDKNQNKRHHPLDLNTLKGHGDAVTGLCFSSDGKSLATACADGLIRVFKLDDASSKSFKFLRINLPAGGHPTAVAFADDASSIVVACHHMSGSSLYMYGEDKQKDQQGKLPLPSIKWDHHHIHEKRSVLTISGTTATYGTADGSVVIASCSEGTDIVLWHGKTGRNLGHVDTNQLKNHMAAVSPNGRFLAAAAFTADVKVWEIVYQKDGSVKEVSRVMQLKGHKSAVTWLCFSPNSEKIITASKDGSIRVWNINVRYHLDEDPKTLKVFPIPLCDSGGNPLHYDRLSLCPEGKILAASHGSTLQWLCAETGNVLDTAEKAHEGDITCISWAPKAITVG

SEQ ID NO: 37564 - protein, 249 aa, Zea mays subsp. mays
MSGSSLYMYGEDKQKDQQGKLPLPSIKWDHHHIHEKRSVLTISGTTATYGTADGSVVIASCSEGTDIVLWHGKTGRNLGHVDTNQLKNHMAAVSPNGRFLAAAAFTADVKVWEIVYQKDGSVKEVSRVMQLKGHKSAVTWLCFSPNSEKIITASKDGSIRVWNINVRYHLDEDPKTLKVFPIPLCDSGGNPLHYDRLSLCPEGKILAASHGSTLQWLCAETGNVLDTAEKAHEGDITCISWAPKAITVG

SEQ ID NO: 37565 - DNA, 1096 bp, Zea mays subsp. mays
ttgcacctgaaggctctggggattgatgatatagttggatttgattttatagataaaccttcaaggggggcgattataaaagcattggcagagttgcattcgcttggtgccttggcagatgatggtaaactagagaatcccgttggctaccaatgtcacggctcccactggaacctgtatactccaaagctctaattttggccaatcaattcaactgtctagaagaaatgctgatcactgttgccgtgctcagtgtggagtccatattttatgatccgcgtgagaagagagaagaggcaagaacctcaaaaaaccactttgctagcgttgaaggggatcacctaacttatcttagtgtttatcgggagtcagatgagttcttggaaaagagaaaagcagccggcagtggaaacaatattgataaaattatgaaaaaatggtgtaaggagaactatgtgaatagccgttccttgaagcatgctcgtgacatatataggcaaattcgtgaacatgttgaacagataggctttaatgtgtcttcatgcggaaatgacatgcttgcgtttcgtagatgtcttgctgcatcatttttccttaaagcagcacagagacaattggacggtacatacagggctttggaaagtggtgaggttgtccacatccacccaacttctgttttattccgtgcgaaaccagaatgtgttatcttcaacgagctcatgcaaaccagcaagaagtacatcaagaacctcacaataattgattccttatggttgtctgagttggctcctcaccatttccaaacggcagagtgaattttgcttataacaagatataactatttctattctgatggagatcgaacacggataccactggagactgatggtaaacatttagaggaaactcgtttggttgaaagaagatgactgtggctgagcttagcattaatttataggtagcaagacgaccaagcttaatctatgctcttttatggagctggagacacctaacatttcaggtttattattgtatcttgtaatagatttatcttttttggctttcgcctgcacttgactcatcttaaagtcaacag

SEQ ID NO: 37566 - protein, 220 aa, Zea mays subsp. mays
MSRLPLEPVYSKALILANQFNCLEEMLITVAVLSVESIFYDPREKREEARTSKNHFASVEGDHLTYLSVYRESDEFLEKRKAAGSGNNIDKIMKKWCKENYVNSRSLKHARDIYRQIREHVEQIGFNVSSCGNDMLAFRRCLAASFFLKAAQRQLDGTYRALESGEVVHIHPTSVLFRAKPECVIFNELMQTSKKYIKNLTIIDSLWLSELAPHHFQTAE

SEQ ID NO: 37567 - protein, 195 aa, Zea mays subsp. mays
MLITVAVLSVESIFYDPREKREEARTSKNHFASVEGDHLTYLSVYRESDEFLEKRKAAGSGNNIDKIMKKWCKENYVNSRSLKHARDIYRQIREHVEQIGFNVSSCGNDMLAFRRCLAASFFLKAAQRQLDGTYRALESGEVVHIHPTSVLFRAKPECVIFNELMQTSKKYIKNLTIIDSLWLSELAPHHFQTAE

SEQ ID NO: 37568 - protein, 128 aa, Zea mays subsp. mays
MKKWCKENYVNSRSLKHARDIYRQIREHVEQIGFNVSSCGNDMLAFRRCLAASFFLKAAQRQLDGTYRALESGEVVHIHPTSVLFRAKPECVIFNELMQTSKKYIKNLTIIDSLWLSELAPHHFQTAE

SEQ ID NO: 37569 - DNA, 643 bp, Zea mays subsp. mays
gaacaaaactgcaaaaacaaaaataaaaaaaacatcgcacaagaaaataaaagatttgtagaatcaactaagaaaatggctagcactatgatgactacattgcctcagttcaatggtcttcgagccaccaaaatctctgcagctcctgtacaaggcctggcaagtgttcagcccatgagacgcaagggaaatggagctttgggtgcaaagtgtgacttcatcggttcatcaacaaatctgataatggtaacgtcgacgaccctgatgttgttcgcggggagattcggacttgcgccatcagccaataggaaggcgacagctggacttaggttggaggcacgtgactcaggtctacaaacgggtgacccggccgggttcacgcttgcggacactttggcttgtggcaccgttggtcatatcatcggtgtaggagttgtccttggccttaaaaacattggtgctatttgaagttcctaaagctcttttatttgtatttgtaaaatttgtagatttttataacaatattctcatgcacctgaacgagatctaatggattttacaagtctttatgtttatcttataatgttgtatcgcaatttatcccccaaaaaaaaaaaaaaaaaaactcgagggggggcccggt

SEQ ID NO: 37570 - protein, 155 aa, Zea mays subsp. mays
EQNCKNKNKKNIAQENKRFVESTKKMASTMMTTLPQFNGLRATKISAAPVQGLASVQPMRRKGNGALGAKCDFIGSSTNLIMVTSTTLMLFAGRFGLAPSANRKATAGLRLEARDSGLQTGDPAGFTLADTLACGTVGHIIGVGVVLGLKNIGAI

SEQ ID NO: 37571 - protein, 130 aa, Zea mays subsp. mays
MASTMMTTLPQFNGLRATKISAAPVQGLASVQPMRRKGNGALGAKCDFIGSSTNLIMVTSTTLMLFAGRFGLAPSANRKATAGLRLEARDSGLQTGDPAGFTLADTLACGTVGHIIGVGVVLGLKNIGAI

SEQ ID NO: 37572 - protein, 126 aa, Zea mays subsp. mays
MMTTLPQFNGLRATKISAAPVQGLASVQPMRRKGNGALGAKCDFIGSSTNLIMVTSTTLMLFAGRFGLAPSANRKATAGLRLEARDSGLQTGDPAGFTLADTLACGTVGHIIGVGVVLGLKNIGAI

SEQ ID NO: 37573 - DNA, 936 bp, Zea mays subsp. mays
aaaaaaaagaatagaacggaatgaaattctttccgtcacaaactgaggaccctaatcccaaatcgagaggctgaagcgctggactccagctactgttgctcgcctggttcgggacggccgattgggtgccgggttgccaaggacatggaggattcgagcggctgctcgtcgtctccagccgtcctacggaacaagtactgggtcctccgccacggccgcagcgtccccaacgagcgcggtctcatcgtgtcatctctggagaacggcacgaagccggagttcgggctggccccgcagggagtcgagcaggcgcgcgcggccggcgaaaagttccggaaggagcttgacgagattggtgtgccggtgggttccgtcaagattcgttactcgccgttctcacggaccaccgagacggctagagtggtcgccggtgtgctcggcatcccctttgaagctcctagttgcgaagcggtgctgggacttcgtgagcgctactttgggccatcatatgagttactttcacatgataagtatgcagacatatggtcagtagatgaagcacatccctgtatggctcctgaaggtggcgagagcgtcgcagatgttgctagtagattttcagctgtgctgtcatctacagagacacattttcatggctctgcaattcttattgtcagccatggggacccactacaaatctttcaagctgtcctcagtggagccaaggagaacatgtctttccttcacgatctcaccaacctgaaggtgaaagatactgacgatctcaccaacctggaagtgaaagacacgatggtggcatccattctgtcacagcatcgtaagtttgcgctcatcacaggagagctgcgccgagttgtgtaacttgctgctgcttgggtttaacgtcgcctgtcagttgaccatatgtaaacctgc

SEQ ID NO: 37574 - protein, 245 aa, Zea mays subsp. mays
MEDSSGCSSSPAVLRNKYWVLRHGRSVPNERGLIVSSLENGTKPEFGLAPQGVEQARAAGEKFRKELDEIGVPVGSVKIRYSPFSRTTETARVVAGVLGIPFEAPSCEAVLGLRERYFGPSYELLSHDKYADIWSVDEAHPCMAPEGGESVADVASRFSAVLSSTETHFHGSAILIVSHGDPLQIFQAVLSGAKENMSFLHDLTNLKVKDTDDLTNLEVKDTMVASILSQHRKFALITGELRRVV

SEQ ID NO: 37575 - DNA, 800 bp, Zea mays subsp. mays
cccaacattagcacaaagaacacaatagaccactgatttcacaatgaaaagggagacaatgccttcatggctagaactgttgcttgcaacacaattctttacgacttgtgctaaccatcttcttgctagtcgcaatgaatgtaacctattttgcacccagtgtgagaccaaaccagctgctttctgtaactattgtcgttcaagtgatcattccacccaccgtgtaatccagataaggcgttcatcgtaccatgacgttgtgagggtgtccgagattgaggatatctttgatgtcagcgatgtgcaaacttatgtaatcaatagtgcaaggattgtattcctgaatgagcggccacaactgcgtgcttctagtgtccccatttgtaaggcacccacatcatcaacacatagctgtgagacatgtagccgtgtgctacttgatgcatttcgcttctgctctcttggatgcaatcttagaggcttaaatatggaagctggtatgcaagctatggttggcaacaaccctcggtccaatggtatggatcatgtggctaggattgacaatgttggttcaagtactacaaatgaccaaaacagctgcaatgacaagaactacgaagaaccaccaccaaaaagggttgctcgtcacagacgcaagggaattccccaacgtgcgccattcttctaatctgaacatcatgacaatgtccagtaaatgttgtgggaaataagaagagataatatttgtcatgggtgaaatgaatgaatgaaataaataaaagaatgaatgaatggcccct

SEQ ID NO: 37576 - protein, 214 aa, Zea mays subsp. mays
MKRETMPSWLELLLATQFFTTCANHLLASRNECNLFCTQCETKPAAFCNYCRSSDHSTHRVIQIRRSSYHDVVRVSEIEDIFDVSDVQTYVINSARIVFLNERPQLRASSVPICKAPTSSTHSCETCSRVLLDAFRFCSLGCNLRGLNMEAGMQAMVGNNPRSNGMDHVARIDNVGSSTTNDQNSCNDKNYEEPPPKRVARHRRKGIPQRAPFF

SEQ ID NO: 37577 - protein, 209 aa, Zea mays subsp. mays
MPSWLELLLATQFFTTCANHLLASRNECNLFCTQCETKPAAFCNYCRSSDHSTHRVIQIRRSSYHDVVRVSEIEDIFDVSDVQTYVINSARIVFLNERPQLRASSVPICKAPTSSTHSCETCSRVLLDAFRFCSLGCNLRGLNMEAGMQAMVGNNPRSNGMDHVARIDNVGSSTTNDQNSCNDKNYEEPPPKRVARHRRKGIPQRAPFF

SEQ ID NO: 37578 - DNA, 1161 bp, Zea mays subsp. mays
aaaacacgaggtaaacaaatcagaggaatttgacgaggccaccgtcaccaccatggcggccgccgccaccaccgcttcgccctcggcctccttccctgcggcatccctccgtcgcgacgcgcgcaggacctcatgcgtagccgccgccgccgcggcgacgacggccgctgaggcggggctcgcggccgtcccggcgccgccgccaacgccgatggttcgggtggtgccggagtcactgcagcgggaaagcgggtgcctcgtggagggatttagggcgcgcggtgcgtgcgcggcggatggggaggggtttggggacgccgcgggggaaggaggaggccccggcgcgatggagtacctgaccagcgtgctgtcatccaaggtgtacgacgtggcaatcgaatcaccgctgcagctcgcctccaagctctcccaccgcctcggggtcaacatctggatcaagcgcgaggacctgcagccggtgttctcattcaaattgcggggagcatacaacatgatggcaaagctctcccgtgagcagttagagaggggcgtcatctgctcctctgctggaaaccatgcccagggcgttgctctttctgctcagagactgggttgtgatgctgtcatcgtcatgcccgtgacgacaccagaaatcaagtggaaatcagtggagcggttgggagcaacggtggtccttgagggggactcatatgatgaagctcagtcatacgcaaaattacgatgtcagcaagaagaccgcacattcatacctccctttgaccatcctgatgtcatcactgggcaaggaactgtcggcatggaaattgttcggcaactgcaaggtccactgcatgcaatatttgtacctgttggaggcggtggattaattgctggaattgctgcctatgtaaaacgggttcgcccagaggtgaaaataattggagtggaaccctccgatgcaaatgcaatggcattatccttatatcatggtaagagggtcatgttggagcatgttggtgggtttgctgatggtgttgctgtcaaagctgtaggggaggaaacatttcgcctgtgcagagagcttgtagatggcattgttatggtcagtcgagacgctatttgtgcttcgataaaggatatgtttgaggagaaaagaagtat

SEQ ID NO: 37579 - protein, 386 aa, Zea mays subsp. mays
KHEVNKSEEFDEATVTTMAAAATTASPSASFPAASLRRDARRTSCVAAAAAATTAAEAGLAAVPAPPPTPMVRVVPESLQRESGCLVEGFRARGACAADGEGFGDAAGEGGGPGAMEYLTSVLSSKVYDVAIESPLQLASKLSHRLGVNIWIKREDLQPVFSFKLRGAYNMMAKLSREQLERGVICSSAGNHAQGVALSAQRLGCDAVIVMPVTTPEIKWKSVERLGATVVLEGDSYDEAQSYAKLRCQQEDRTFIPPFDHPDVITGQGTVGMEIVRQLQGPLHAIFVPVGGGGLIAGIAAYVKRVRPEVKIIGVEPSDANAMALSLYHGKRVMLEHVGGFADGVAVKAVGEETFRLCRELVDGIVMVSRDAICASIKDMFEEKRS

SEQ ID NO: 37580 - protein, 369 aa, Zea mays subsp. mays
MAAAATTASPSASFPAASLRRDARRTSCVAAAAAATTAAEAGLAAVPAPPPTPMVRVVPESLQRESGCLVEGFRARGACAADGEGFGDAAGEGGGPGAMEYLTSVLSSKVYDVAIESPLQLASKLSHRLGVNIWIKREDLQPVFSFKLRGAYNMMAKLSREQLERGVICSSAGNHAQGVALSAQRLGCDAVIVMPVTTPEIKWKSVERLGATVVLEGDSYDEAQSYAKLRCQQEDRTFIPPFDHPDVITGQGTVGMEIVRQLQGPLHAIFVPVGGGGLIAGIAAYVKRVRPEVKIIGVEPSDANAMALSLYHGKRVMLEHVGGFADGVAVKAVGEETFRLCRELVDGIVMVSRDAICASIKDMFEEKRS

SEQ ID NO: 37581 - protein, 316 aa, Zea mays subsp. mays
MVRVVPESLQRESGCLVEGFRARGACAADGEGFGDAAGEGGGPGAMEYLTSVLSSKVYDVAIESPLQLASKLSHRLGVNIWIKREDLQPVFSFKLRGAYNMMAKLSREQLERGVICSSAGNHAQGVALSAQRLGCDAVIVMPVTTPEIKWKSVERLGATVVLEGDSYDEAQSYAKLRCQQEDRTFIPPFDHPDVITGQGTVGMEIVRQLQGPLHAIFVPVGGGGLIAGIAAYVKRVRPEVKIIGVEPSDANAMALSLYHGKRVMLEHVGGFADGVAVKAVGEETFRLCRELVDGIVMVSRDAICASIKDMFEEKRS

SEQ ID NO: 37582 - DNA, 692 bp, Zea mays subsp. mays
cctagaacatcctaatcgaaaaatcccaaaaaacattcctagaattttctatggctcctaaggctcttgcagttacagctcttcttctcacacttaatcttcttttcttcagttttgtaacttccacaaaatgtccaccgactactcctaaaaccccaaaatctccaaaaaagatccctccggttaaacccacttgtcctaccgacacacttaagctcggcgtttgcgcagacctgttgggcttaattaacgttcttgttggttctccaccaaagactccatgttgtgcacttcttaatggtcttgctaacgttgaagctgcggtttgtctttgcaccgctcttaaagccaatgtcttggggattaatctcaatgttcctgttgatctgagcttgttattgaactattgtgggaagaaacttccttatggcttccaatgtgcttgaagagattttaaaaagagaaatctcttggttatgctttgttctgttgctttctattgttatctatttttttgtttgtgagaaaaatgcaaatcttacaacctttgttatttcatattgaacttgttaatgaaatcgtttattgtaatgtcttagcatctctcctaatgtaaatgtgtggttgttaaaaaatatcatttcaatgattccttaaaaaaaaaaaaaaaaaagcttatcgataccgtcgac

SEQ ID NO: 37583 - protein, 131 aa, Zea mays subsp. mays
MAPKALAVTALLLTLNLLFFSFVTSTKCPPTTPKTPKSPKKIPPVKPTCPTDTLKLGVCADLLGLINVLVGSPPKTPCCALLNGLANVEAAVCLCTALKANVLGINLNVPVDLSLLLNYCGKKLPYGFQCA

SEQ ID NO: 37584 - DNA, 578 bp, Zea mays subsp. mays
accgctttttcctcctcctcctcctcctcctcttccaccccagagtccagagctatggcgctcgccaaggccaaggagatcgtcgcctccgctcccgtcgtcgtcttcagcaagtcttactgccctttctgcgtacaagtgaagaagttgttcacgcagctgggagcaagtttcaaggccattgagttggacactgaaagcgatggaactgagattcagtcagctcttgctgaatggactgggcagaggactgttcccaatgtcttcatcaatggaaaacacattggtggctgtgacgatactattgcactgaacaagggagggaagctggttgctctgctgacggaggctggagcgatctcgggttcttcttcgaagaccactgtcactgcttagctctgtttgcgagttgtcgtgatcgacatgttagtgtgttacatgtgttgcatcgttcccgtgtcatgaaataacgtagttggatatgtttggcaagttcagggcttgttgctgtctagtatttctgcagtaaatgtctttgtgtaaaactcgttggaaataaatcaaattatgtcggcgat

SEQ ID NO: 37585 - protein, 131 aa, Zea mays subsp. mays
TAFSSSSSSSSSTPESRAMALAKAKEIVASAPVVVFSKSYCPFCVQVKKLFTQLGASFKAIELDTESDGTEIQSALAEWTGQRTVPNVFINGKHIGGCDDTIALNKGGKLVALLTEAGAISGSSSKTTVTA

SEQ ID NO: 37586 - protein, 113 aa, Zea mays subsp. mays
MALAKAKEIVASAPVVVFSKSYCPFCVQVKKLFTQLGASFKAIELDTESDGTEIQSALAEWTGQRTVPNVFINGKHIGGCDDTIALNKGGKLVALLTEAGAISGSSSKTTVTA

SEQ ID NO: 37587 - DNA, 910 bp, Zea mays subsp. mays
ctctctacagctacctagctagtatctacccgccattgcattgcaccacctctgtcctcgatctctcttgctcgaccacacacacacgcacacgatcgactaacaaccctgtatctgtatggatatggcaatgagccagcacagctccgacacctcgtccacgtcctcctactcgtccgacccctcctccacgtcgtccaccaccagcggcaagaagcgcccgcgcccgcacgccgccgccgccccggcgtaccgcggcgtccgcatgcgcgcgtggggcaagtgggtgtcggagatcagggagccccgcaagaagtcgcgcatctggctgggcaccttcccgcgcccggagatggcggcgcgcgcgcacgacgccgccgcgctcagcgtcaagggcgcgcgcgccgtgctcaacttcccggccctcgcgcgccacctcccgcgcccggcctccctggcgccgcgcgacgtccaggccgccgccgcgcgcgccgccgtcatgcacgagccagagcctcaacaacctgatgagcccggacggcagcccgtggaggaggtggccctggccgccgagctggtgttcgacgacctggcgcctctgtgggtggaggacgtggtggagttgggcccgtgcccgtcccagcatagctcgtggacgccgtgcgatgggctcgacgccgccgcctgtctgcactctctccctctcttgtgggactactagctgctactaggctccttgctccgtttgtacatggccttgaaccattttcgtttccgcttgtttttttttttttttggttttcacttgttttcatatatccaccggagctacctacaaagagtaaatccctactcgcactgtactacttctcgtatatttggactaaattttggcgggtagccatcgctt

SEQ ID NO: 37588 - protein, 200 aa, Zea mays subsp. mays
MDMAMSQHSSDTSSTSSYSSDPSSTSSTTSGKKRPRPHAAAAPAYRGVRMRAWGKWVSEIREPRKKSRIWLGTFPRPEMAARAHDAAALSVKGARAVLNFPALARHLPRPASLAPRDVQAAAARAAVMHEPEPQQPDEPGRQPVEEVALAAELVFDDLAPLWVEDVVELGPCPSQHSSWTPCDGLDAAACLHSLPLLWDY

SEQ ID NO: 37589 - protein, 198 aa, Zea mays subsp. mays
MAMSQHSSDTSSTSSYSSDPSSTSSTTSGKKRPRPHAAAAPAYRGVRMRAWGKWVSEIREPRKKSRIWLGTFPRPEMAARAHDAAALSVKGARAVLNFPALARHLPRPASLAPRDVQAAAARAAVMHEPEPQQPDEPGRQPVEEVALAAELVFDDLAPLWVEDVVELGPCPSQHSSWTPCDGLDAAACLHSLPLLWDY

SEQ ID NO: 37590 - protein, 196 aa, Zea mays subsp. mays
MSQHSSDTSSTSSYSSDPSSTSSTTSGKKRPRPHAAAAPAYRGVRMRAWGKWVSEIREPRKKSRIWLGTFPRPEMAARAHDAAALSVKGARAVLNFPALARHLPRPASLAPRDVQAAAARAAVMHEPEPQQPDEPGRQPVEEVALAAELVFDDLAPLWVEDVVELGPCPSQHSSWTPCDGLDAAACLHSLPLLWDY

SEQ ID NO: 37591 - DNA, 452 bp, Zea mays subsp. mays
ctagctcgtgcatgccgccctgagcgccactgcacagacgcgcagagacagacattgcgactttgcgagagacaaaacctcccagataacgcccgcgcgctccccgatggcgtcgtcgtgccagaacgtggagattcccggcaagccgacggagacggggacggcgctgctggagacggcgacgggcaccatccaggggttcgcgccgctgagccagatccaccagcacctgtgcgcgttccacttctacgcggacgacatggggcggcaggtggaggcgcaccacttctgcgcgcacctgaacgaggacgtgcggcagtgcctcatcttcgacgggcccggcgccggcgcgcgcctcatcggcgtggagtacatcgtctccgagacggtgttcctgacgctgcccgacgccgagaagccgctgtggcacacgcacgagttcgaggtgaagg

SEQ ID NO: 37592 - protein, 150 aa, Zea mays subsp. mays
LARACRPERHCTDAQRQTLRLCERQNLPDNARALPDGVVVPERGDSRQADGDGDGAAGDGDGHHPGVRAAEPDPPAPVRVPLLRGRHGAAGGGAPLLRAPERGRAAVPHLRRARRRRAPHRRGVHRLRDGVPDAARRREAAVAHARVRGE

SEQ ID NO: 37593 - protein, 115 aa, Zea mays subsp. mays
MASSCQNVEIPGKPTETGTALLETATGTIQGFAPLSQIHQHLCAFHFYADDMGRQVEAHHFCAHLNEDVRQCLIFDGPGAGARLIGVEYIVSETVFLTLPDAEKPLWHTHEFEVK

SEQ ID NO: 37594 - DNA, 962 bp, Zea mays subsp. mays
attttggattggcctctttacatatctgctctttagagttttccggttctgaaatcggatcccctcttccccatcttcccaatcggagctttttggctttgaattggatttgggtttcgaaaagccatctccttttcttcttcgcatcatcccctttggagaaatcagatatgcaggaccagctggtgtgtcatggctgtagaaacacattgatgtatcccagaggagcaaccaatgtccgttgtgcgttatgtcacattgtcaacatggtcccccttcatcctcatcctcctcctcctcctcctcctcatcatgctcatgcagggatggacatggctcacattgtatgtggtggttgtcgaactatgcttatgtacacgcgtggggctagtagtgtaagatgctcgtgttgtcagactgtgaaccttgtcccaggacccccaccgtccaatcaggttgcgcatatcaactgtgggaactgccggacgacactcatgtacccttacggtgcatcatctgttaaatgcgctgtttgccagtttgttactaacgttaacatgagcaatggaagggtgcctctcgcaagtaaccggccaaatggaacagctgctcccgggacaatgccctctacatccacttcaacaccaccgtctcagacacaaactgtcgtcgtagagaacccaatgtcagttaatgaaagtggaaagttggtgagcaacgttgtggttggagtgacaacaggccaaaaataacttttaaagaatcatttgatctgaaagatcaaaattggttccgtctatccctgcttctggtttgtgcatattacatactgttgatgaacactttttttttgttgttaaaaaaaaagttgatgaacataaaggttttttggttcagtaatctgtcattcctgtttgtagactccattgaccatttgtggcattgttaatgtatgtattact

SEQ ID NO: 37595 - protein, 249 aa, Zea mays subsp. mays
FGLASLHICSLEFSGSEIGSPLPHLPNRSFLALNWIWVSKSHLLFFFASSPLEKSDMQDQLVCHGCRNTLMYPRGATNVRCALCHIVNMVPLHPHPPPPPPPHHAHAGMDMAHIVCGGCRTMLMYTRGASSVRCSCCQTVNLVPGPPPSNQVAHINCGNCRTTLMYPYGASSVKCAVCQFVTNVNMSNGRVPLASNRPNGTAAPGTMPSTSTSTPPSQTQTVVVENPMSVNESGKLVSNVVVGVTTGQK

SEQ ID NO: 37596 - protein, 193 aa, Zea mays subsp. mays
MQDQLVCHGCRNTLMYPRGATNVRCALCHIVNMVPLHPHPPPPPPPHHAHAGMDMAHIVCGGCRTMLMYTRGASSVRCSCCQTVNLVPGPPPSNQVAHINCGNCRTTLMYPYGASSVKCAVCQFVTNVNMSNGRVPLASNRPNGTAAPGTMPSTSTSTPPSQTQTVVVENPMSVNESGKLVSNVVVGVTTGQK

SEQ ID NO: 37597 - protein, 179 aa, Zea mays subsp. mays
MYPRGATNVRCALCHIVNMVPLHPHPPPPPPPHHAHAGMDMAHIVCGGCRTMLMYTRGASSVRCSCCQTVNLVPGPPPSNQVAHINCGNCRTTLMYPYGASSVKCAVCQFVTNVNMSNGRVPLASNRPNGTAAPGTMPSTSTSTPPSQTQTVVVENPMSVNESGKLVSNVVVGVTTGQK

SEQ ID NO: 37598 - DNA, 659 bp, Zea mays subsp. mays
aaaaccataaataaaagatgtcaaaagattgcggcaaccacggtggtggcaaagaagcagccgtccggcgaatctgcgccgccgttatagccttcatcataatagttctaatcaccatctttctagtatgggtcatactaaggccaactaagccaagattcatcctgcaagaagccaccgtcttcgccttcaacctctcgcaaccaaacctcctcaccacaaactttcagatcacattcgcatctcgtaaccctaactccaagatcggtatctactacgaccgtctccacgtttacgctacgtaccgtaaccagcagataactctcaggacagcaatccctccgacgtatcaaggccacaaagaagacaacgtctggtctccgtttgtttacgggaccgctgttccgatcgcaccgtacaactccgtcgctttgggagacgagcaaggtcatggactcgttcagttgatgatacgcgccgatgggcgcgtgaggtggaaagtagggacgttgatcaccggaaaatatcatatccatgttcggtgtccggctctcatcaatcttgggaacaaagctgctggtgttattgtcggtgacaacgccgttaagtatacgttggttactaaatgcagtgtgaacgtttagaactttgacgccgtt

SEQ ID NO: 37599 - protein, 208 aa, Zea mays subsp. mays
MSKDCGNHGGGKEAAVRRICAAVIAFIIIVLITIFLVWVILRPTKPRFILQEATVFAFNLSQPNLLTTNFQITFASRNPNSKIGIYYDRLHVYATYRNQQITLRTAIPPTYQGHKEDNVWSPFVYGTAVPIAPYNSVALGDEQGHGLVQLMIRADGRVRWKVGTLITGKYHIHVRCPALINLGNKAAGVIVGDNAVKYTLVTKCSVNV

SEQ ID NO: 37600 - DNA, 1257 bp, Zea mays subsp. mays
ctagcgctggcgccgcagacccctccccttcgcttccttccctagcgccgacgcccaccagacgagatggccccgaagaaggacaaggccccgccgccgtcgtcgaagccggccaagtccggtggtggcaagcaaaagaagaagaagtggagcaagggaaagctaaaggagaaggtaaacaacgcggtgctgttcgaccaggctacctacgacaagctgctctcggaggtgcccaagtacaagcaaatcaccccttccatcctctccgagcgtctgagggtaatcactcgttccagatctgtgttgcatccaaaccttgtgcacagccgcaacgttgattaaattaaattgctatgagtgtctattatctgtaatgccatcgtacttggccaactgcatgtaagattagtagcctggaattttgtaatgagtcatgattaattcattgaagctccatctgatggctagcttaatggctccaagtttatttgaattggcaggtatgaaaggtgccgcatgtatgctaggcattgtgtgagttgtttttgagtagtaatttgaattggcagttgttgctacgatttttatcttgaatatgtgacatccatgtgtcattttaatagcaaactattttgttgcataccttccagtgatgcacatcagagtgtgctcctgctatcaattagcatgactattgtagcatgtccatgtgttcagtatgcatcaggaatcaaattctgtacctgtattaggtgttgttttgtaatagcttaacttgttctgttgacttgcagatcaacggctcccttgctcggagggccatcaaggacttgatggcgcgtggcctcattcggatggtctcggtccactcaagccagcagatctacaccagggcaaccaatacataaggatggggaagaggtctaaaatgcattgtctgccctctctgcaggaggagctcgtctttagaacagttgccatctttgtcaagagttgccaatgttatgttactggtgatgagttccaggtgacggcaacattttagagattttgagtatttctattagttggtactatggtttgccaattataagttacttggcctaaatggtttttgttttatggatctatggtattttacatgatttaaatcaattctagggcgtagaggcaaagtaagattagccaagagattagtcagctttcgctcgataatgtcgaacttctattaaacacattaacaaaaagattgagtgg

SEQ ID NO: 37601 - protein, 111 aa, Zea mays subsp. mays
SAGAADPSPSLPSLAPTPTRRDGPEEGQGPAAVVEAGQVRWWQAKEEEVEQGKAKGEGKQRGAVRPGYLRQAALGGAQVQANHPFHPLRASEGNHSFQICVASKPCAQPQR

SEQ ID NO: 37602 - protein, 91 aa, Zea mays subsp. mays
MAPKKDKAPPPSSKPAKSGGGKQKKKKWSKGKLKEKVNNAVLFDQATYDKLLSEVPKYKQITPSILSERLRVITRSRSVLHPNLVHSRNVD

SEQ ID NO: 37603 - protein, 55 aa, Zea mays subsp. mays
MCHFNSKLFCCIPSSDAHQSVLLLSISMTIVACPCVQYASGIKFCTCIRCCFVIA

SEQ ID NO: 37604 - DNA, 2134 bp, Zea mays subsp. mays
tttttctctacgaattccttcagttcagttccgttgcgttcatttcctttcctccatgaatgattcgtgattgatgcctggatcgcgatcgcttctatttttcttcttcttttggtgcctaaacaaaaatattttatattgttattgggatggacttggtttctattgctttttcgtggggaatttccaaatttgtttcttcctgcgggtttatcggttaacgcgcgatgcatctgaggaggaggatcgattcactactctttgagattccgtatccgtctctgaaatgggaatatgacaatttttttaaaatccggtaccaacaggtataaccccccagaactacgatttccttccacggaaggagaattttgtccggagctcgaatttgtgccacgtttcacttcgttttttggagttttctgctcaactgagggaaagcagagccaccagagcttggccgtttcagatctctgtctgctaggctgccctttgctcaagggcaatcctcccttttcattcaacgcaaaaaaaaagatctttttttgcgtctttctatgaaatctggtgacaaatgttcagttgaactcagattcttcagatgcaattgaagatctcaaatcatcacatcattttttctgtcgaaataatttatgtgtgtgtgtgtttttcttaaaaaaactgttttttatgcttctgaatgcttgctgcattttcccgtgcatttgaaacaggaaaaacgtactagcgaaagctatagctgtgatctgaactcaattgctccgtaccgttttactttgcttcatgatccgttaatgaaagcaaaaagtaagcgcacggtgcgcatggatctgggttagttatgtactttgcttacttctgacataaagggcgcatttcaattttcaacaacacaaaagttgacgtccaagtggcctttgccttttccgctttctaagcaacttcgcttactgttcacttcacgaaatttccttatgctttacttgttttgcaactgaatgtggagtagcaatgtaacaaagtgaaaaagggtgtctggctgattcatttagtttctgctcgttttgctttcttgagatggttcgtgttagccttaacctttgtgatagcacaagaccaatgtggttgggactctgaacatgctcggattagcaaagaggatcaacgccaggttcctcctcaccagtaccagtgaggtctatggtgatcctctccagcacccgcaggtggagacttactggggcaatgtcaatcccatcggtgtcaggagctgttacgatgagggcaagcgtacagctgaaacgttgaccatggattaccaccgtggtgccaaccttgaggttaggatcgcacgtatcttcaatacatatggccctcgcatgtgcattgacgatggccgtgttgtcagtaactttgttgctcaggcactgaggaaggagcccttgacggtttatggtgatggaaagcaaaccaggagtttccaatatgtttctgatctggttgagggtctgatgaagctgatggaaggcgagcatgtggggccattcaacctgggtaaccctggcgagttcaccatgcttgagcttgccaaggttgtccaggacaccatcgaccccaacgcacggatcgagttccgcaagaacacccaggacgacccgcacaagcgcaagcccgacatcagccgcgccaaggagttcctcgggtgggagccgaagatccccctgcgtgagggccttcccctcatggtctccgacttccgcaagcgcatcttcggcgaccaagacgctgctgccaccaccaccggaaaccagcaaggttaggatgaaggagcgcacatgacatggaaatttttggtggccctgcttctagctgcttggttgctctctccttactgacaaaagctatgggccacgtagttcgttgggaatgtgttactggaatacctcggcacggctgatgctgtaatgccattctttttttcccctgtattttttctttctcagttctctcagtccttagctatacaaaaaaagttcagttgaacagttggagatgaacccggatgatctaattctttgttgagagcatagcatcatatatatggtataaatcc

SEQ ID NO: 37605 - protein, 226 aa, Zea mays subsp. mays
MLGLAKRINARFLLTSTSEVYGDPLQHPQVETYWGNVNPIGVRSCYDEGKRTAETLTMDYHRGANLEVRIARIFNTYGPRMCIDDGRVVSNFVAQALRKEPLTVYGDGKQTRSFQYVSDLVEGLMKLMEGEHVGPFNLGNPGEFTMLELAKVVQDTIDPNARIEFRKNTQDDPHKRKPDISRAKEFLGWEPKIPLREGLPLMVSDFRKRIFGDQDAAATTTGNQQG

SEQ ID NO: 37606 - protein, 169 aa, Zea mays subsp. mays
MDYHRGANLEVRIARIFNTYGPRMCIDDGRVVSNFVAQALRKEPLTVYGDGKQTRSFQYVSDLVEGLMKLMEGEHVGPFNLGNPGEFTMLELAKVVQDTIDPNARIEFRKNTQDDPHKRKPDISRAKEFLGWEPKIPLREGLPLMVSDFRKRIFGDQDAAATTTGNQQG

SEQ ID NO: 37607 - protein, 146 aa, Zea mays subsp. mays
MCIDDGRVVSNFVAQALRKEPLTVYGDGKQTRSFQYVSDLVEGLMKLMEGEHVGPFNLGNPGEFTMLELAKVVQDTIDPNARIEFRKNTQDDPHKRKPDISRAKEFLGWEPKIPLREGLPLMVSDFRKRIFGDQDAAATTTGNQQG

SEQ ID NO: 37608 - DNA, 750 bp, Zea mays subsp. mays
aacatagcgaacaaacatcgagtacagtcggctaggtaatctggtggtacgacgacatggcggccaccagcagcaagtcgtcgtcgtcctcgagctcggcgcagcgggcagctgccgcactgctcgtggccgccgccgtggcggtgtccgtcctggtggtgggcgcggcggcggtgtgcgacatgagcaacgagcagttcatgtcgtgccagcccgcggcggccaagacgacggacccgccggccgcgccgtcgcaggcgtgctgcgacgcgctggcgggggcggacctcaagtgcctgtgcggctacaagaactcgccgtggatgggcgtctacaacatcgaccccaagcgcgccatggagcttccggccaagtgcggcctcgccacgccgcccgactgctagcagtgtgctagccaagccaagccaagcaggaaggcccccggcattgctagctgtacgtgtctgtgtgtgcatctgcagcagggtgcaggcaggggcccgtacgtacgtgtctctttctctctctcatcttgtcaccgtacctatctagagtgtgtgtgttcgtactaattaaaatgttcttgtcgtcgtcgtctgtgcatgcatgtaccatgtcgtcgtgcatgtctattatgtgtgtgtcgtcgtgtcgatcggtacgtatagatgcctgttgttagcatgtgtgtcattacctagtcgtgtgtagtgtatgtatgtgcttgccgggcaaaagttgcatctagct

SEQ ID NO: 37609 - protein, 115 aa, Zea mays subsp. mays
MAATSSKSSSSSSSAQRAAAALLVAAAVAVSVLVVGAAAVCDMSNEQFMSCQPAAAKTTDPPAAPSQACCDALAGADLKCLCGYKNSPWMGVYNIDPKRAMELPAKCGLATPPDC

SEQ ID NO: 37610 - protein, 73 aa, Zea mays subsp. mays
MSNEQFMSCQPAAAKTTDPPAAPSQACCDALAGADLKCLCGYKNSPWMGVYNIDPKRAMELPAKCGLATPPDC

SEQ ID NO: 37611 - protein, 67 aa, Zea mays subsp. mays
MSCQPAAAKTTDPPAAPSQACCDALAGADLKCLCGYKNSPWMGVYNIDPKRAMELPAKCGLATPPDC

SEQ ID NO: 37612 - DNA, 728 bp, Zea mays subsp. mays
ataaattgggtacactctgatagcgagagaactcaccagacttgcagctccacaccagcaacagcgcgacgatagctagctagtagtagaagcaggcagcggctctagttgtcgagcgttccacaggtcatcaagcaccggcgtttaattagccatccgctccgatcgtcccctcccctattcccatggccagtttcgctgctcaggtcatggacatgttcttcgtgctcgtcgagcgcgtcaccggctacggcggccacgctgaggacgaccagaaggacgcttcaggtgcacatgagcccaccaagctgctgacatcgtctggcgtttctgaaaccgaacaaggagaagaagaggtggtcgttgcggtgcagaatgttcagataagagcaagagggggcggcgaaccctttgtgcaaggtggctcgatgcctcaggttaattagcactgcatgcatgcgggttttgtagaggttattagttgccgctgcctcaggtgatcgagcttcgcagacgatgatgcgtttaatttgcagccagtgttttaacctttttcatgcaaggatgtgtgtgtgtgtgttgtctggatcgtgtttcgtcgtttccttcttctgattgaattaagagtatgtctgtcgagttctatcaagttggttgtaattccagtatcctatgtgcaagcaatgtgtgagcttgctgtcaagtttgtggtgccatcgaatcagtcc

SEQ ID NO: 37613 - protein, 86 aa, Zea mays subsp. mays
MASFAAQVMDMFFVLVERVTGYGGHAEDDQKDASGAHEPTKLLTSSGVSETEQGEEEVVVAVQNVQIRARGGGEPFVQGGSMPQVN

SEQ ID NO: 37614 - protein, 78 aa, Zea mays subsp. mays
MDMFFVLVERVTGYGGHAEDDQKDASGAHEPTKLLTSSGVSETEQGEEEVVVAVQNVQIRARGGGEPFVQGGSMPQVN

SEQ ID NO: 37615 - protein, 76 aa, Zea mays subsp. mays
MFFVLVERVTGYGGHAEDDQKDASGAHEPTKLLTSSGVSETEQGEEEVVVAVQNVQIRARGGGEPFVQGGSMPQVN

SEQ ID NO: 37616 - DNA, 1529 bp, Zea mays subsp. mays
gaggcagagaagaagatttgattgaagtacagatccatcggagaagaagacagagagaaagagagattgaagatcaatgacttcgaggtattgggtggtgtctcttccagtgaaagactctgcttcttcgttatggaatcgattacaagagcagatctctaagcattcctttgatactccagtttatcggtttaacattcctaatcttcgtgttggaaccttagattctctactcgctctcggcgatgatctgcttaagtcgaacagctttgtggaaggagtttcgcaaaagatcaggagacagatcgaagaattggagaggatttctggtgttgagagcaacgctcttacagttgatggagttcctgttgattcttatctcaccaggtttgtgtgggatgaagctaagtacccaacaatgtcacctctgaaggaggttgtggacaatattcagtctcaggttgcaaaaattgaggatgatctcaaggttcgtgttgctgaatataacaatatccgtggtcaactcaatgccattaaccgaaagcaaagtggaagcttagctgttcgtgacctctcaaacttggttaagccagaagatattgtcgagtccgaacatctcgtaactctccttgcagttgttccgaagtattcccaaaaagactggctagcatgttatgagactttgaccgattatgtggttcctaggtcctcgaagaaattgtttgaggataatgagtatgccctttacaccgtcactctctttactcgtgtcgcagataatttcaggattgctgctcgtgagaaaggattccaagtccgtgattttgaacaaagtgttgaagcacaagagactcgtaaacaagagctagcaaagttggttcaggatcaggaaagtttgagaagctctcttttgcagtggtgctacaccagttatggagaggttttcagctcctggatgcatttctgtgctgtgcgtacattcgctgagagcattatgagatacggtttacctccggcgttcttggcatgtgtcttatctccggctgtgaaaagtgaaaagaaagtacgctccattcttgaacgcttgtgtgattctaccaacagtttatactggaaaagcgaggaggatgcaggagccatggctggtttagctggtgactcagagacacatccttatgtctccttcactatcaaccttgcttaaaaatatgatgagagatgcttttgatgccacttctcctctggtcttctcatctgttatatttgtttgtggtctatagatttcacatttatttttcgtaatatattttgattttcataaataaggtggcactcaagagagatgttgctgtaattttatttggccggagtcttttagattccggcgagtttcagacacttgtggaagacagaagggttatacagttgttaaagcctttttgtcattttgtgacatggttgatttatttatatcatcactctgtttcgttaaaaaaaaaaaaaaaaaaactcgagggggggcccggtac

SEQ ID NO: 37617 - protein, 375 aa, Zea mays subsp. mays
MTSRYWVVSLPVKDSASSLWNRLQEQISKHSFDTPVYRFNIPNLRVGTLDSLLALGDDLLKSNSFVEGVSQKIRRQIEELERISGVESNALTVDGVPVDSYLTRFVWDEAKYPTMSPLKEVVDNIQSQVAKIEDDLKVRVAEYNNIRGQLNAINRKQSGSLAVRDLSNLVKPEDIVESEHLVTLLAVVPKYSQKDWLACYETLTDYVVPRSSKKLFEDNEYALYTVTLFTRVADNFRIAAREKGFQVRDFEQSVEAQETRKQELAKLVQDQESLRSSLLQWCYTSYGEVFSSWMHFCAVRTFAESIMRYGLPPAFLACVLSPAVKSEKKVRSILERLCDSTNSLYWKSEEDAGAMAGLAGDSETHPYVSFTINLA

SEQ ID NO: 37618 - protein, 261 aa, Zea mays subsp. mays
MSPLKEVVDNIQSQVAKIEDDLKVRVAEYNNIRGQLNAINRKQSGSLAVRDLSNLVKPEDIVESEHLVTLLAVVPKYSQKDWLACYETLTDYVVPRSSKKLFEDNEYALYTVTLFTRVADNFRIAAREKGFQVRDFEQSVEAQETRKQELAKLVQDQESLRSSLLQWCYTSYGEVFSSWMHFCAVRTFAESIMRYGLPPAFLACVLSPAVKSEKKVRSILERLCDSTNSLYWKSEEDAGAMAGLAGDSETHPYVSFTINLA

SEQ ID NO: 37619 - DNA, 1159 bp, Zea mays subsp. mays
tcttcttgagaaacactccgctctctctttcctcctgcgattctccatctctttccctgctccgtctcgtcgttgtcttcccctttttttcctcagccacctctctccctcgctagagcaaaaaccttgccacgaatcgccgacactccaacccggaagaggcaacgaggtgactccgcgcctcggtcatgggtgacagccaatactccttctcgcttaccactttcagcccgtcgggaaagcttgtgcagatagagcacgcgctcacggctgtcggatccgggcagacctccctagggatcaaagctgccaacggtgtagtgattgccactgagaagaaactgccttctattttggtggatgaaacatctgtgcaaaagattcaggcactaacaccaaatattggagttgtctatagtgggatgggtccagattttcgtgttctggtgagaaaaagtcgaaagcaggcacagcagtattatcggttgtacaaggagcatatacctgtaacacagcttgtgcgagagactgctgctgtgatgcaggagttcacacagtcaggtggtgtaagaccatttggagtatcgctgttgattgctgggtatgatgacaatggcccacagttgtatcaggttgatccctcaggatcatacttctcctggaaggcatcagccatgggaaaaaatgtgtcaaatgcaaagacatttcttgaaaagagatacacagaggatatggagcttgatgatgccatccacactgcaattttgactttgaaagaaggatatgaggggcaaatttcctccaacaacattgaaatcggaattattcgagctgaccgtgagttcaaagttctaagcccatcagagatcaaggatttcttggaagaggtggagtaagttgtctgttgatgatttactgtttcaaacaagaatagcagcatcacttatgagcagccagcctgaagcttgtcttggttttatcactctgtaaactgatttgctccagcgacatgtcttggttttatcactctgtaaactgatttgctccagcgacatgtggttcttacatttgaaaccctcctgagcgcatactgtagacaaatgagatacgtaagatggatgttgtatttgacagtctctgcagtttgtttatgtgatcc

SEQ ID NO: 37620 - protein, 235 aa, Zea mays subsp. mays
MGDSQYSFSLTTFSPSGKLVQIEHALTAVGSGQTSLGIKAANGVVIATEKKLPSILVDETSVQKIQALTPNIGVVYSGMGPDFRVLVRKSRKQAQQYYRLYKEHIPVTQLVRETAAVMQEFTQSGGVRPFGVSLLIAGYDDNGPQLYQVDPSGSYFSWKASAMGKNVSNAKTFLEKRYTEDMELDDAIHTAILTLKEGYEGQISSNNIEIGIIRADREFKVLSPSEIKDFLEEVE

SEQ ID NO: 37621 - protein, 157 aa, Zea mays subsp. mays
MGPDFRVLVRKSRKQAQQYYRLYKEHIPVTQLVRETAAVMQEFTQSGGVRPFGVSLLIAGYDDNGPQLYQVDPSGSYFSWKASAMGKNVSNAKTFLEKRYTEDMELDDAIHTAILTLKEGYEGQISSNNIEIGIIRADREFKVLSPSEIKDFLEEVE

SEQ ID NO: 37622 - protein, 118 aa, Zea mays subsp. mays
MQEFTQSGGVRPFGVSLLIAGYDDNGPQLYQVDPSGSYFSWKASAMGKNVSNAKTFLEKRYTEDMELDDAIHTAILTLKEGYEGQISSNNIEIGIIRADREFKVLSPSEIKDFLEEVE

SEQ ID NO: 37623 - DNA, 613 bp, Zea mays subsp. mays
aatcaccaccaccaccatcgcctccaccctctcctccgcctgaaccctagccatggcgtggcgcggcgctgcgtcccgcaccgttcttgccgcggtccgccgcccggcaccctccgccgcggtcggcggcctccgcgcccctcctcccttcgcggccccgcgccgccggatcccttcccccttccccccctcccactccacctccccgctcggggccgcacggcccctggcggccatgatggggtcgccgctgacggcggcggtcgtgctagggcggatgacggcgcacccgtcggccagcgcccgggcctgctgcgagctctcccagggtacttgaatttgccatgttgattcaccatcctttttaaagaggatacaaatcttggattcgtcttttggaaagctattctggggccgtccttttaattcttgagttattagaggagtgtctccaacaaaatagcttctctccaaattactagcctagactgaaaataatcttcctgtcatatgacatggtttatgtcatggatttagcttctacttttgtagcgaaatatccttgtgttgcctgctaagaggatttggtggcacattttatatgatttcttag

SEQ ID NO: 37624 - protein, 116 aa, Zea mays subsp. mays
NHHHHHRLHPLLRLNPSHGVARRCVPHRSCRGPPPGTLRRGRRPPRPSSLRGPAPPDPFPLPPLPLHLPARGRTAPGGHDGVAADGGGRARADDGAPVGQRPGLLRALPGYLNLPC

SEQ ID NO: 37625 - protein, 94 aa, Zea mays subsp. mays
MAWRGAASRTVLAAVRRPAPSAAVGGLRAPPPFAAPRRRIPSPFPPSHSTSPLGAARPLAAMMGSPLTAAVVLGRMTAHPSASARACCELSQGT

SEQ ID NO: 37626 - DNA, 1003 bp, Zea mays subsp. mays
gaacacaaaacacatcactgatccttctctcatcctcagaaagaatggctcaaaccatgctgcttacttcaggcgtcaccgccggccattttttgaggaacaagagccctttggctcagcccaaagttcaccatctcttcctctctggaaactctccggttgcactaccatctaggagacaatcattcgttcctctcgctctcttcaaacccaaaaccaaagctgctcctaaaaaggttgagaagccgaagagcaaggttgaggatggcatctttggaacgtctggtgggattggtttcacaaaggcgaatgagctattcgttggtcgtgttgctatgatcggtttcgctgcatcgttgcttggtgaggcgttgacgggaaaagggatattagctcagctgaatctggagacagggataccgatttacgaagcagagccattgcttctcttcttcatcttgttcactctgttgggagccattggagctctcggagacagaggaaaattcgtcgacgatcctcccaccgggctcgagaaagccgtcattcctcccggcaaaaacgtccgatctgccctcggtctcaaagaacaaggtccattgtttgggttcacgaaggcgaacgagttattcgtaggaagattggcacagttgggaatagcattttcactgataggagagattattaccgggaaaggagcattagctcaactcaacattgagaccggtataccaattcaagatatcgaaccacttgtcctcttaaacgttgctttcttcttcttcgctgccattaatcctggtaatggaaaattcatcaccgatgatggtgaagaaagctaaattatcatgtacttaaatttagtagagagtgtgtgaccttctcttcatgttgagacaaaaggaaatggacagcttaaattgttgtaatacttatatccttttgtttttaacttggaattttctgattatatatagttttattacacctaagtgactaggtg

SEQ ID NO: 37627 - protein, 279 aa, Zea mays subsp. mays
TQNTSLILLSSSERMAQTMLLTSGVTAGHFLRNKSPLAQPKVHHLFLSGNSPVALPSRRQSFVPLALFKPKTKAAPKKVEKPKSKVEDGIFGTSGGIGFTKANELFVGRVAMIGFAASLLGEALTGKGILAQLNLETGIPIYEAEPLLLFFILFTLLGAIGALGDRGKFVDDPPTGLEKAVIPPGKNVRSALGLKEQGPLFGFTKANELFVGRLAQLGIAFSLIGEIITGKGALAQLNIETGIPIQDIEPLVLLNVAFFFFAAINPGNGKFITDDGEES

SEQ ID NO: 37628 - protein, 265 aa, Zea mays subsp. mays
MAQTMLLTSGVTAGHFLRNKSPLAQPKVHHLFLSGNSPVALPSRRQSFVPLALFKPKTKAAPKKVEKPKSKVEDGIFGTSGGIGFTKANELFVGRVAMIGFAASLLGEALTGKGILAQLNLETGIPIYEAEPLLLFFILFTLLGAIGALGDRGKFVDDPPTGLEKAVIPPGKNVRSALGLKEQGPLFGFTKANELFVGRLAQLGIAFSLIGEIITGKGALAQLNIETGIPIQDIEPLVLLNVAFFFFAAINPGNGKFITDDGEES

SEQ ID NO: 37629 - protein, 261 aa, Zea mays subsp. mays
MLLTSGVTAGHFLRNKSPLAQPKVHHLFLSGNSPVALPSRRQSFVPLALFKPKTKAAPKKVEKPKSKVEDGIFGTSGGIGFTKANELFVGRVAMIGFAASLLGEALTGKGILAQLNLETGIPIYEAEPLLLFFILFTLLGAIGALGDRGKFVDDPPTGLEKAVIPPGKNVRSALGLKEQGPLFGFTKANELFVGRLAQLGIAFSLIGEIITGKGALAQLNIETGIPIQDIEPLVLLNVAFFFFAAINPGNGKFITDDGEES

SEQ ID NO: 37630 - DNA, 664 bp, Zea mays subsp. mays
acccctacccgcgacttcgctcagcttccgccgatcggcttgccccgtcgatttcgccaacccctcgacccgatcggctccattgatcgtacctcgtcgtccggttgtcgatggccaggacctctttcaaaatggagcacgacctcgagaaaaggcagtccgaatctgccaggatcagggataagtatcccgacagaattcctgtgattgttgagaaagctggcaaaactgatgtccccgagattgataagaagaagtaccttgtccctgctgatctcactgtcggccagtttgtctatgtggtgaggaagagaatcaagctgagcccagagaaggccatctttgtctttgtgaagaacaccttgccaccaactgcctctttgatgtctgcaatctacgaagagaacaaggacgaggatggcttcctttacatgacctacagtggtgaaaacaccttcggctctgcctagagcaatcgcccctgccactgtaaataaacgagcatgatggggctgctgctattgtaaacctgtgtatatacctcagtctctagtatgctgctgccggattgcttcaatggcttcaatgacacccttagctttcaactgtttggatttctcctgtgacattgaattccttcggtatcgaaacatttgatcatttc

SEQ ID NO: 37631 - protein, 119 aa, Zea mays subsp. mays
MARTSFKMEHDLEKRQSESARIRDKYPDRIPVIVEKAGKTDVPEIDKKKYLVPADLTVGQFVYVVRKRIKLSPEKAIFVFVKNTLPPTASLMSAIYEENKDEDGFLYMTYSGENTFGSA

SEQ ID NO: 37632 - protein, 112 aa, Zea mays subsp. mays
MEHDLEKRQSESARIRDKYPDRIPVIVEKAGKTDVPEIDKKKYLVPADLTVGQFVYVVRKRIKLSPEKAIFVFVKNTLPPTASLMSAIYEENKDEDGFLYMTYSGENTFGSA

SEQ ID NO: 37633 - protein, 68 aa, Zea mays subsp. mays
TPTRDFAQLPPIGLPRRFRQPLDPIGSIDRTSSSGCRWPGPLSKWSTTSRKGSPNLPGSGISIPTEFL

SEQ ID NO: 37634 - DNA, 1540 bp, Zea mays subsp. mays
acagtctacaccgaatccatcccccatcgccgccgccgccgccgccgacgacgacgatggcaagcctactccggcgatctgccgtacccgcgcgccagctcctcctcctcccgcgccatttcgccgccgccggctccgcccccgccttgtcccgctcgttctcccgcttcaacccccgagacgacagctctatgttcgatccaccggagccgccggtgaactggggcgtgagcatagttccggagaagaaggcttacgttgtggagagattcgggaagtatctcaagaccctcggctccgggttccacctcctgatccccgccgtcgaccgtattgcctacgtgcactcgctcaaggaagagaccatccctatccctcaccagaacgccatcaccaaggacaacgtcaccatacagattgacagcgtcatctatgtcaagatcatggacccctaccttgcttcctatggtgtggagaatccaatctatgctgtcctacaacttgcacaaacaaccatgagaagtgaactcgggaagataaccttagataagacttttgaggagagagatgcattaaatgagaaaattgtgagtgccatcaatgaagcagccacagattggggcctgaagtgtatccgctattagatcagggacataaatcctccagcagggattaggcaggctatggagatgcaggctgaggcagaaaggaaaaaacgcgctcaaatccttgagtcagaagggatgaaacaggcccaaatccttgaatcagaagggaaaaagactgcccagatccttgaatctgaaggagctatgttggatctagcaaaccgtgccaagggtgcggctgaagcaattcttgccaagtcagaagctactgctcgtggaatgagattggtttcagatgcgatgacaactgaaggcagtgccaaggctgctagcctgaaacttgcagagcaatacatcgaagcattctcaaatctggcacaaaagacaaatacaatgcttcttccaggtgatagtgccagcccagcatctttcgtggcccaggcaatgaagacgtatgagcaaatccattcccacagccaggcattaaagagccacccccagatagaagagctgaaggaatcaggagagaccagtcctgctccatcttctgaggcgagcaagacaccaccactcattgaggaagcagattctaaccagaccttctcactgcaacgccccaagaacaagcagtgagctttgctcaagtgtttgaagtccttttttctatctgttgttctgaaacatgagtgccactgagaaacaccactagtaggttttagttttctttagtctgagagctgatatgtggcggagaagggatagacccctaggcatttggtttctgggagctaaatgcgactggagagacctagagagattttgattctcgtgaaggttatactttggttccttgttggaatgaagtttgtaaaaaggcaaagttgggttaacgttggttagacaaaatgcataaatgcttaagttatttcttc

SEQ ID NO: 37635 - protein, 213 aa, Zea mays subsp. mays
SLHRIHPPSPPPPPPTTTMASLLRRSAVPARQLLLLPRHFAAAGSAPALSRSFSRFNPRDDSSMFDPPEPPVNWGVSIVPEKKAYVVERFGKYLKTLGSGFHLLIPAVDRIAYVHSLKEETIPIPHQNAITKDNVTIQIDSVIYVKIMDPYLASYGVENPIYAVLQLAQTTMRSELGKITLDKTFEERDALNEKIVSAINEAATDWGLKCIRY

SEQ ID NO: 37636 - protein, 195 aa, Zea mays subsp. mays
MASLLRRSAVPARQLLLLPRHFAAAGSAPALSRSFSRFNPRDDSSMFDPPEPPVNWGVSIVPEKKAYVVERFGKYLKTLGSGFHLLIPAVDRIAYVHSLKEETIPIPHQNAITKDNVTIQIDSVIYVKIMDPYLASYGVENPIYAVLQLAQTTMRSELGKITLDKTFEERDALNEKIVSAINEAATDWGLKCIRY

SEQ ID NO: 37637 - protein, 185 aa, Zea mays subsp. mays
MEMQAEAERKKRAQILESEGMKQAQILESEGKKTAQILESEGAMLDLANRAKGAAEAILAKSEATARGMRLVSDAMTTEGSAKAASLKLAEQYIEAFSNLAQKTNTMLLPGDSASPASFVAQAMKTYEQIHSHSQALKSHPQIEELKESGETSPAPSSEASKTPPLIEEADSNQTFSLQRPKNKQ

SEQ ID NO: 37638 - DNA, 706 bp, Zea mays subsp. mays
cgcagtagtttttatgtaaacgacttctaaataataatttaaaaataaaatttagaaaaactatggaagattaaatatctaaatttggctagtctctctctggatgctctaattactttattttgttgcaggactcccgcgtgattcccgagggtccctcgaagtcttcaatccagacgcccctgtttcagatcgagcaaccacctccccgtttctcctccctcctgcggccgcgtcccatcccagcctcctcgccgccggagatggcggcgatgctgacgtgggtcgggcgacacagagggccgccgagtggggcctcgtcctccagaccgacgagcacaccggccgcccccagggtgtcgtcgcccgtccctccggttccaaccgcaccagcgagagtggcaactccatcgacgagagggccgccgccgccggtgctggtagagctctcccccgggtgtcggaggagcttcgcgccgcgctctcagcgttccagcagaccttcgtcgtgtccgatgccacccgccctgaccaccccatcctctacgccagcgctggattcttcaacatgacgggctactcctccaatgaggtcgtcggaaggaactggtgagtcaatggtttcaattcaatatattcctattctattccatgccaatcgaatcgaataacacttcaactaatacgcactgcacttacgcctcgc

SEQ ID NO: 37639 - protein, 102 aa, Zea mays subsp. mays
MAAMLTWVGRHRGPPSGASSSRPTSTPAAPRVSSPVPPVPTAPARVATPSTRGPPPPVLVELSPGCRRSFAPRSQRSSRPSSCPMPPALTTPSSTPALDSST

SEQ ID NO: 37640 - protein, 99 aa, Zea mays subsp. mays
MLTWVGRHRGPPSGASSSRPTSTPAAPRVSSPVPPVPTAPARVATPSTRGPPPPVLVELSPGCRRSFAPRSQRSSRPSSCPMPPALTTPSSTPALDSST

SEQ ID NO: 37641 - DNA, 2064 bp, Zea mays subsp. mays
acggcaccagtgacgcgaaagcaaaacgccaaacaggctcctctgaaactcccagagccggtagaggcacgccactccgcagtgtcagtcactgcccccccatcacgccgcccgccctttctcggccgttgccgcgagctcgcttcgacccaccgccgatggcgacggcgatgggcgcgatggccgccacctgcatggcctcgatcccggccgccgctacgttccccggtgatctcggcgtcggacgacgccgagcggttgtaccagggtggcgcgccggtgggagacggctgcgtgcgacgccgcctgcccggaggccgttcctgttctcgccgaagggcgtttcggactcgcggagctcgcaaacgtgccttgatccggacgccagcacgagtgttcttgggatcatccttggagggggtgctgggacaaggctgtatccactgacgaagaagagggcgaaaccagcagtgccgttgggcgccaactacaggctcatagatatccctgtcagcaactgtctcaacagtaacgtctccaagatatatgtgctaacacagttcaactctgcttcgctcaaccgccacctctcgagggcctatggaaacaacattgccgggtacaagaatgagggattcgttgaggtccttgcagcacaacagagtccagagaatcccaactggtttcagggtactgcagatgccgtgcgtcaatatatgtggctatttgaggagcataatatcatggagttccttattctggctggagatcatctgtaccgtatggattaccaaaagttcattcaagctcatagagaaacagatgctgatataacagttgcagccctgccaatggatgaacaacgtgcaactgcatttggtcttatgaaaattgatgatgaagggaggatagttgagtttgcagaaaaaccaaaaggagagaagctgagatcaatgatggtagacaccactatattgggccttgatcctgaaagggccaaagaactgccttatattgccagtatgggaatctatgtttttagcaaagatgtgatgcttcgtcttctcagagaaaattttcctgcagcaaatgactttggaagtgaggttattcctggcgcaacagaaattggattaagggtgcaagcttacttatatgatggttactgggaagatattggtactattgaagcattttataatgcaaacttgggaataaccaagaagcctgtaccggattttagcttctatgatcgttctgctccaatttatacgcaacctagatatttgcctccttcgaaggttcttgatgctgatgtgacagacagtgttattggagaagggtgtgttattaaacattgcacaatcaatcattccgtagttggactccgttcctgcatttctgaaggtgcagttatagaggactctttgctaatgggtgcagactattacgagactgagaatgataagaatgtcctttctgagactggtggcattcccattggtattgggaaaaattcacatatcagaaaagcaataattgacaaaaatgctcgcattggagaaaatgtgaagataatcaattttgataatgtccaagaagcagtaagggagacagaaggatattttatcaaaagtggaattgtcacggtgattaaagatgctttaattcctagtggaacaatcatataaagtcagccaacaccatgtatataaggttgggttgcatcatatggtgatcgccaatgcgcatcaagttctctcatcccttgcgagaccatgcttatttccattgcaaaatcatcaagctctgcatcaacttgttgtggataataatgaaataataaatggtgccattccatggcaacatttttctgtcactagtatgaggcactgttctaaatgtactgttgagtggaatttgaatatgtatgcttttgcaatcgcacacctaaataccttgtgcttatactccttgttacctaaatatgctcactgcattgcccaaggaatcagattaaaaatgtcatgcataacatgatttttgttagattgttgtaaagct

SEQ ID NO: 37642 - protein, 562 aa, Zea mays subsp. mays
GTSDAKAKRQTGSSETPRAGRGTPLRSVSHCPPITPPALSRPLPRARFDPPPMATAMGAMAATCMASIPAAATFPGDLGVGRRRAVVPGWRAGGRRLRATPPARRPFLFSPKGVSDSRSSQTCLDPDASTSVLGIILGGGAGTRLYPLTKKRAKPAVPLGANYRLIDIPVSNCLNSNVSKIYVLTQFNSASLNRHLSRAYGNNIAGYKNEGFVEVLAAQQSPENPNWFQGTADAVRQYMWLFEEHNIMEFLILAGDHLYRMDYQKFIQAHRETDADITVAALPMDEQRATAFGLMKIDDEGRIVEFAEKPKGEKLRSMMVDTTILGLDPERAKELPYIASMGIYVFSKDVMLRLLRENFPAANDFGSEVIPGATEIGLRVQAYLYDGYWEDIGTIEAFYNANLGITKKPVPDFSFYDRSAPIYTQPRYLPPSKVLDADVTDSVIGEGCVIKHCTINHSVVGLRSCISEGAVIEDSLLMGADYYETENDKNVLSETGGIPIGIGKNSHIRKAIIDKNARIGENVKIINFDNVQEAVRETEGYFIKSGIVTVIKDALIPSGTII

SEQ ID NO: 37643 - protein, 510 aa, Zea mays subsp. mays
MATAMGAMAATCMASIPAAATFPGDLGVGRRRAVVPGWRAGGRRLRATPPARRPFLFSPKGVSDSRSSQTCLDPDASTSVLGIILGGGAGTRLYPLTKKRAKPAVPLGANYRLIDIPVSNCLNSNVSKIYVLTQFNSASLNRHLSRAYGNNIAGYKNEGFVEVLAAQQSPENPNWFQGTADAVRQYMWLFEEHNIMEFLILAGDHLYRMDYQKFIQAHRETDADITVAALPMDEQRATAFGLMKIDDEGRIVEFAEKPKGEKLRSMMVDTTILGLDPERAKELPYIASMGIYVFSKDVMLRLLRENFPAANDFGSEVIPGATEIGLRVQAYLYDGYWEDIGTIEAFYNANLGITKKPVPDFSFYDRSAPIYTQPRYLPPSKVLDADVTDSVIGEGCVIKHCTINHSVVGLRSCISEGAVIEDSLLMGADYYETENDKNVLSETGGIPIGIGKNSHIRKAIIDKNARIGENVKIINFDNVQEAVRETEGYFIKSGIVTVIKDALIPSGTII

SEQ ID NO: 37644 - protein, 506 aa, Zea mays subsp. mays
MGAMAATCMASIPAAATFPGDLGVGRRRAVVPGWRAGGRRLRATPPARRPFLFSPKGVSDSRSSQTCLDPDASTSVLGIILGGGAGTRLYPLTKKRAKPAVPLGANYRLIDIPVSNCLNSNVSKIYVLTQFNSASLNRHLSRAYGNNIAGYKNEGFVEVLAAQQSPENPNWFQGTADAVRQYMWLFEEHNIMEFLILAGDHLYRMDYQKFIQAHRETDADITVAALPMDEQRATAFGLMKIDDEGRIVEFAEKPKGEKLRSMMVDTTILGLDPERAKELPYIASMGIYVFSKDVMLRLLRENFPAANDFGSEVIPGATEIGLRVQAYLYDGYWEDIGTIEAFYNANLGITKKPVPDFSFYDRSAPIYTQPRYLPPSKVLDADVTDSVIGEGCVIKHCTINHSVVGLRSCISEGAVIEDSLLMGADYYETENDKNVLSETGGIPIGIGKNSHIRKAIIDKNARIGENVKIINFDNVQEAVRETEGYFIKSGIVTVIKDALIPSGTII

SEQ ID NO: 37645 - DNA, 829 bp, Zea mays subsp. mays
aaccccgcagccaacagcccaacaggacagtaggggctcccttctccagttctccttgcttgcgtcttcccggtcccgtctgcgtgcgtgcgatcgacgcagaggcgcgggcgctcgcaccaagccgatccgatggccttcatgcgctcccgctcaaatgcatcttctggcatgggagttgctcctaacattagggagacgtttgtcgagctccaaatgaagaagacattccgatatgttatcttcaaaatcgaagaaaagcaaaagcaggtggagaagacaggggccactactgaaagctatgatgattttctggcctctctcccagagaatgactgccgatatgcgctgtatgattttgattttgtcaccggggagaatgtgcagaaaagcaagattttcttcattgcctggtccccgtcgacatcccgcatccgtgccaagatgctttactccacctcgaaggaccgcatcaagtatgagctcgacgggttccactacgagatccaggcgaccgacccatccgaggcggacattgaggttctgcgggagcgggctcactgaagctggttcgccttcgaagaagaagggacctgtggagggctgtgaaccttttggtcagatgcaaattctattaccaatgatgaaagctcccgccttggtatttgttattaagttcctgtaagcatgtcgtttaggcgcgatgcgtgactctagctggtgaagcgttatcaaagctgtatctgtaagagttttggttgtcgagcctgtaaacgaagcaaggtttgcgaacttgttatattgtggtattgatggtactggattactg

SEQ ID NO: 37646 - protein, 149 aa, Zea mays subsp. mays
MLSSKSKKSKSRWRRQGPLLKAMMIFWPLSQRMTADMRCMILILSPGRMCRKARFSSLPGPRRHPASVPRCFTPPRRTASSMSSTGSTTRSRRPTHPRRTLRFCGSGLTEAGSPSKKKGPVEGCEPFGQMQILLPMMKAPALVFVIKFL

SEQ ID NO: 37647 - protein, 143 aa, Zea mays subsp. mays
MAFMRSRSNASSGMGVAPNIRETFVELQMKKTFRYVIFKIEEKQKQVEKTGATTESYDDFLASLPENDCRYALYDFDFVTGENVQKSKIFFIAWSPSTSRIRAKMLYSTSKDRIKYELDGFHYEIQATDPSEADIEVLRERAH

SEQ ID NO: 37648 - protein, 140 aa, Zea mays subsp. mays
MRSRSNASSGMGVAPNIRETFVELQMKKTFRYVIFKIEEKQKQVEKTGATTESYDDFLASLPENDCRYALYDFDFVTGENVQKSKIFFIAWSPSTSRIRAKMLYSTSKDRIKYELDGFHYEIQATDPSEADIEVLRERAH

SEQ ID NO: 37649 - DNA, 1041 bp, Zea mays subsp. mays
tttcgcctcggacgccttcctaatgtagaggttgagtgggatgagataaatgttgcgtggggtcaggctgcacttctgttgcataccatggcccattatttcactccaaaattccgataccggatcaagattcaccctatgggaagctatccaagagtcacagacatccacaatcatacatatgaactgtttggtcccgtgaatttgttctggagcacccgatttgacaaagccatgacatggtttctgacttgcctgcaagagttcgctgagtttgccataagtctggataaggagaacaatgttccacctgaaaaaacactgaagcttccccacaagatcgatggtgacaaagtagggaaccacacgatcgtcctaagtttcaatcaggatgaaacctggaccaaggcgctcaagtacatgctgtacgatctgaagtttgttctctcctggtttattggcaatacaagttttgcgccaccttcgagatcactgcacacccaatttctgaagaacaagagttgatgttgttctctctctctctctctctctctctctctctctctctctctctctctctctctctctctctctctctctctctctaagggcatgtttgggagcaagaaggggattttagccccttctccaatcctttggcttagtaaccaggttcccggatcgatgggatcgaggaacgggaacgtggtacgcggtacgctacaaaaagtaggatttaacactaccggaacgagattgttcccacgttcccggaacgaggaacgtggccaagttcccagttcccggttgttcccggaacgaggaacgtggccaagttcccagttcccggttactaagtcctttggtcccaaacatgtcgtgactgtacatagtttatatacttgaccctagctagccgttggatgtaaccgtagtgacaatgacgacatgtttgatgtacatatgtttactgtactatctaaagctcagcgactccattttaaaaaaaaaaaaaaaaaaaaaaaaaaaaaaatttttttt

SEQ ID NO: 37650 - protein, 174 aa, Zea mays subsp. mays
FRLGRLPNVEVEWDEINVAWGQAALLLHTMAHYFTPKFRYRIKIHPMGSYPRVTDIHNHTYELFGPVNLFWSTRFDKAMTWFLTCLQEFAEFAISLDKENNVPPEKTLKLPHKIDGDKVGNHTIVLSFNQDETWTKALKYMLYDLKFVLSWFIGNTSFAPPSRSLHTQFLKNKS

SEQ ID NO: 37651 - protein, 145 aa, Zea mays subsp. mays
MAHYFTPKFRYRIKIHPMGSYPRVTDIHNHTYELFGPVNLFWSTRFDKAMTWFLTCLQEFAEFAISLDKENNVPPEKTLKLPHKIDGDKVGNHTIVLSFNQDETWTKALKYMLYDLKFVLSWFIGNTSFAPPSRSLHTQFLKNKS

SEQ ID NO: 37652 - protein, 128 aa, Zea mays subsp. mays
MGSYPRVTDIHNHTYELFGPVNLFWSTRFDKAMTWFLTCLQEFAEFAISLDKENNVPPEKTLKLPHKIDGDKVGNHTIVLSFNQDETWTKALKYMLYDLKFVLSWFIGNTSFAPPSRSLHTQFLKNKS

SEQ ID NO: 37653 - DNA, 554 bp, Zea mays subsp. mays
accgctcagtcagcgccgccgcaaccccgccccgaccctcgtggcctcgtccaacgttcgtgccgcttgctgggccgccgacgcgccaggccgctggagcagctcgcctgccccccacgccgtgcccctcgctcagcctgcgccgcctcgcacacctcgcgccgctagcccggccggagccgctcttcttccaccgcgatcgccagctgccgccgctcctctaatggtgacgaggtggagccagaagagcccgggcctcaagatcctgtggatctggaccctgggcaccgccgcaattgtggtcggcggtatcgtccggatgcgggtaaacgatgtgcagaagatccttcgggaagaagaggaagccgccgctaccgccacggccacgtcgccccccagcgagcgagtcctgaaagacgaagagtagaacaggaagtggagaggacacagtctcagtgttctagcttttctgtactattaaggttgctgttagctgtagaatacgtcgtggaagagctgtatcgttagctactacgtaacgtaagctacactgc

SEQ ID NO: 37654 - protein, 141 aa, Zea mays subsp. mays
PLSQRRRNPAPTLVASSNVRAACWAADAPGRWSSSPAPHAVPLAQPAPPRTPRAASPAGAALLPPRSPAAAAPLMVTRWSQKSPGLKILWIWTLGTAAIVVGGIVRMRVNDVQKILREEEEAAATATATSPPSERVLKDEE

SEQ ID NO: 37655 - protein, 73 aa, Zea mays subsp. mays
RSVSAAATPPRPSWPRPTFVPLAGPPTRQAAGAARLPPTPCPSLSLRRLAHLAPLARPEPLFFHRDRQLPPLL

SEQ ID NO: 37656 - protein, 67 aa, Zea mays subsp. mays
MVTRWSQKSPGLKILWIWTLGTAAIVVGGIVRMRVNDVQKILREEEEAAATATATSPPSERVLKDEE

SEQ ID NO: 37657 - DNA, 635 bp, Zea mays subsp. mays
aacccatgtgcggttagcagcaattcatcagctagaagttcgaaatgggggtcaagtttttagtccttctcggtgttgtcctggcctctcttgtcttccaggacgtggcatttgctagagagctcactgaggccaataatgaggatgagggaaagaacatgaaacaaggaggaatgactgaattaaaggatgagaaatggggaggtggatataatggaggatatggatatggaggtgggtatggtggtggatatggaaaaccgggctatggtggtggatatggtggaggatacaggcccaaatatggcaggggctacaggtccggatatggatacggtggcgggtatggtggaggatacggtggcggttatggtgggggacgcggtgtgcgcgtgtcttgagatgtgattccttccttccttgtttagttgctgctgctcctgctggtgtagtactggtgtatccagtccttttaatttcttgattagtttgctcggctgaagaaatcaggacgcgtgcctggtgttgctgctcagctccatgtacttgtacaaccgttcctccctgcagctgctgccccttctctctttttgtttaccttggattgatggattgttaaattcgttgtttgtctc

SEQ ID NO: 37658 - protein, 118 aa, Zea mays subsp. mays
MGVKFLVLLGVVLASLVFQDVAFARELTEANNEDEGKNMKQGGMTELKDEKWGGGYNGGYGYGGGYGGGYGKPGYGGGYGGGYRPKYGRGYRSGYGYGGGYGGGYGGGYGGGRGVRVS

SEQ ID NO: 37659 - protein, 80 aa, Zea mays subsp. mays
MKQGGMTELKDEKWGGGYNGGYGYGGGYGGGYGKPGYGGGYGGGYRPKYGRGYRSGYGYGGGYGGGYGGGYGGGRGVRVS

SEQ ID NO: 37660 - protein, 75 aa, Zea mays subsp. mays
MTELKDEKWGGGYNGGYGYGGGYGGGYGKPGYGGGYGGGYRPKYGRGYRSGYGYGGGYGGGYGGGYGGGRGVRVS

SEQ ID NO: 37661 - DNA, 745 bp, Zea mays subsp. mays
ctgtgacttcatgaggacaggtcgaggaccgtctgctcactagtcactacgtctacgcattgaagctagaggattcatctttgggccagccattgcgctagccataggagcaaagttcataccactacgtaaacctaagaagcttccaggtgaggtattttctgaaagttatgtacttgagtatgggatggattgtttggagatgcatgttggagctattgaacccggggagcgcgtagtggttgtcgatgatttggttgcaactggtggaactctttctgctgcaataagacttctcgagcgcgcaggagctaacgtggttgagtgtgcatgcctcattgggcttcccaagtttaaggatttctataagctcaacgggaaaccggtttacatcctggtggagtcccgcaaataggacgcagtaaatggtcagacaaaaaagctttctagcttcccgtccaaagaagctcacaacttcactcatttgcacgcgcaagcaaggtggtatgggggcaccgagaaactccgcagtaatctgtgttgaggccacggccagatgatgctatgtatcttcatggagagggtgatggactgggtgaaacgtagtcactgtacctttgtagcacgtcatgtctagtgtttcttagtagccatggctgaagagagtttgtagctattcccggcttcctgcagccaggaacatcagtgttaggcagagaaggaaaaggatcttatgttgctgctc

SEQ ID NO: 37662 - protein, 75 aa, Zea mays subsp. mays
MDCLEMHVGAIEPGERVVVVDDLVATGGTLSAAIRLLERAGANVVECACLIGLPKFKDFYKLNGKPVYILVESRK

SEQ ID NO: 37663 - protein, 70 aa, Zea mays subsp. mays
MHVGAIEPGERVVVVDDLVATGGTLSAAIRLLERAGANVVECACLIGLPKFKDFYKLNGKPVYILVESRK

SEQ ID NO: 37664 - protein, 44 aa, Zea mays subsp. mays
MVRQKSFLASRPKKLTTSLICTRKQGGMGAPRNSAVICVEATAR

SEQ ID NO: 37665 - DNA, 992 bp, Zea mays subsp. mays
gccttccctctgaaaactcttcattctcctctcctccgccgcgccgccaacttcccctcccgtcaactccggctcccgcgcgagatcgagctagcgtttggggttctcgagaccggctgccatggcgacagagcaagaggcggagaactacacggtggaggaccttgtggccctgaatccgtacaaccccgacatcctcaacgaccttgagaagttcgtcaacgagcaagttgcgtctcaaacatataacttggatgcaaatctcagccttcttcgcctgtaccagtttgagccaggaaggatgagcatacatattgtggcccacatactgatcaaggctctcatggcaatgccggcccctgacttcagtctttgcttattcttaattcctgaacatgtgcaaatggaagagcaattcaaggcattgatagttctttctcactatctagagactgctaggttcaggcagttttgggatgacgcagcaaacaaccgccacatattggaagcagttccaggttttgagcaggcaatccaatcctatgcaattcatgtactttccttgacataccagaaagttccaaggcatattcttgcagaggcaatcaacattgaaggtctcgctttggacaagtttcttgagtaccatgctgcgaactcaggttgggtaattgagaagggtgggcagtctcaagtgattgttcttccacgcaatgagttcaatcacccccagctcaagaagaacacagctgataccgttccatttgagcacctaacacgcatattccctgttcttagctgattcaggcgtagtgagagatatacaatagaactcagagcgagtgaagcttctctaagcaattgtatcatctcctttgtggtataccgtattttaagatctcggtatacctgttcttttttatggctgaattggtacctgcaacttggttattactataacgaaatgaccagttatgagattggtcggcccc

SEQ ID NO: 37666 - protein, 226 aa, Zea mays subsp. mays
MATEQEAENYTVEDLVALNPYNPDILNDLEKFVNEQVASQTYNLDANLSLLRLYQFEPGRMSIHIVAHILIKALMAMPAPDFSLCLFLIPEHVQMEEQFKALIVLSHYLETARFRQFWDDAANNRHILEAVPGFEQAIQSYAIHVLSLTYQKVPRHILAEAINIEGLALDKFLEYHAANSGWVIEKGGQSQVIVLPRNEFNHPQLKKNTADTVPFEHLTRIFPVLS

SEQ ID NO: 37667 - protein, 166 aa, Zea mays subsp. mays
MSIHIVAHILIKALMAMPAPDFSLCLFLIPEHVQMEEQFKALIVLSHYLETARFRQFWDDAANNRHILEAVPGFEQAIQSYAIHVLSLTYQKVPRHILAEAINIEGLALDKFLEYHAANSGWVIEKGGQSQVIVLPRNEFNHPQLKKNTADTVPFEHLTRIFPVLS

SEQ ID NO: 37668 - protein, 152 aa, Zea mays subsp. mays
MAMPAPDFSLCLFLIPEHVQMEEQFKALIVLSHYLETARFRQFWDDAANNRHILEAVPGFEQAIQSYAIHVLSLTYQKVPRHILAEAINIEGLALDKFLEYHAANSGWVIEKGGQSQVIVLPRNEFNHPQLKKNTADTVPFEHLTRIFPVLS

SEQ ID NO: 37669 - DNA, 785 bp, Zea mays subsp. mays
aaaccctaatgaacctagcgccgcttcctccctcccaaacccatggcttcccaccttgacttccgctgcctggatgagggcctcggcggcgaacgcggcaagcgcaagcgccgcgaggatgcctcggcggcggccgcggactccatggacctcgatgctgacgccccccggctgtctaagctccgcgccatgccttccctctccgacccctcgaagccggcctccttcggccagcccacctacgacggcgtcatcgcagggcggttgtcggggcgccggtggaaggagccccgcacccggcggtcgtcggccgtggcggtgtcgcggaagccgatcccgctggaacagcgcgtccgggagaagtctctgaagcgcgcgtaccaggcccgcaaggcggagctcaaggaggagatccggcagaacaaggttgcgaagcggaaggcccgcgaggagcgggagaagcggaagcaggagaacgtgctccgcacgggcaccaagctgcagcgggtcaccaacccgaagacgatccagaagatcgccaagtccaagaagcgcaagcagctcaaggtcgtccccgacgagttcttcggcggcaagaagtcggaggccagccggcgcatgcaggtgcctggacttgagaattgaatctcaattctcaatctctgtttctggggtcgcgttgagttcatagtggttaattcgacgacgattttctacttgcttatggtagtttgaagtatgatcagattaagtgattacaatggtacgcaagttatcaagttctg

SEQ ID NO: 37670 - protein, 200 aa, Zea mays subsp. mays
MASHLDFRCLDEGLGGERGKRKRREDASAAAADSMDLDADAPRLSKLRAMPSLSDPSKPASFGQPTYDGVIAGRLSGRRWKEPRTRRSSAVAVSRKPIPLEQRVREKSLKRAYQARKAELKEEIRQNKVAKRKAREEREKRKQENVLRTGTKLQRVTNPKTIQKIAKSKKRKQLKVVPDEFFGGKKSEASRRMQVPGLEN

SEQ ID NO: 37671 - protein, 166 aa, Zea mays subsp. mays
MDLDADAPRLSKLRAMPSLSDPSKPASFGQPTYDGVIAGRLSGRRWKEPRTRRSSAVAVSRKPIPLEQRVREKSLKRAYQARKAELKEEIRQNKVAKRKAREEREKRKQENVLRTGTKLQRVTNPKTIQKIAKSKKRKQLKVVPDEFFGGKKSEASRRMQVPGLEN

SEQ ID NO: 37672 - protein, 151 aa, Zea mays subsp. mays
MPSLSDPSKPASFGQPTYDGVIAGRLSGRRWKEPRTRRSSAVAVSRKPIPLEQRVREKSLKRAYQARKAELKEEIRQNKVAKRKAREEREKRKQENVLRTGTKLQRVTNPKTIQKIAKSKKRKQLKVVPDEFFGGKKSEASRRMQVPGLEN

SEQ ID NO: 37673 - DNA, 1100 bp, Zea mays subsp. mays
tatgggttggcaactgccgggctcatctctagagggcagtgcaaaagtttcaggttggaaaccaccagtcttatcacttgaagggattgctaatggttcaggttcacaagcatcgtgtccttctacgcaaaggggcacaaaatcttcaggttggcagcgatcaagttcatccccggatgggagcagaaaagcctcaggttggcaacagtcaagtacatcaccagaggggagtggaaaagcgcatggctggcaacgatcaggatcttttacccaggggggtacaaaggctgcaggtcggcaaccctctcgttcctgtacagatcggattgcaaaagttgatggctggcaacgaacaagttcatctccggagggaagcagaaaagcttcaggctggcattcgtcgggtcgtgacagctcaaagatcgcatccagtgccagcgaaaaccgtaaattgtcttctagtcaccaagcgacgacaccaacagggaggcactcgttggcaaagagacagggaagcagcgacaagggtgctgctggttgggacgaggctctggggaactcttcggaagcatcgaagagacaacagggaaacagcgacaagaatgcaggctcgggagtggctctcggaagcaacaggagctggcatccatcgtctggtaaccctagtcggggcggccaggggaatcaccaacatgacagggactctcacagcggtgattcgcggcggggtagctcgaactacccccggaggtccgacaatcgtcatgaccatggcagtggtggttcgtcacgaccctcgtcaagagggcagtcccagagggggctatgtaaacactacgagagtggccactgcgggaagggttcgaaatgccagtacctgcaccggtgatcgccgtggccgtgtggaagcgggacccctgtttgcctggccgtcctcacatttttgtatagcaggatgtggtttcgtcgtagtcagtatagtagaacgcttattaaccgtgtcggcaccactaagttggtagtagtacatatctttcagggcaggagcatgactaaagtaggatttgtaagttttattagagccactgatggccttgggc

SEQ ID NO: 37674 - protein, 309 aa, Zea mays subsp. mays
MVQVHKHRVLLRKGAQNLQVGSDQVHPRMGAEKPQVGNSQVHHQRGVEKRMAGNDQDLLPRGVQRLQVGNPLVPVQIGLQKLMAGNEQVHLRREAEKLQAGIRRVVTAQRSHPVPAKTVNCLLVTKRRHQQGGTRWQRDREAATRVLLVGTRLWGTLRKHRRDNRETATRMQAREWLSEATGAGIHRLVTLVGAARGITNMTGTLTAVIRGGVARTTPGGPTIVMTMAVVVRHDPRQEGSPRGGYVNTTRVATAGRVRNASTCTGDRRGRVEAGPLFAWPSSHFCIAGCGFVVVSIVERLLTVSAPLSW

SEQ ID NO: 37675 - protein, 295 aa, Zea mays subsp. mays
MGWQLPGSSLEGSAKVSGWKPPVLSLEGIANGSGSQASCPSTQRGTKSSGWQRSSSSPDGSRKASGWQQSSTSPEGSGKAHGWQRSGSFTQGGTKAAGRQPSRSCTDRIAKVDGWQRTSSSPEGSRKASGWHSSGRDSSKIASSASENRKLSSSHQATTPTGRHSLAKRQGSSDKGAAGWDEALGNSSEASKRQQGNSDKNAGSGVALGSNRSWHPSSGNPSRGGQGNHQHDRDSHSGDSRRGSSNYPRRSDNRHDHGSGGSSRPSSRGQSQRGLCKHYESGHCGKGSKCQYLHR

SEQ ID NO: 37676 - protein, 281 aa, Zea mays subsp. mays
MGAEKPQVGNSQVHHQRGVEKRMAGNDQDLLPRGVQRLQVGNPLVPVQIGLQKLMAGNEQVHLRREAEKLQAGIRRVVTAQRSHPVPAKTVNCLLVTKRRHQQGGTRWQRDREAATRVLLVGTRLWGTLRKHRRDNRETATRMQAREWLSEATGAGIHRLVTLVGAARGITNMTGTLTAVIRGGVARTTPGGPTIVMTMAVVVRHDPRQEGSPRGGYVNTTRVATAGRVRNASTCTGDRRGRVEAGPLFAWPSSHFCIAGCGFVVVSIVERLLTVSAPLSW

SEQ ID NO: 37677 - DNA, 627 bp, Zea mays subsp. mays
atcacttatcatccccatccgcacctctctccatctccctgctcctccgccttcttcttgatccagccaagccagggatcgccatgtcggactcggaggagcaccacttcgaatcgaaggccgacgccggagcgtccaagacctacccgcagcaggctggcaccgtccgtaagaacggcttcatcgtcatcaagaaccgcccctgcaaggttgtggaggtttctacctcaaagactggtaagcatggtcatgccaaatgccactttgttgccatagatatattcaacgggaaaaagctcgaagatattgttccttcgacgctgtcaagggagattggaagttcagggtgaagcacttcagcgcctacgggctttggtgaaatcctggggagttaagtagtttgtttgttctgatggagcaacgctttacgctcttgtcaaataccatgcttggatctgttgtgctgcttctgtacaatgttgctgctgttaaaatgcttgcaaattgcactgctctgctgctgaaaacaggagcagcagtagaaactaccgcaacaggagggcgtgctacctgctactgttatgtattattatactatattctaagtataataagacttagtttttt

SEQ ID NO: 37678 - protein, 115 aa, Zea mays subsp. mays
HLSSPSAPLSISLLLRLLLDPAKPGIAMSDSEEHHFESKADAGASKTYPQQAGTVRKNGFIVIKNRPCKVVEVSTSKTGKHGHAKCHFVAIDIFNGKKLEDIVPSTLSREIGSSG

SEQ ID NO: 37679 - protein, 91 aa, Zea mays subsp. mays
ITYHPHPHLSPSPCSSAFFLIQPSQGSPCRTRRSTTSNRRPTPERPRPTRSRLAPSVRTASSSSRTAPARLWRFLPQRLVSMVMPNATLLP

SEQ ID NO: 37680 - protein, 88 aa, Zea mays subsp. mays
MSDSEEHHFESKADAGASKTYPQQAGTVRKNGFIVIKNRPCKVVEVSTSKTGKHGHAKCHFVAIDIFNGKKLEDIVPSTLSREIGSSG

SEQ ID NO: 37681 - DNA, 914 bp, Zea mays subsp. mays
gtaaacaatgtacacatatgcaggcgtctccggcgaggggttcctggcgcgcgacatcacgttccgcaacacggcgggcgcgggcaaggggcaggcggtggcgctgcgcgtgaacgcggacctggccgcgctgtaccgctgcggcgtggaggggcaccaggacgcgctgtacgcgcactcgttccggcagttctaccgcgagtgcgccgtgtcgggcaccgtcgacgtggtcttcggcgacgcggcggccgtgctgcagggctgcgcgctcttggccagggcgcccgtgcccggccagtccgtcgtgctcacggcgcacggccgcgccgaccccaacgaggacacgggcatcgcgctgcaccactgcaccgtctccgtctccgcctccgccgccgaccccgcgcccgccggcacgcgcacgttcctgggccggccgtggggcgcgtacgcgcgcgccgtcgtgatggactcctacctgggccagatcgtggaccgggagggatgggccgagtggcccggcgccgagcccggccgcgcggacaccgtgtacttcggcgagtacgggaacgacgggcctggcgccgacacgggaggccgcgtgggctgggctggggtgcggcagatggagtacgacgaggcggcacagttcgccgtcgagaacttcatctacggcgacgagtggctcggcgccacctccttcccctacgatgacgacgtctgagtctgattgcccttgctctgcaaatctcaagaatacaaaggccgcacaagcgaccgtcagtgagtttggctggtgttttagtatgttcaagttggaataactcttggttccgaattgtaaagttgccatgccctgttccgtttgcagcttatgatgattcatcctcataggaatcaatgctttgtgaagccgg

SEQ ID NO: 37682 - protein, 237 aa, Zea mays subsp. mays
MYTYAGVSGEGFLARDITFRNTAGAGKGQAVALRVNADLAALYRCGVEGHQDALYAHSFRQFYRECAVSGTVDVVFGDAAAVLQGCALLARAPVPGQSVVLTAHGRADPNEDTGIALHHCTVSVSASAADPAPAGTRTFLGRPWGAYARAVVMDSYLGQIVDREGWAEWPGAEPGRADTVYFGEYGNDGPGADTGGRVGWAGVRQMEYDEAAQFAVENFIYGDEWLGATSFPYDDDV

SEQ ID NO: 37683 - protein, 236 aa, Zea mays subsp. mays
VNNVHICRRLRRGVPGARHHVPQHGGRGQGAGGGAARERGPGRAVPLRRGGAPGRAVRALVPAVLPRVRRVGHRRRGLRRRGGRAAGLRALGQGARARPVRRAHGARPRRPQRGHGHRAAPLHRLRLRLRRRPRARRHAHVPGPAVGRVRARRRDGLLPGPDRGPGGMGRVARRRARPRGHRVLRRVRERRAWRRHGRPRGLGWGAADGVRRGGTVRRRELHLRRRVARRHLLPLR

SEQ ID NO: 37684 - DNA, 601 bp, Zea mays subsp. mays
aacaaatcgacgaagtccctgaactcatttccagcctctccgcgccccaaccaccgccaccgcgtgcgagatcacaagcctccacaccgtgaccaccggcgccgctgcggcgtcctgagcaggcggcgagcctcgtgcacagggcaggctcggctcgccggggcggacgagatgagcgggcacgactccaagtacttctctaccaccaagaagggggagatccccgagctgaaggaggagctcaactcccagtacaaggacaagagaaaagatgctgtcaagaaagtgattgctgctatgactgtaggaaaagatgtctcatcattgttcactgatgttgtgaactgcatgcagactgagaacttggagctcaagaaactagtatatttgtatctcatcaactatgctaaaagtcaacctgatcttgccattcttgctgtgaacacatttgttaaggttagaaattctttttcgtaaacgcgtaggagaactgcgcaccaatatattaagaagaatatagaaaaggtcaaaaatagaccacaacaagaaaaaccaccttacggtggcaaaaaaacccggaaatatacaaaagggtccatct

SEQ ID NO: 37685 - protein, 158 aa, Zea mays subsp. mays
NKSTKSLNSFPASPRPNHRHRVRDHKPPHRDHRRRCGVLSRRRASCTGQARLAGADEMSGHDSKYFSTTKKGEIPELKEELNSQYKDKRKDAVKKVIAAMTVGKDVSSLFTDVVNCMQTENLELKKLVYLYLINYAKSQPDLAILAVNTFVKVRNSFS

SEQ ID NO: 37686 - protein, 101 aa, Zea mays subsp. mays
MSGHDSKYFSTTKKGEIPELKEELNSQYKDKRKDAVKKVIAAMTVGKDVSSLFTDVVNCMQTENLELKKLVYLYLINYAKSQPDLAILAVNTFVKVRNSFS

SEQ ID NO: 37687 - DNA, 1804 bp, Zea mays subsp. mays
gtacacacaccgtcgcgagctagctctagccacaccacaccttcctcctcactcccaattccatatagttcctctgcccacgcgcgcacaaaggccatggcgacgacgcggcctcgcggtgggggtggggcggcgagcggcgcgctggtcatggcgatcgtcgtgctgctgctactgccgccatatggagccggcgcggaggagtgcgaggatggcggcatgagcacccgggcgcgcgcgggcgaccgcgtggaggcgctgccggggcagccggcggtggcgttcgcgcagtactccgggtacgtggcggtggaccgggaccgcggccgcgcgctcttctactggctcaccgaggccgtcggcgacgacgcggccgccaagcccctcgtgctctggctcaacggaggtcctggatgctcgtcggtggcgtatggagcgtcggaggagatcggcccgttccggatcaaaccaaacgggacaggcctgttcctcaacaagtactcatggaacagagaggcaaaccttctgttcctcgagtcgcccgcgggagtcggcttctcctacgccaacaccacctcggacctcaagacgtcgggcgacgagaggaccgctcaagacgcgctgcagttcctggtcagctggatgtcacggttcccgcagtaccggcaccgagatttctacatcgccggagaaagctacgcgggccactacgtcccccagttggcaaggaagatcgtcgagtacaacgaggcctcgccacaccccttcatcaacctcaagggaatccttgtgggcaacgcggtgaccgacaactactacgacaacatcggcacggtcacctactggtggacgcacgccatgatctccgaccgcacctacaaggccatcctcaggtggtgcaacttcagcagcagcagcatctcgcgcccctgcaaccgcgccatgagctacgccatgaaccacgagttcggggacatcgaccagtacagcatctacacgccgtcgtgcgccgccgccgcggccagggccaacgccaccgtgctcaggttcaagaacaccctcgtccgccgccggcgctcctccggctacgacccctgcacggagacctacgccgagaggtactacaacaggatggacgtgcagagggcgatgcacgccaacaccacggggatcccctacagatggactgcctgcagtgatgtgctgatcaagacatggcaagattcagagttctccatgctgccgacgtacaagaagctgatgaaagcaggactgaggatatgggtgttcagcggcgacacagattcagtcgtcccggtgaccgcgacgaggttcgccatcagtcatcttggtctgaagatcaagacccgctggtatccatggtactcagctggacaggtaggaggatggtctgaggtgtacgaagggctcacgtttgcgtcggtgagaggcgcagggcatgaggtgccgttgttccagcccaggagggcgttcaggatgttccggtcgttcttggccggggagccattgcccaagtcctgaaggttcctcacatgtgacagaggccatgcatgcctacctgatcatgtctagctacggtcctcacggaaatgtagaagacgggtgagaaggtgacgttccccaggtagagaatgacttgacttgttgataggcgcgcagttcatagctgaggagtgattgattggtctcgggagaaggatgtagagaataataaggatggttatgttatgccatggaaacccatgagcattgcaatgattagcgaataattttcagtgatctt

SEQ ID NO: 37688 - protein, 513 aa, Zea mays subsp. mays
VHTPSRASSSHTTPSSSLPIPYSSSAHARTKAMATTRPRGGGGAASGALVMAIVVLLLLPPYGAGAEECEDGGMSTRARAGDRVEALPGQPAVAFAQYSGYVAVDRDRGRALFYWLTEAVGDDAAAKPLVLWLNGGPGCSSVAYGASEEIGPFRIKPNGTGLFLNKYSWNREANLLFLESPAGVGFSYANTTSDLKTSGDERTAQDALQFLVSWMSRFPQYRHRDFYIAGESYAGHYVPQLARKIVEYNEASPHPFINLKGILVGNAVTDNYYDNIGTVTYWWTHAMISDRTYKAILRWCNFSSSSISRPCNRAMSYAMNHEFGDIDQYSIYTPSCAAAAARANATVLRFKNTLVRRRRSSGYDPCTETYAERYYNRMDVQRAMHANTTGIPYRWTACSDVLIKTWQDSEFSMLPTYKKLMKAGLRIWVFSGDTDSVVPVTATRFAISHLGLKIKTRWYPWYSAGQVGGWSEVYEGLTFASVRGAGHEVPLFQPRRAFRMFRSFLAGEPLPKS

SEQ ID NO: 37689 - protein, 481 aa, Zea mays subsp. mays
MATTRPRGGGGAASGALVMAIVVLLLLPPYGAGAEECEDGGMSTRARAGDRVEALPGQPAVAFAQYSGYVAVDRDRGRALFYWLTEAVGDDAAAKPLVLWLNGGPGCSSVAYGASEEIGPFRIKPNGTGLFLNKYSWNREANLLFLESPAGVGFSYANTTSDLKTSGDERTAQDALQFLVSWMSRFPQYRHRDFYIAGESYAGHYVPQLARKIVEYNEASPHPFINLKGILVGNAVTDNYYDNIGTVTYWWTHAMISDRTYKAILRWCNFSSSSISRPCNRAMSYAMNHEFGDIDQYSIYTPSCAAAAARANATVLRFKNTLVRRRRSSGYDPCTETYAERYYNRMDVQRAMHANTTGIPYRWTACSDVLIKTWQDSEFSMLPTYKKLMKAGLRIWVFSGDTDSVVPVTATRFAISHLGLKIKTRWYPWYSAGQVGGWSEVYEGLTFASVRGAGHEVPLFQPRRAFRMFRSFLAGEPLPKS

SEQ ID NO: 37690 - protein, 463 aa, Zea mays subsp. mays
MAIVVLLLLPPYGAGAEECEDGGMSTRARAGDRVEALPGQPAVAFAQYSGYVAVDRDRGRALFYWLTEAVGDDAAAKPLVLWLNGGPGCSSVAYGASEEIGPFRIKPNGTGLFLNKYSWNREANLLFLESPAGVGFSYANTTSDLKTSGDERTAQDALQFLVSWMSRFPQYRHRDFYIAGESYAGHYVPQLARKIVEYNEASPHPFINLKGILVGNAVTDNYYDNIGTVTYWWTHAMISDRTYKAILRWCNFSSSSISRPCNRAMSYAMNHEFGDIDQYSIYTPSCAAAAARANATVLRFKNTLVRRRRSSGYDPCTETYAERYYNRMDVQRAMHANTTGIPYRWTACSDVLIKTWQDSEFSMLPTYKKLMKAGLRIWVFSGDTDSVVPVTATRFAISHLGLKIKTRWYPWYSAGQVGGWSEVYEGLTFASVRGAGHEVPLFQPRRAFRMFRSFLAGEPLPKS

SEQ ID NO: 37691 - DNA, 420 bp, Zea mays subsp. mays
atgtgtgctggtgaatgtgagtacagggaagcagcggccgccatttcagggagcttgtcgacgctgtcgcaggggtggatcctgagctgccgaagccgccgtcctgctctcccgcgtgggcttctctaattccattgttttttttagattctctcgggcctagccgtccttggaacccgatattcgggctgggcggttccgcggcctgggcctaggggcttaacagtagcaacagaagcggcggcggcggcagcagcagcagcagcaatctcttcccgaacacgagcaccacaggcgcccgaaggccggaacaggcgtttagagaaaatggcagacgatattgatattgaagcaatgcttgaggctccttacaagaaggatgagaacaagttgagcagtgccaacggccatgaagaacgt

SEQ ID NO: 37692 - protein, 42 aa, Zea mays subsp. mays
MCAGECEYREAAAAISGSLSTLSQGWILSCRSRRPALPRGLL

SEQ ID NO: 37693 - protein, 31 aa, Zea mays subsp. mays
MADDIDIEAMLEAPYKKDENKLSSANGHEER

SEQ ID NO: 37694 - DNA, 543 bp, Zea mays subsp. mays
aattcttccagctttttgttggaagatgtctacagaaacccaggcccgctccagtttgaaggaccaggtgccgattcaaagcctatttcattgtgcgttgaggatcaagactatatgggcagaataaaaaagttgcaggaatacttggagaaggtgaagaggattgtgaagcctgggtgctcgcaggatgttcttaaagcggcgctgagtgccatgtcttctgtgacggaaacactgaacatcatgacttcatcttctaccggccagactccactgagtcattaggtaccatttcatggtatggatcataatccccacttttttcagtggtggcgattaacgagtttaggaacagcaaccctggtatcatacgggttattcttttgtagccttttggagagttctatcggttttggattcggtagtttatgaaggcttgttgatgagtttgagctcgaatagcttttgaaacagccggatgatgccatctttaataaaccaaattctgtgactgcattcacatttctgtcagttacctgagtc

SEQ ID NO: 37695 - protein, 94 aa, Zea mays subsp. mays
NSSSFLLEDVYRNPGPLQFEGPGADSKPISLCVEDQDYMGRIKKLQEYLEKVKRIVKPGCSQDVLKAALSAMSSVTETLNIMTSSSTGQTPLSH

SEQ ID NO: 37696 - protein, 56 aa, Zea mays subsp. mays
MGRIKKLQEYLEKVKRIVKPGCSQDVLKAALSAMSSVTETLNIMTSSSTGQTPLSH

SEQ ID NO: 37697 - DNA, 586 bp, Zea mays subsp. mays
atgttctgctgtcttgatgagctctacccgaaccacagaggccgtgcatgtcccggagggcgaccgtgcaggagcagatatcctcgcccttcatggactcgccgccgccgcacctcgacgcccccttcttcggggccgatctgatcccctccggccgcctccgtcggatgcgcgggtaccgctactcccccggaggcctcgaggaagagataatgatgtttcagacaagagttttactgggaggaatgaacatgtacgatcgctaccaggattggcgccttgatgtagataacatgacatacgaggagttggtcgagcttggagacagaattggatacgtcaacacagggctacgtgaggacgagattgctcgcagccttaggaaggccaagcacccatccttcggttccttgcgattcgcagcagaagtggaaaggaaatgcactatttgccaagaagaatttcagtcaaatgaagagatgggaaggctagtctgtggccatagctaccatgtgttgtgcatcaagcagtggctctctcagaagacacttgcccggtttgcaaactgccgtcagcaagaatgaaa

SEQ ID NO: 37698 - protein, 178 aa, Zea mays subsp. mays
MSRRATVQEQISSPFMDSPPPHLDAPFFGADLIPSGRLRRMRGYRYSPGGLEEEIMMFQTRVLLGGMNMYDRYQDWRLDVDNMTYEELVELGDRIGYVNTGLREDEIARSLRKAKHPSFGSLRFAAEVERKCTICQEEFQSNEEMGRLVCGHSYHVLCIKQWLSQKTLARFANCRQQE

SEQ ID NO: 37699 - protein, 163 aa, Zea mays subsp. mays
MDSPPPHLDAPFFGADLIPSGRLRRMRGYRYSPGGLEEEIMMFQTRVLLGGMNMYDRYQDWRLDVDNMTYEELVELGDRIGYVNTGLREDEIARSLRKAKHPSFGSLRFAAEVERKCTICQEEFQSNEEMGRLVCGHSYHVLCIKQWLSQKTLARFANCRQQE

SEQ ID NO: 37700 - protein, 138 aa, Zea mays subsp. mays
MRGYRYSPGGLEEEIMMFQTRVLLGGMNMYDRYQDWRLDVDNMTYEELVELGDRIGYVNTGLREDEIARSLRKAKHPSFGSLRFAAEVERKCTICQEEFQSNEEMGRLVCGHSYHVLCIKQWLSQKTLARFANCRQQE

SEQ ID NO: 37701 - DNA, 986 bp, Zea mays subsp. mays
aaaattcaccgtccacgttccatatggcttcctgcaggatggcactcctccttggcttgctgctgctagtagtagcttcgcccgcgatcgctgatgacgactccggtatctactaccagctggctcttatgtggccaggagcatactgcgagcagaccagcgctgggtgctgcaagccgaccaccggcgtctcgccggcgcgcgacttctacataacgggcttcaccgtccttaacgcgaccacgcgacgctgcagtgacgggatgcagcaacaaagttccttacgaccctaacctgattaccggcatccaaggcctgaatcagtactggagcaacatcaggtgccccagcaacaacgggcagagcagctggaagaacgcctggaagaaggccggcgcctgctccggcctcagcgagaaagactacttcgagactgccctctccttccgtaggccgatcaacccactcgttcgcctcaaagccaaaggtatcgagccggacttcgggctctacggcctcaaggcgatcaccaaggtcttcaagagcggcatcaacgcgacgccggtgatccagtgcagcaagggccccttcgacaagtacatgctgttccagctctacttctgcgcggcggggaacggcacgttcatcgactgccccgcgccgcagcagtacacctgctccaaggagatcctcttccaccccttcaagaagtggatgctcaagcagcagctcaaccaggacgacgaccctttccagctgcctggcgtcgcatggacaactgatacaccgtaccgtcgtctctgtttgcgtttctgtcaagtgtgcatggaataatactgtaactgtgtttcctgccgggcaatgactgtgatatgattgcccaacgaataaatgtcgcttttatttttattcgacttcccccctgtaccgtgtggaaataaacctattataagcatcgtgttgaaactcatgatatgcatgagcag

SEQ ID NO: 37702 - protein, 96 aa, Zea mays subsp. mays
NSPSTFHMASCRMALLLGLLLLVVASPAIADDDSGIYYQLALMWPGAYCEQTSAGCCKPTTGVSPARDFYITGFTVLNATTRRCSDGMQQQSSLRP

SEQ ID NO: 37703 - protein, 89 aa, Zea mays subsp. mays
MASCRMALLLGLLLLVVASPAIADDDSGIYYQLALMWPGAYCEQTSAGCCKPTTGVSPARDFYITGFTVLNATTRRCSDGMQQQSSLRP

SEQ ID NO: 37704 - protein, 84 aa, Zea mays subsp. mays
MALLLGLLLLVVASPAIADDDSGIYYQLALMWPGAYCEQTSAGCCKPTTGVSPARDFYITGFTVLNATTRRCSDGMQQQSSLRP

SEQ ID NO: 37705 - DNA, 3020 bp, Zea mays subsp. mays
aagcatatagagctatttaccaaagccagagccatgatagcactcgtggttgcactgttatcctgggtggtcactccatgttccaattaaatttgtaataaaattatcttaaccatcgggttaatgtcataattgccaattaacatttttggaacattaagaccaattaaagagtgacattaagaatcattaagttgagcggtagcatgaatcttgcacagcttaattattttcccaggttaaacaaggaatacaggtagtaaatctaggaaatccttaattaggtacatcccatcaaattatgcaatatatcaaaaaggtaaacattattatatgcagtgaataggtacaaacagaatatgcagagggagaatccacttgccttgcacaaaatcgtcctgcgtgtcgtcttcaaaagtatttgggtcctctaccacacaatcagtttctaatagcgtcgcacatcgtacatacaaaagaaaacattcaccaataaataaacatacaccattacataggtgaagcatacatcatacaataaaacatacatttaaacaaatcacatttataagaaggaatgcaaaacatgatttgtatctaccctataaatcttaaccatatcagcgatcaatttatttgctatgactaactactttgtttcattatcttactagaaaacttgtatgacaattcgactatggatatgcatactatataaattcatttaaaatcatagatacaactttaacccaaattctagggaatctagtttatttactaaataattatctctatcgtaaaacacgggtcacattctagttttagtctttctttctaaaaggaaattatatcaattgttaaaatattatttataaatcacataaccatagtattaaagaactaaattaaactacaaattttatctctactatttagattacgttggactatattgtttcaacgtcaataaaatatttactatttcttagcgaataaccaatataattatattgcgcatgagcgtgcgagtcttgtctataagtcagaatcataatgtaagcaacggtgaacgcatacttatttatctagcgctttttgttactaatatgtagtctacctattccttagtcctttactccaacaaaccataattaaattaattctcaatgggtataaccaaattaaaatgcacaaactcgaaagacagcagagacactaactaaaatatcttatcacatacacatgaagttaatcgttccacatacacatgatttggattccaaaatatacaaatttaaaaataatgaatcgctgcaggggttagatatcttattcaacttatacttcagggggtagactagaagatcgccttcttctaccactggaatgcacataccagagaagcagggagccacgaccgtggggctttgggcacgaagaagggacaaccagacggctttggcgcgtgacacggcacagcacgagcacgaaggcccaggagaggcagggacggcctcgggtcgtcgaacggagcaggggatgacgtcgaggcggccacgggcgtcacgacgagctgcttgccggcgacaaagaatagaggcgaccaacagaggaatgaaatgcgtgggcgcgagctcaaagtggtcgggaactggcgctcggtattaccttaaatagagagaagagagggaggacgccgggagagggagaggcgcggcaaccggcgccatgaacggccatcaatggcgccatttccacgctggccttcaatggggcgcgaatgaaaggggagaggaagataacgggcggccgttacagcgcggggatggggcacgtggggccgagcgcggacgccggggcgcggtcgccggggcgtcggggctagcggcgacgcagctccaagcgcgagcgcaggcccgtgcggcggctggagtgggggccgagtgggccccgcccgtaagggacagagagggggggaatttagggcaggggcgcggcgcgcggctgggccattcgcgggccgcctcggctgggccggattcggactgaccgagggtttggttttcttttcttttttttctttcaaatataaatgaatatatatttaaaatatttggaaaatccaaaataaatcataataatatttagaacttaaatataatatttaatactaattaatctgttttcacggtaaaagaatagattcatcagtcaaatactagtaaacaaaaatctatgctccatatattaatacaccaaacacttgattcaaattttaaatttaccttctactaaacttaacaactagtaacacattattttaattgatggatttgaggtgctacacataccgagggatgttgccgagcactcgctggatatccgagctagagcccgacccgtgaagcagcctctgcgccgattcgacgaagaaaagcgcagagccataggcgaggagatccacaagctgatggctgcggggttcatcaaagaggtattccatcccgaatggttagccaaccctatgcttatgaaaaagaaaggtgggaaatggaggatgtgtgtagactacactggtctaaacaaagcatgtctaaaggttccctaccctctgcctcgcatcgatcaaatcgtggattccactgctgggtgcgaaaccctgtcattcctcgatgcctacacaggttatcaccaaatcaagatgaaagagtccaaccagctcgcgacttctttcatcacaccttttggcatgtactgctatattactatgccatttggtttgaggaatgcagatgctacataccaaaggtgcatgaaccacgtgttcggagagcacatcggccgaacggtcgaggcttacgtcgatgacatcgtagtcaagacgaggaaagcctccgacctcctctctgaccttgaaacgacattcaagtgtctgagggcgaagggcatgaaactcaatcctgagaagtgtgtcttcggagtccctcgagggggggcccggtacccaatttgttaaacac

SEQ ID NO: 37706 - protein, 181 aa, Zea mays subsp. mays
MAAGFIKEVFHPEWLANPMLMKKKGGKWRMCVDYTGLNKACLKVPYPLPRIDQIVDSTAGCETLSFLDAYTGYHQIKMKESNQLATSFITPFGMYCYITMPFGLRNADATYQRCMNHVFGEHIGRTVEAYVDDIVVKTRKASDLLSDLETTFKCLRAKGMKLNPEKCVFGVPRGGARYPIC

SEQ ID NO: 37707 - protein, 163 aa, Zea mays subsp. mays
MLMKKKGGKWRMCVDYTGLNKACLKVPYPLPRIDQIVDSTAGCETLSFLDAYTGYHQIKMKESNQLATSFITPFGMYCYITMPFGLRNADATYQRCMNHVFGEHIGRTVEAYVDDIVVKTRKASDLLSDLETTFKCLRAKGMKLNPEKCVFGVPRGGARYPIC

SEQ ID NO: 37708 - protein, 161 aa, Zea mays subsp. mays
MKKKGGKWRMCVDYTGLNKACLKVPYPLPRIDQIVDSTAGCETLSFLDAYTGYHQIKMKESNQLATSFITPFGMYCYITMPFGLRNADATYQRCMNHVFGEHIGRTVEAYVDDIVVKTRKASDLLSDLETTFKCLRAKGMKLNPEKCVFGVPRGGARYPIC

SEQ ID NO: 37709 - DNA, 1499 bp, Zea mays subsp. mays
gcgatctcagctcccaaccaaccttcatcaatccagtaccatcggaagcgtacatgcatacataccatacgtccataccatacggccggaccacgcccagcaaccaatcaataatactcctagtccgccaccagtcgctccgcctcggcgccatcgcacggaaagcttgctgttgctggcgacctcgcggcggggcgccggagcagccatgcctataaaatccgggcgagagcacccacccattcgtaccctatcagccgcctcccctgcctccggtcctctcccgcctctctctctctcttgcacacacacgacgtcgtacgcggcagctagcagcacgcacgatcgatcgccacagcgtacgtactagcacagaggacgacgaccgacgccatggcggcctccttccgcgcggcggcgtggcagcggcggcggcgacggcgctggtgatggtggcggcggtgctggcggtgtcgtgggccggcgtggcccgcgcggacttcgcccaggaccgcgccatgtgcgcggaccggctgatggggctggcgacgtgcctgacgttcgtgcaggacaaggcgacggcgcgcgcgccgacgcccgactgctgcgcggggctcaagcaggtggtggccgccagcaagctgtgcatgtgcgtgctggtcaaggaccgcgacgagccggcgctggggttcaagatcaacgtcacccgcgccatggacctgccctcgctctgcagcaaccccgccaccttctccgactgccccaagatcctgggcatgtcgcccgacgcccccgaggcggagatcttcaaggagtacgcgaagaagcacgagagcaacaacggcaccaccattcctgccgctgcaaccggcgccgccgcggcgaccgggaagagcacgagcgcggcgccgacggcggacggcgccgggaggcagcccggcacggtcttcttctacgtcgtgtcggcgctgctcgtctccgtcgcggtcctgctgtgctgatggcttaacggccggccgcggcagcgcatgcattcatggccggccggccggcagggagatggaggtgctactgcacgctgcacgactggaaggaagcccggagacacaattcaagtctttgagatgagcaaactaaaggacacgagtactcttttttttttctctttcctgtagcctttttgtgtgtgtgtggcgtgttgtggggagtttgtgagacgtcggcttgtgctagtgctgacggtgcaccagcgacgcagctctgtacttcccagctgttgggctgtggccttccagcctggggattttaatgtggtggcccgggactgccgacctgtctgtctgaatctgatgattctgacccattatgttggcacttggcacattgtatgtttggtttctttggttttagttctcgtcttcttgcttttttttatttaaagtaatttctgtaagcaacatgatgcatgtaactagaaggacctttgtttgtatacgctc

SEQ ID NO: 37710 - protein, 183 aa, Zea mays subsp. mays
MVAAVLAVSWAGVARADFAQDRAMCADRLMGLATCLTFVQDKATARAPTPDCCAGLKQVVAASKLCMCVLVKDRDEPALGFKINVTRAMDLPSLCSNPATFSDCPKILGMSPDAPEAEIFKEYAKKHESNNGTTIPAAATGAAAATGKSTSAAPTADGAGRQPGTVFFYVVSALLVSVAVLLC

SEQ ID NO: 37711 - protein, 160 aa, Zea mays subsp. mays
MCADRLMGLATCLTFVQDKATARAPTPDCCAGLKQVVAASKLCMCVLVKDRDEPALGFKINVTRAMDLPSLCSNPATFSDCPKILGMSPDAPEAEIFKEYAKKHESNNGTTIPAAATGAAAATGKSTSAAPTADGAGRQPGTVFFYVVSALLVSVAVLLC

SEQ ID NO: 37712 - protein, 154 aa, Zea mays subsp. mays
MGLATCLTFVQDKATARAPTPDCCAGLKQVVAASKLCMCVLVKDRDEPALGFKINVTRAMDLPSLCSNPATFSDCPKILGMSPDAPEAEIFKEYAKKHESNNGTTIPAAATGAAAATGKSTSAAPTADGAGRQPGTVFFYVVSALLVSVAVLLC

SEQ ID NO: 37713 - DNA, 1378 bp, Zea mays subsp. mays
ttacctagaacatcctaatcgaaaaaatataatatcgacggcgactgccgactggcttggttggctcgtggtcgctttgcccatctgatgatctcccgctagcttccttcttgctactcccgcagtccccagtccccacccgctgcgccctcgccatggatccgagctccgaaatcatactggacactccatacttccgcatctacagcgaccgccgcatcgaccgcttgatgggcaccgaaacggtgccggccggctttgatcccagcaccggcgtcacctccaaagatgtcgtcatagacagcgacgccggcctctacgtccgcctctacctcccgctcccggacacggtggctgccgccgcgtcaccaccgcccagcgttaacgacagcaagaccaagctcccggtgctggtctacttccacggcggcggcttcgtcacgcagtcggcagcgtctccgatctaccagcgcctcctcaacgcgctggccgcgagggccggcctgctcatcgtgtccgtgaactaccgcctcgcgccggagcacccgctgccggcaggctacgaggactccttccgcgcgctggagtgggtggcggcctccggcggggacccctggctgtcgcgccatggcgacctgcgccgcgtcttcctggccggcgacagcgccggcggcaacatcgtccacaacgtcgccatgatggccgccgcgtcggggccgcgggtcgagggcgccgtcctcctgcacgccgggttcgggggcaaggagcccgtcgatggcgaggcgccggcgtctgtggcgctgatggagaggctgtggggcgtcgtgtgccccggggcgacggacggcgtggacgacccgcgggtgaatcccttggccgccgcggcgccgcccaggcccagcctgcgggacatgccgtgcgagagggtgctcgtgtgcggggcggagctggactccctgctgccgagggacagggcctactacgaggccctcgcggcaagcgggtggagcggcacggtggagtggttcgagtcccagggccaggaccacgtcttcttcctcttcaaacccgactgcggtgagtccgtggcgctcatggatcgactcgtcgcgttcttcgctgcgaactgaaattcgtcatgtgcactcagtgttttatacatagtagttattgccgaggttttcaaatatgtaaaagtgccctataatttgaaaataggtatattttatataatatagggcaccaataaaatatctcgctgttgaaatgtcaaatctagattacagagcagtatgatgtagtatatttaagagcttgaaaaggtattttatatttttttaccaaattttatgaaacaagttattgttggagttgtttt

SEQ ID NO: 37714 - protein, 324 aa, Zea mays subsp. mays
MDPSSEIILDTPYFRIYSDRRIDRLMGTETVPAGFDPSTGVTSKDVVIDSDAGLYVRLYLPLPDTVAAAASPPPSVNDSKTKLPVLVYFHGGGFVTQSAASPIYQRLLNALAARAGLLIVSVNYRLAPEHPLPAGYEDSFRALEWVAASGGDPWLSRHGDLRRVFLAGDSAGGNIVHNVAMMAAASGPRVEGAVLLHAGFGGKEPVDGEAPASVALMERLWGVVCPGATDGVDDPRVNPLAAAAPPRPSLRDMPCERVLVCGAELDSLLPRDRAYYEALAASGWSGTVEWFESQGQDHVFFLFKPDCGESVALMDRLVAFFAAN

SEQ ID NO: 37715 - protein, 299 aa, Zea mays subsp. mays
MGTETVPAGFDPSTGVTSKDVVIDSDAGLYVRLYLPLPDTVAAAASPPPSVNDSKTKLPVLVYFHGGGFVTQSAASPIYQRLLNALAARAGLLIVSVNYRLAPEHPLPAGYEDSFRALEWVAASGGDPWLSRHGDLRRVFLAGDSAGGNIVHNVAMMAAASGPRVEGAVLLHAGFGGKEPVDGEAPASVALMERLWGVVCPGATDGVDDPRVNPLAAAAPPRPSLRDMPCERVLVCGAELDSLLPRDRAYYEALAASGWSGTVEWFESQGQDHVFFLFKPDCGESVALMDRLVAFFAAN

SEQ ID NO: 37716 - DNA, 986 bp, Zea mays subsp. mays
attcccgctcgctacggccccagtcgcgctcctcaccggccggcaccaccccgcccgccctcgccttttgcctgcccagatttaggcctggcattctagcaatgcagaagaagtgatcttataatcataaaagataacaatggggatatccaaggtgaccggcattgctgcgacagcttttcttgtcacatctgttggtctgtaccagctcggcatgagaattgttgtgcttcctttcctagccaccagtattgttgcttctgttgtcaccgttgcatcccatgatgccatcaacctaccgtggatcctggggaagaactcagtgggaaggtttcctctttggtcagttatactgtttggtcctttcttgacgcttgctcggacatatgcaatggttaagagatacatgaggaaagagtccgtgtatgacaagattgtggaagacctatatcttggaggatggccctttctcttgaaacatttaccccctggaaacccatctgtcatagactgcacttgtgagcttccaagaagttccttcgttccagcagacgagtatctttgtcttgcaacttgggataccagagctccaacaccataccaaattgaaaaagctgcacgttgggcttgtggaaagagatctgaggggaagccggtttatgtccattgcgcatttggtcatggaagaagtgcttgtgttgtgtgtgcaattctagtagcgctgggcattgctgagaactggaaagatgctgagaacatcatccgtgaaagaagaaagataaaaatgaacgcccttcacaggaaaaccttagatgagtggtccaaacaacgagattttcagaaaaaggataagtagttgactagttgtaagtgtaacattttccttagtgatgaacttgtttgtggtgttaaagcctgtttgaaacatcaatggcatatttacttaagacaagtgtaatgtctgtgaaattattatttaaattttt

SEQ ID NO: 37717 - protein, 238 aa, Zea mays subsp. mays
MGISKVTGIAATAFLVTSVGLYQLGMRIVVLPFLATSIVASVVTVASHDAINLPWILGKNSVGRFPLWSVILFGPFLTLARTYAMVKRYMRKESVYDKIVEDLYLGGWPFLLKHLPPGNPSVIDCTCELPRSSFVPADEYLCLATWDTRAPTPYQIEKAARWACGKRSEGKPVYVHCAFGHGRSACVVCAILVALGIAENWKDAENIIRERRKIKMNALHRKTLDEWSKQRDFQKKDK

SEQ ID NO: 37718 - protein, 213 aa, Zea mays subsp. mays
MRIVVLPFLATSIVASVVTVASHDAINLPWILGKNSVGRFPLWSVILFGPFLTLARTYAMVKRYMRKESVYDKIVEDLYLGGWPFLLKHLPPGNPSVIDCTCELPRSSFVPADEYLCLATWDTRAPTPYQIEKAARWACGKRSEGKPVYVHCAFGHGRSACVVCAILVALGIAENWKDAENIIRERRKIKMNALHRKTLDEWSKQRDFQKKDK

SEQ ID NO: 37719 - protein, 154 aa, Zea mays subsp. mays
MVKRYMRKESVYDKIVEDLYLGGWPFLLKHLPPGNPSVIDCTCELPRSSFVPADEYLCLATWDTRAPTPYQIEKAARWACGKRSEGKPVYVHCAFGHGRSACVVCAILVALGIAENWKDAENIIRERRKIKMNALHRKTLDEWSKQRDFQKKDK

SEQ ID NO: 37720 - DNA, 513 bp, Zea mays subsp. mays
catttttcctccgttccattcttctcttctctcctcgcctcccctcttgaaccctccgccgctccgaggaaaatccgatttgaattgaaaatcatccggagacagagatcttttcttcctcgaagctatcttctctctcgactcgatccatagctgctcgcgtccctgttcctcgccggctggcaagtggcggcgacgggacgaggtcttcatcgcctcctcgcgagcgacgatcacccactagtttggtcggtctgaggcacatgatgatggccaacgcgaagctccacaagcaggccctgctgccgccgcggagccccttcccgacggcggcgccgtacgccgaccgcggcccaatcgcgcggccgcaggttggcgccacgcaccaccgccacggccaccaccagcgcacgtcgtccgagagcttcatcgaggagcagccgccgtcgtggctcgacgacctgctcaacgagccagagacgcccgcggcgcggcagagcggccgggctgggc

SEQ ID NO: 37721 - protein, 83 aa, Zea mays subsp. mays
MMMANAKLHKQALLPPRSPFPTAAPYADRGPIARPQVGATHHRHGHHQRTSSESFIEEQPPSWLDDLLNEPETPAARQSGRAG

SEQ ID NO: 37722 - protein, 82 aa, Zea mays subsp. mays
MMANAKLHKQALLPPRSPFPTAAPYADRGPIARPQVGATHHRHGHHQRTSSESFIEEQPPSWLDDLLNEPETPAARQSGRAG

SEQ ID NO: 37723 - protein, 81 aa, Zea mays subsp. mays
MANAKLHKQALLPPRSPFPTAAPYADRGPIARPQVGATHHRHGHHQRTSSESFIEEQPPSWLDDLLNEPETPAARQSGRAG

SEQ ID NO: 37724 - DNA, 1216 bp, Zea mays subsp. mays
gaacaaataaaaatatataattaatttagtgcacacggagtggggaaacgaaaaggaaagctctctcattgccaaattgcccccgactcaagccccccgcgccgccggcgttggtggaatcgatcgacccggcctcgccggacaatccaccagcgttggtttcacctcaggtttttgtgcatggaagatgacaatgaggtcactggagagtcacctgtggctgatgaatgggatatgttgtccctgacttcatcaatatatgctagcccattattccgaagaggatttgatccaattaatttgcctggatatgggaatgtgattaatattcaggaaggcacacaaactggattagtcatgtcagatggcttcgtgttccctccaagtgagcatgaaaatttgccaatagaaccagagcatgaggatttgccaatagaaccagggcatgatgaatcaaatacaaacagcgttgaaaaggaaagtagttgtgctggaaataacgatgatgactggtgtcatgtttcacctgaagaaatcgatgacgtaagtaatgaaaatctagctgacaacagtgacttgcctactgccagtgaagctacggtaccagattcccagcctacagaaataaatgctaagcgagagaaagatcataggacatgcaaggctgatcatacttgtgaaagatggtggaaaaagaaaaccacgtatctatttcatcatataaaaggagtgactacactctgctcagttgtggcagctggtgctgttgttggttttgttgtaatgggtcagaggtggcagcaggaccattggcaccttcatcaatttaagttcagtgtcagcggtgagagcatgaatcgagtcattggagcattcagtcgtttgaaggatgggcttcctgggagtgagcaactaagatctatgctgccgactcgcgtactcccacaacagccgctgagcgcttgagtacatgcaccaaattttggtgggctgcttctagtgtcaatttttgttgcttatatgatcttgagaaagttcattctttttcttgtgctacttgattttatgttactgtaaattagtggtcgagacttctcacggtgctgttctttaaaacatagcaaccgtgaagggacatggtggaaacacagagggcactataacaatatgtatccaaaaaaaaaaaaaaaaaaattcgataccgtcgacctcgagg

SEQ ID NO: 37725 - protein, 261 aa, Zea mays subsp. mays
MEDDNEVTGESPVADEWDMLSLTSSIYASPLFRRGFDPINLPGYGNVINIQEGTQTGLVMSDGFVFPPSEHENLPIEPEHEDLPIEPGHDESNTNSVEKESSCAGNNDDDWCHVSPEEIDDVSNENLADNSDLPTASEATVPDSQPTEINAKREKDHRTCKADHTCERWWKKKTTYLFHHIKGVTTLCSVVAAGAVVGFVVMGQRWQQDHWHLHQFKFSVSGESMNRVIGAFSRLKDGLPGSEQLRSMLPTRVLPQQPLSA

SEQ ID NO: 37726 - protein, 243 aa, Zea mays subsp. mays
MLSLTSSIYASPLFRRGFDPINLPGYGNVINIQEGTQTGLVMSDGFVFPPSEHENLPIEPEHEDLPIEPGHDESNTNSVEKESSCAGNNDDDWCHVSPEEIDDVSNENLADNSDLPTASEATVPDSQPTEINAKREKDHRTCKADHTCERWWKKKTTYLFHHIKGVTTLCSVVAAGAVVGFVVMGQRWQQDHWHLHQFKFSVSGESMNRVIGAFSRLKDGLPGSEQLRSMLPTRVLPQQPLSA

SEQ ID NO: 37727 - protein, 202 aa, Zea mays subsp. mays
MSDGFVFPPSEHENLPIEPEHEDLPIEPGHDESNTNSVEKESSCAGNNDDDWCHVSPEEIDDVSNENLADNSDLPTASEATVPDSQPTEINAKREKDHRTCKADHTCERWWKKKTTYLFHHIKGVTTLCSVVAAGAVVGFVVMGQRWQQDHWHLHQFKFSVSGESMNRVIGAFSRLKDGLPGSEQLRSMLPTRVLPQQPLSA

SEQ ID NO: 37728 - DNA, 2309 bp, Zea mays subsp. mays
ccagcctctcctagccgaggccaaaacccccataccaacacacacttcgcttctcgctgcctccgcggcggcgcgccgctccgctccgagccctcttcctcctcctcctctgcccgttcggtctagaatgttctactcgcatcagcttctcgcgcggaaggcgccgctcggccagatatggatggcggcgacgctccactcgaagatcaaccgcaaacggctcgacaagctcgacatcatcaaaatctgtgaggaaattttgaacccctcggtgcccatggctctgaggctctctggaatcctcatgggtggcgtggtgatcgtgtacgagaggaaggtgaagcttctctacactgatgtctctcggcttctgactgagatcaacgaggcatggcggatcaaaccggtcacagaccccaccgtcctccccaagggtaaaactcaagccaagtatgaagcagtaacactgccagagatcaatatggtggtggaacagcccatgtttttctcagagcctgatggtgccaagttccgacgaatgggattggaagatctggatgaacagtatgttcaagtcaatcttgatgatgatgacttctctcatgctgatgatcgtcatcaagctaaagcagtgaatataaccctggtcgataattttgagtctgggcttgcagaaactgatttattcaatcactttgagagatttgacatagcagatgatgagaccacagtcaatatcactcctgatgagtacccacaagttccaagtacgctgattccgtcaccacctaggcaggaagacattcctcaacaagaataaccgtactacgctgccccctcccctgttcatggagaacctcaacaagggggaccagaggaccaagaggaacagaagatgaagcaaccaccgaaagcatcaaagcggaaagcacgttgggaagtcccacgagtaattatggacaataaccagatgatgatcccaggaaacatatatcagacatggctgaaggatgcatcaagccttgtctcaaaaaggcgtaaacttaacagcaattttaattttattcgatcaaccaagataagtgatctcatgcacatccccccggttgctctaatatctcatgacaacttgttctcagaattatgttatcctaagccacttatgcagctctggaaggactgcactgaggtcaagtccacaaaagcttcttcaggagggcagcgatcatcatcacaagaaccacaaccgaaaaactcaccacctcaggctgggggagagtatgagatggaaacaggtggtctgccgatggatttaacagatggcattgaaaaactcagggcaaacatgagtgcaaaatatgacagagcttacaatattcttcacagtgaccatagtgttactcctggaagtcctgggttaagtcgcaggtctgcttcaagctctggtggctctggatcggcgtttatacaattggatccagaagtacaattgccatcaggaagtggaaggtccaaaagggggcagcattcatctgcaagaagcttggggaatcttgatactgttgaggaagattttccactggagcaggaagtgagggacttcaagatgagaaggctttcagattatgtgccaactcctgacctactggaagaaactgaaccgactcaaaccccatatgagaggcgctccaatccaatggacaagatcacagaaacaatccagtcgcatctcaaacttcatttcgataccccaggtgtcccacaatctgaatccttaagtcatttagctcatggaatgaccaaagccagggcagcccgactattctatcaaatagctgttttggcaacttgtgattacatcaaggttactcagctggaacggaaaggagatgaactgtacggagacatcttgatctccagaggattaaagatgtgacttggtgatgttggaaacaattttgctgcggtggttcccggtgcacatctcgtgtttatattacagaatgcttacatattgcataggatgtcttgtagttaacacataatctatacatggtgatctggtgaaagaaagggagcgagatatgaggcagtagttttgtgttatgtggcaagcaaaattctaagctgttattttagaggtttcataatttaagtacgaacatgtgttatactattatgaaactaagttgtcctgaaagcacttactgaaagggagaaatttacatggtaccttgtcaacgatgaaacatacatcggaggacaacataaagatgcacactgtatcctgctcttcggctgcttcatgt

SEQ ID NO: 37729 - protein, 346 aa, Zea mays subsp. mays
MKQPPKASKRKARWEVPRVIMDNNQMMIPGNIYQTWLKDASSLVSKRRKLNSNFNFIRSTKISDLMHIPPVALISHDNLFSELCYPKPLMQLWKDCTEVKSTKASSGGQRSSSQEPQPKNSPPQAGGEYEMETGGLPMDLTDGIEKLRANMSAKYDRAYNILHSDHSVTPGSPGLSRRSASSSGGSGSAFIQLDPEVQLPSGSGRSKRGQHSSARSLGNLDTVEEDFPLEQEVRDFKMRRLSDYVPTPDLLEETEPTQTPYERRSNPMDKITETIQSHLKLHFDTPGVPQSESLSHLAHGMTKARAARLFYQIAVLATCDYIKVTQLERKGDELYGDILISRGLKM

SEQ ID NO: 37730 - protein, 326 aa, Zea mays subsp. mays
MDNNQMMIPGNIYQTWLKDASSLVSKRRKLNSNFNFIRSTKISDLMHIPPVALISHDNLFSELCYPKPLMQLWKDCTEVKSTKASSGGQRSSSQEPQPKNSPPQAGGEYEMETGGLPMDLTDGIEKLRANMSAKYDRAYNILHSDHSVTPGSPGLSRRSASSSGGSGSAFIQLDPEVQLPSGSGRSKRGQHSSARSLGNLDTVEEDFPLEQEVRDFKMRRLSDYVPTPDLLEETEPTQTPYERRSNPMDKITETIQSHLKLHFDTPGVPQSESLSHLAHGMTKARAARLFYQIAVLATCDYIKVTQLERKGDELYGDILISRGLKM

SEQ ID NO: 37731 - protein, 321 aa, Zea mays subsp. mays
MMIPGNIYQTWLKDASSLVSKRRKLNSNFNFIRSTKISDLMHIPPVALISHDNLFSELCYPKPLMQLWKDCTEVKSTKASSGGQRSSSQEPQPKNSPPQAGGEYEMETGGLPMDLTDGIEKLRANMSAKYDRAYNILHSDHSVTPGSPGLSRRSASSSGGSGSAFIQLDPEVQLPSGSGRSKRGQHSSARSLGNLDTVEEDFPLEQEVRDFKMRRLSDYVPTPDLLEETEPTQTPYERRSNPMDKITETIQSHLKLHFDTPGVPQSESLSHLAHGMTKARAARLFYQIAVLATCDYIKVTQLERKGDELYGDILISRGLKM

SEQ ID NO: 37732 - DNA, 1067 bp, Zea mays subsp. mays
gcacatccatccagacatccacccaccagagccggtcgatccgttcgaaacgatccgggaaagattccacgacttgggacttctcacattcccacaccgcactgtgccactgccgccggcccgccgcactagccgttgcttcttgcttctcccttcccgttcccaaggagttgtcctcgccggcggatccggggcgccgctgcaagaggaggaaggaggaggagaggataccagaatggcgtcgcgctcggcgtccaaggatatcatcacgctgcgaggctctgccgccatcgtcagcgagttcttcgggtacgcggcgaatagcatcctctacaaccgcgctgtgtacccggaggagagcttcagcaaggtgaagaagtacgggctcaccatgctgctcacccaggacgagggcgtgaagaacttcatcgccagcctcacctcccagctctcagaatggctggaggccgggaagctgcagcggatcgtgctggtcataatgagcaaagccaccagcgaggtgctcgagcgctggaacttcaacatcgtcaccgacgccgaggtcgtcgagaagggggccatcaaggagaagagcgataaggagatcatgagggagatccaggccatcatgcgccagatcgcgtcttgcatcacctacctcccctgcctcgacgagccatgcgtgttcgacgtgctggcctacacggacacggacgtcgacgctccgggcacctgggtcgagagtgacgccaagctcatcgacaacccgcagatggttaagctgcactccttcgacaccaagattcataaggtggacacgctggtgtcgtacaagaaggacgagtgggacgaggaggagtagagtttgcaccaaaagttaccctgctgctgctagagcttggcgtgaaggctgtgtgaatcgttcattcacgtctagcgtgtactgcactaatagtatactgctactttggggggaagaaaagtgtgagacgctcctaccatttagaatttcgagattgaaatgccggttttaatataacatgagtcacctttaagatctggctgcg

SEQ ID NO: 37733 - protein, 286 aa, Zea mays subsp. mays
HIHPDIHPPEPVDPFETIRERFHDLGLLTFPHRTVPLPPARRTSRCFLLLPSRSQGVVLAGGSGAPLQEEEGGGEDTRMASRSASKDIITLRGSAAIVSEFFGYAANSILYNRAVYPEESFSKVKKYGLTMLLTQDEGVKNFIASLTSQLSEWLEAGKLQRIVLVIMSKATSEVLERWNFNIVTDAEVVEKGAIKEKSDKEIMREIQAIMRQIASCITYLPCLDEPCVFDVLAYTDTDVDAPGTWVESDAKLIDNPQMVKLHSFDTKIHKVDTLVSYKKDEWDEEE

SEQ ID NO: 37734 - protein, 208 aa, Zea mays subsp. mays
MASRSASKDIITLRGSAAIVSEFFGYAANSILYNRAVYPEESFSKVKKYGLTMLLTQDEGVKNFIASLTSQLSEWLEAGKLQRIVLVIMSKATSEVLERWNFNIVTDAEVVEKGAIKEKSDKEIMREIQAIMRQIASCITYLPCLDEPCVFDVLAYTDTDVDAPGTWVESDAKLIDNPQMVKLHSFDTKIHKVDTLVSYKKDEWDEEE

SEQ ID NO: 37735 - protein, 156 aa, Zea mays subsp. mays
MLLTQDEGVKNFIASLTSQLSEWLEAGKLQRIVLVIMSKATSEVLERWNFNIVTDAEVVEKGAIKEKSDKEIMREIQAIMRQIASCITYLPCLDEPCVFDVLAYTDTDVDAPGTWVESDAKLIDNPQMVKLHSFDTKIHKVDTLVSYKKDEWDEEE

SEQ ID NO: 37736 - DNA, 1073 bp, Zea mays subsp. mays
aaagttgtggctgcgacacaaacactgcgccatcacatacacataccatctctccaccatcctctgtccagacgaccagaccaaattaaaaggagaagcaaacagagatctggcaatctgggtgggggtgggcggcgagagagcaggaggagaagaccattgccccttgaaggcgggctccagagcgagcttctccgcgcgccctctctgtttgccttgcctgcttgcctctactcgtccggcccagccatggccaccatcctggagaccatccagaaggcgaggctcctgccgcccaggccgctcaaggacgagctgccaaccttcggcggcggcggcagagaggagagccacctcacgggcctgcggaagcggctgtccgccttctccggcaagatccagcccatctcctccgcgtcggccgagtgggcgttccgccggcgctcccggccggcgccctccctcggcgcgggaggcggcggctccctgaggcagtggtggcggcggggcgtcgtcggctggctcctgtcccggaagccggggttcgcgggcgacctcgagatgaacgaggacgaggcccgccacggccaggggcacctggggctggggccacgtcctctacagggtgcgctccggcgtccgccgcctcgtcgtgtccgcgcactcgctgcccaccacgcagaggcagtccctgccgccgccggcgcactgcaagccggcggcgctcgcccacgcgcagaggctgggcttccaccacgccggccacgccatggccactaaggagggtcgccggtcgcgccgcgccgcgctgcgcttgccggtgctgtttgcggccgatctccctccagattcggaaacggagaagcgggcgagaggcacgagaagaggaggattcaggttgcaggtaggtgcgtgagatcggtggcgaagaaatcgctgtaccgttataagtgaaaactagctcggtgaatcgatggtgaatggaatggaatggaaggtttaccatcctgtgctgtagaggtcaactggtcaagtgttgtatcatatgctcgttctttatattctttttgggt

SEQ ID NO: 37737 - protein, 259 aa, Zea mays subsp. mays
KVVAATQTLRHHIHIPSLHHPLSRRPDQIKRRSKQRSGNLGGGGRRESRRRRPLPLEGGLQSELLRAPSLFALPACLYSSGPAMATILETIQKARLLPPRPLKDELPTFGGGGREESHLTGLRKRLSAFSGKIQPISSASAEWAFRRRSRPAPSLGAGGGGSLRQWWRRGVVGWLLSRKPGFAGDLEMNEDEARHGQGHLGLGPRPLQGALRRPPPRRVRALAAHHAEAVPAAAGALQAGGARPRAEAGLPPRRPRHGH

SEQ ID NO: 37738 - protein, 176 aa, Zea mays subsp. mays
MATILETIQKARLLPPRPLKDELPTFGGGGREESHLTGLRKRLSAFSGKIQPISSASAEWAFRRRSRPAPSLGAGGGGSLRQWWRRGVVGWLLSRKPGFAGDLEMNEDEARHGQGHLGLGPRPLQGALRRPPPRRVRALAAHHAEAVPAAAGALQAGGARPRAEAGLPPRRPRHGH

SEQ ID NO: 37739 - protein, 162 aa, Zea mays subsp. mays
KLWLRHKHCAITYTYHLSTILCPDDQTKLKGEANRDLAIWVGVGGERAGGEDHCPLKAGSRASFSARPLCLPCLLASTRPAQPWPPSWRPSRRRGSCRPGRSRTSCQPSAAAAERRATSRACGSGCPPSPARSSPSPPRRPSGRSAGAPGRRPPSAREAAAP

SEQ ID NO: 37740 - DNA, 679 bp, Zea mays subsp. mays
ttctgcataagaacaacgaatcaaaagcttgatcagctcggtgccaacaaaacctcaacaaccaagtttcatgtctgatctcgacgtccagcttccatctgcctttgatccgtttgctgaggcaaatgctgaggactctggtgctggtcctggaacgaaggattatgtgcatgtgcgcatccagcagcgcaacggcagaaagagtctgactacagtccagggtctgaagaaggagttcagctataacaagatcctcaaggatctgaagaaggaattctgctgcaatggtactgtagttcaggacccagagctaggccaggtcattcagctccaaggtgatcagcgcaagaatgttgctactttcctagttcaggctgggattgcgaagaaagagaacatcaagattcacgggttctaagggacctgtaaatgcttgtgccctatattgtgtgcctccacatattggggagcttgaagcatcgacatttgctagtcattgctttacttatataagaacataagtagtatttgctattgtcaagtgtgccttgcttgatgcaagttgtgttttcgtatcattattattatgcacggccatcgtacgtgtatggcttgtatgggttattgccaacttaataaaagcggcgctcagtttgcctataagcactgatgtttgcct

SEQ ID NO: 37741 - protein, 115 aa, Zea mays subsp. mays
MSDLDVQLPSAFDPFAEANAEDSGAGPGTKDYVHVRIQQRNGRKSLTTVQGLKKEFSYNKILKDLKKEFCCNGTVVQDPELGQVIQLQGDQRKNVATFLVQAGIAKKENIKIHGF

SEQ ID NO: 37742 - DNA, 580 bp, Zea mays subsp. mays
tacactgaatgtgatgagaacagctctggatcacagtcagaagataacgaggaaaatggccagcccatggatgatgattatgaagatcaagttccagattactcaataggctattctaccggctcgaggcaccatgtaatgatgtccatgatggaccatgatagtgacgaggaggatgaagatgctgaaggtgatgagaatgtggaagaagatgcagaccttgcagttgacgatgccgatgttgagatggacgaagatgatgaaattggtgatgatggagaggatggtggcgttggaggggagatgaatgcggatgaggatccggatgctacttcatattcatccgattacagcgactaagaaagcagaaataagggaaccttatcccagattcctccctcggcatggaatgcatgtagtaccgagtaggcattccccccccgttgtgagccaaaagggagcttagatgcttaggttcgaaggagcgaggaactgttttttaggcaccgcaggttttaatagaatttctgacgcattcgacgaagtgtttggttgtaccgtggtagtgtgttactgggga

SEQ ID NO: 37743 - protein, 119 aa, Zea mays subsp. mays
YTECDENSSGSQSEDNEENGQPMDDDYEDQVPDYSIGYSTGSRHHVMMSMMDHDSDEEDEDAEGDENVEEDADLAVDDADVEMDEDDEIGDDGEDGGVGGEMNADEDPDATSYSSDYSD

SEQ ID NO: 37744 - protein, 97 aa, Zea mays subsp. mays
MDDDYEDQVPDYSIGYSTGSRHHVMMSMMDHDSDEEDEDAEGDENVEEDADLAVDDADVEMDEDDEIGDDGEDGGVGGEMNADEDPDATSYSSDYSD

SEQ ID NO: 37745 - protein, 73 aa, Zea mays subsp. mays
MMSMMDHDSDEEDEDAEGDENVEEDADLAVDDADVEMDEDDEIGDDGEDGGVGGEMNADEDPDATSYSSDYSD

SEQ ID NO: 37746 - DNA, 673 bp, Zea mays subsp. mays
acacagccaaggaaatcttccgttctcaaaccaacctaggcaattcgccgcagcctctcaccctcgcgagtcccgacctcccgcagccgccgcacagatggcacccaaggcggagaagaagccggcggccaagaagcccgcggaggaggagcccgcgacagagaaggtggagaaggctccggcggggaagaagcccaaggccgagaagcgcctcccggcgggcaagtccaaggagggcggcgagggcaagaaggggaaaaagaaggcgaagaagtccgtggagacctacaagatctacatcttcaaggtgctgaagcaggtgcaccccgacatcggcatctcgtccaaggccatgtccatcatgaactccttcatcaacgacatcttcgagaagctcgcggctgagtccgccaagctggcgcgctacaacaagaagcccaccatcacctcccgcgagatccagacctcggtgcgcctcgtcctccccggcgagctcgccaagcacgccgtctccgagggcactaaggttgttacgaagttcacctcgtcttaggatccttgtaatggtcatgtgggcgtcggcggtaggcgtggctcagtttatgtgatactgctagcgatggatgatgatgatctgcgtgtaattgaattaaagaattgtgctgatctttct

SEQ ID NO: 37747 - protein, 183 aa, Zea mays subsp. mays
HSQGNLPFSNQPRQFAAASHPRESRPPAAAAQMAPKAEKKPAAKKPAEEEPATEKVEKAPAGKKPKAEKRLPAGKSKEGGEGKKGKKKAKKSVETYKIYIFKVLKQVHPDIGISSKAMSIMNSFINDIFEKLAAESAKLARYNKKPTITSREIQTSVRLVLPGELAKHAVSEGTKVVTKFTSS

SEQ ID NO: 37748 - protein, 151 aa, Zea mays subsp. mays
MAPKAEKKPAAKKPAEEEPATEKVEKAPAGKKPKAEKRLPAGKSKEGGEGKKGKKKAKKSVETYKIYIFKVLKQVHPDIGISSKAMSIMNSFINDIFEKLAAESAKLARYNKKPTITSREIQTSVRLVLPGELAKHAVSEGTKVVTKFTSS

SEQ ID NO: 37749 - protein, 103 aa, Zea mays subsp. mays
TAKEIFRSQTNLGNSPQPLTLASPDLPQPPHRWHPRRRRSRRPRSPRRRSPRQRRWRRLRRGRSPRPRSASRRASPRRAARARRGKRRRRSPWRPTRSTSSRC

SEQ ID NO: 37750 - DNA, 861 bp, Zea mays subsp. mays
tcagaatgctcgtgtaatggtcctagctgctacaaacaggccttctgagctagatgaggccatcctaaggcgctttactcagatatttgagattggaattcccgtccagagtgaaaggaacaagatacttcaggttgtgttgaagggagaaaatgtcgagcctaatgttgattacgatcacattgcaagattgtgcgagggctttactggatcagacatcctagaggtgtgcaagcaggcagcattctaccctatcagggagctattggacaatgagagaaacgggaggaaattagataaacctagacctttgagacaatcagacttggagagagccttatcaacatctagaaagtgcaagaaggctgcaagttcaggactgcagtcacccttgtgggttcggccgacagattcagaagacgatcaggtacagaacgcgatccttgagatatctaagctgatgtctcgaatagttgagagcatccagtcagagccccaagagccttcttcaccttaatctaatcctttcgctagatcgcgtgaaaattctacagcggagtaaccgcaggcattacgtcgatacccttaggttttctttcgcagcttgcagagaggttcagcgtatatatatatatgcattaattcgttttgcttggcgagggcgcgccgggttttttgaagctaactgcagctgggagtatggtgtttaagtttattattcaagattgatgcccctgtgggctgtaagctacagcactccatagttgtccggcctacacttgcccttagtttccttgcattttatcttcagtttagctagtctagggtagcgaattatacattcatataatgcagaaaggg

SEQ ID NO: 37751 - protein, 171 aa, Zea mays subsp. mays
QNARVMVLAATNRPSELDEAILRRFTQIFEIGIPVQSERNKILQVVLKGENVEPNVDYDHIARLCEGFTGSDILEVCKQAAFYPIRELLDNERNGRKLDKPRPLRQSDLERALSTSRKCKKAASSGLQSPLWVRPTDSEDDQVQNAILEISKLMSRIVESIQSEPQEPSSP

SEQ ID NO: 37752 - protein, 166 aa, Zea mays subsp. mays
MVLAATNRPSELDEAILRRFTQIFEIGIPVQSERNKILQVVLKGENVEPNVDYDHIARLCEGFTGSDILEVCKQAAFYPIRELLDNERNGRKLDKPRPLRQSDLERALSTSRKCKKAASSGLQSPLWVRPTDSEDDQVQNAILEISKLMSRIVESIQSEPQEPSSP

SEQ ID NO: 37753 - DNA, 740 bp, Zea mays subsp. mays
atcgcaaacaagatctctaaccactgcattatttggctatagagagtgatcgcgatcgttgtagctgttggcttgtgatcgagacgagcaatggcgtccagggcgtttgcgctgttcctggccgtgaacctggtggtgctgggcgtagccagcgcctgctcgccctactgcccgaccccgaccccgaccccctcgacgccgacgacgcccacgcccacgccgtcgtcgttcggcaggtgcccccgcgacgcgctcaagcttggcgtgtgcgccaacgtgctgggcctcatcaaggcgaaggtgggcgtgccgcccgcggagccgtgctgcccgctgctggaggggctcgtcgacctggaggccgccgtctgcctctgcaccgccatcaagggccaaatcctcggcatcaacctcaacctgccaatcgatctcagcctcatcctcaactactgcggcaggaccgtgcccaccggcttcaagtgctgagctgagcgcgcctagagctcagcgccttgcgtgctcgacgtgctgcgttcgcctcccttgcatgcatattatggtttggttgcatttccacgtccgtgcggtcgtttggatctgatttgtattctccccgcctggctgctgcctctttatttgctccccgtgcatttgtcatgttgtaaagagttagccggctgtcacttgtatgccggtgatacataagttccaatcaagtttgtcttgcgctttatatttcg

SEQ ID NO: 37754 - protein, 131 aa, Zea mays subsp. mays
MASRAFALFLAVNLVVLGVASACSPYCPTPTPTPSTPTTPTPTPSSFGRCPRDALKLGVCANVLGLIKAKVGVPPAEPCCPLLEGLVDLEAAVCLCTAIKGQILGINLNLPIDLSLILNYCGRTVPTGFKC

SEQ ID NO: 37755 - DNA, 607 bp, Zea mays subsp. mays
aaacattattgcaagaaaatgaagaagtatggtgaatggggtgaccatgtcacgctacaagcagctgctgacaagtttgctgcaaagatatgtcttctaacatcattcagagatacctgttttgttgaaattgttccacaatatcaagctccacagagagagatttggctgagtttctggtccgaagttcactataactcactgtacgatgctcgagatctccctagcaaatacaagcctagaaagaagcattggttgttgttttgatatccacgcgggggtttgcttcttaatggtggaatcatattgcttgaccgcttcgaccaccggccgctggtggcagcctggtcatagctcattgtggctctatccactatatagctatgcatcaatgatccattgtattgctcggtacaactccatcacgatccaggcatacaacactagatacagttacaatgccgaacctgagccttgtgaatagatactcctttactgacatacaggttgattgtataccatgtcctatttgttcattgttatattctttatttatacagttacatattattaatcttcatcagttcattattcagttcatatttgg

SEQ ID NO: 37756 - protein, 91 aa, Zea mays subsp. mays
MLEISLANTSLERSIGCCFDIHAGVCFLMVESYCLTASTTGRWWQPGHSSLWLYPLYSYASMIHCIARYNSITIQAYNTRYSYNAEPEPCE

SEQ ID NO: 37757 - protein, 88 aa, Zea mays subsp. mays
KHYCKKMKKYGEWGDHVTLQAAADKFAAKICLLTSFRDTCFVEIVPQYQAPQREIWLSFWSEVHYNSLYDARDLPSKYKPRKKHWLLF

SEQ ID NO: 37758 - protein, 82 aa, Zea mays subsp. mays
MKKYGEWGDHVTLQAAADKFAAKICLLTSFRDTCFVEIVPQYQAPQREIWLSFWSEVHYNSLYDARDLPSKYKPRKKHWLLF

SEQ ID NO: 37759 - DNA, 1181 bp, Zea mays subsp. mays
aaacgatacacgccgcgatagaaacactcagacacaccctctccatccgcccctccaccctcctcttcctcctcccgtcgcggcttcccccgattggcatccggggcgggcccatcccccacccggccgccgcgcgcgtccatggacggcctgcacggtacggacgcctgcttctcccccgcgagggccgtctcgccgcaggtgaggctaccggggccgccggacgtgggcagtcagtacctggcggagctgctgcaggagcaccagaagctgggacccttcatgcaggtgctcccaatctgcagcaggctgctgaatcaagagagtaggtgttccgcaaggagctatgggttggcaaggacccccacagagccctgcttcttatatcgtcaagaagattttgcggttggaagtaccgacagaaacataccctaatttcaattttatcggtcgtcttcttggaccaaggggaaattctttaaagaggattgaagcctgtacaggctgtcgtgtattcatcagagggaaaggctcaattaaagattctggcaaggaggaacaactcaagggaagacctggctatgaacacttgagtgaacccctccatatcttgattgaagctgagttacctgctaatgtgattgatgcaagacttgcaaaggcacaagagatccttgaagagttgttgaaaccagtggacgagtcacaagactactacaagagacagcaactccgagaacttgccatgttgaattcgccactccgagaggagagtccacgttcaggcggtgctcctccaagtcccttcagtaagactgtctccggtaggccgaataaaacaggggacacagaattgtagatgacactatttatcactgtttgaagagagaagtttgaaataggggatctactggagatagcctaacggcggcatgaaaagagtgaaacaatgacacccattcctccatcttgatcctccggcaaccccacttagtccatgccttcacatcctattttccatgagcaaagctttcatgatggtgttggtagtgtgtgacatcctttaatgtactagcaggtgaattttgatctcccatcccatgtgacattaaccttgagtgacagatgactatgcgtagtgtatcctctatgactgtataattagaacatttgatttatct

SEQ ID NO: 37760 - protein, 170 aa, Zea mays subsp. mays
MGWQGPPQSPASYIVKKILRLEVPTETYPNFNFIGRLLGPRGNSLKRIEACTGCRVFIRGKGSIKDSGKEEQLKGRPGYEHLSEPLHILIEAELPANVIDARLAKAQEILEELLKPVDESQDYYKRQQLRELAMLNSPLREESPRSGGAPPSPFSKTVSGRPNKTGDTEL

SEQ ID NO: 37761 - protein, 108 aa, Zea mays subsp. mays
TIHAAIETLRHTLSIRPSTLLFLLPSRLPPIGIRGGPIPHPAAARVHGRPARYGRLLLPREGRLAAGEATGAAGRGQSVPGGAAAGAPEAGTLHAGAPNLQQAAESRE

SEQ ID NO: 37762 - protein, 97 aa, Zea mays subsp. mays
MDGLHGTDACFSPARAVSPQVRLPGPPDVGSQYLAELLQEHQKLGPFMQVLPICSRLLNQESRCSARSYGLARTPTEPCFLYRQEDFAVGSTDRNIP

SEQ ID NO: 37763 - DNA, 797 bp, Zea mays subsp. mays
gcctaacaaaaccttcaaggattcctggggcttgttcgcctcactctgatgttgttgcttcgtataacctgatcacataaacaatggtgaaggctgttgctgtgcttggtagcagcgatggtgtcaagggcaccatctttttcacccaagagggagatggccctaccgctgtcaccggaagtgtctctggcctcaagcctggcctccatgggttccatgtacatgcacttggtgacaccaccaatggatgcatgtcaactggaccacactacaatcctgcgagcaaggagcatggggcaccagaagatgagaaccgccatgctggtgatcttggaaacgtgacagctggagcagatggtgttgctaatatcaatgtcaccgacagccagatcccactgactgggccaaactcaatcattggcagagctgttgttgttcacgctgatcctgatgatcttggaaagggtgggcacgagctcagcaagagcactggaaacgccggtggccgtgttgcttgtgggatcattggactccagggctgaaaacgatcgccggacttgggggtgcctgagaggtccgtctcctgccgtccccagcagacgagcctgaacattcggagacatcgtgaaataagagcgtcgctgatctgtgatcatcgtatttgtcattatgcacctgtagcaaccgatggactgaactgtgctggattatgctgttggatcacctgagtatgtgttacatgtcggttttgatgtgacatcctatcgtttcgatgtgttttgtggaagtgttgttgc

SEQ ID NO: 37764 - protein, 152 aa, Zea mays subsp. mays
MVKAVAVLGSSDGVKGTIFFTQEGDGPTAVTGSVSGLKPGLHGFHVHALGDTTNGCMSTGPHYNPASKEHGAPEDENRHAGDLGNVTAGADGVANINVTDSQIPLTGPNSIIGRAVVVHADPDDLGKGGHELSKSTGNAGGRVACGIIGLQG

SEQ ID NO: 37765 - protein, 96 aa, Zea mays subsp. mays
MSTGPHYNPASKEHGAPEDENRHAGDLGNVTAGADGVANINVTDSQIPLTGPNSIIGRAVVVHADPDDLGKGGHELSKSTGNAGGRVACGIIGLQG

SEQ ID NO: 37766 - DNA, 765 bp, Zea mays subsp. mays
agaaagccgacgaaaaggcagagaaaagacgcacaccgaagaaaaacacaaagacttcatcatcatcatctcctccttctttcgcctcagcaagaagctaatctgattcagccatggctaatgcggcgtcaggaatggcagtccacgatgactgcaagctcaagtttcttgaattgaaggccaagaggacataccgtttcatcgtctacaagattgaggagcagcagaagcaagtggtcgttgagaaactcggcgagcctggtcaatcccatgatgactttgcagctagtcttcctgctgatgaatgccgatacgccattttcgattttgatttcgtcactgctgagaattgccaaaagagcaagatcttcttcgttgcatggtctccggacacggcaagagtgagaagcaagatgatctacgcgagctctaaggacaggttcaagagagagctagacgggattcaagtagagcttcaagcaaccgacccaaccgagatggatctcgacgttttcaaaagccgagccaattgaggaaccggttgaattgaacttctttcatctactattgccgagtgatatgcttttacttaaggtttgctgtgacggcaccaaccaaaaaacagcttcatttttatctgtctttggtctctgtctttattttattttggtccttacagtgttgtcttaaaacttaagaggtctggctcgtgctctaccctaaaccctctatcaaaaaatgaatcctattagcacattttgtctt

SEQ ID NO: 37767 - protein, 139 aa, Zea mays subsp. mays
MANAASGMAVHDDCKLKFLELKAKRTYRFIVYKIEEQQKQVVVEKLGEPGQSHDDFAASLPADECRYAIFDFDFVTAENCQKSKIFFVAWSPDTARVRSKMIYASSKDRFKRELDGIQVELQATDPTEMDLDVFKSRAN

SEQ ID NO: 37768 - protein, 132 aa, Zea mays subsp. mays
MAVHDDCKLKFLELKAKRTYRFIVYKIEEQQKQVVVEKLGEPGQSHDDFAASLPADECRYAIFDFDFVTAENCQKSKIFFVAWSPDTARVRSKMIYASSKDRFKRELDGIQVELQATDPTEMDLDVFKSRAN

SEQ ID NO: 37769 - DNA, 1209 bp, Zea mays subsp. mays
ctcttccgcccgcggcggctcaaacttaaaccctagagccgctcccctcctcgcctccgaagcgctcgccacccgattcgcgagtcccctcctcccagggaggcgcttccgcgaaggtccgctgctgcggtcatggctcgcgtctacgtggggaatctggatccgcgcgccactgcgcgcgagatcgaggacgagttccgcgtgtttggggttctcaagagtgtgtgggttgctagaaagccaccaggatttgctttcattgactttgatgagaccagggacgcaaaggatgcaattcgtgaattggatggcaagaatgggtggagagttgagctgtcaaccaaatctggtagtggccgtggccgagaacgtgaacgctctggaggttctgatatgaagtgctatgagtgtggtgaaagtggccactttgcacgagagtgtcgcctacggattggttctgggggcctgggtagcggaagacgccgcagccggagcccgaggcaccgcagccgtagccgtagcccaagataccgcaggagcccaagctatggcagaaggagctacagcccacgggatcggtctcccaggaagcgaagttacagcagatcaccaccgcctccccgggcgcggagtatcagcaggtctccaccacctgcccgtgcgcgaagcatcagcaggtctccaccgccggcccgtgggcgaagcatcagcaggtcaccgccgcctgcccgtgcgcgaaacatcagcaggtcaccaccgcctcctcgcgccagaagcatcagtaagtcaccaccgccagcccgtgaacggagctatagcaggtccccagcacagccaccccagcgtgaggagtccccttatgctgataacgcgtgagcacttggttccacaatgctggaagtgttggggggcgggggcctccacttgtttccttgaatgtttcggtatgactattgaatggccaggcggccgagtattgttcttcgctggcatttgtgttcttttgctgctgatacaattgcggaagcgggatttctcttgactgtatgactctagcgtatgtagttggtcttgagacaagatatgttttctttttctgtaacatttgtactgttggattattcggatgctgtgcatggatttttatgtgctgatgaaactgtttcttgaatattaatgtgtcaccgtcttgttacgtttctgttctcc

SEQ ID NO: 37770 - protein, 247 aa, Zea mays subsp. mays
MARVYVGNLDPRATAREIEDEFRVFGVLKSVWVARKPPGFAFIDFDETRDAKDAIRELDGKNGWRVELSTKSGSGRGRERERSGGSDMKCYECGESGHFARECRLRIGSGGLGSGRRRSRSPRHRSRSRSPRYRRSPSYGRRSYSPRDRSPRKRSYSRSPPPPRARSISRSPPPARARSISRSPPPARGRSISRSPPPARARNISRSPPPPRARSISKSPPPARERSYSRSPAQPPQREESPYADNA

SEQ ID NO: 37771 - protein, 212 aa, Zea mays subsp. mays
MSVVKVATLHESVAYGLVLGAWVAEDAAAGARGTAAVAVAQDTAGAQAMAEGATAHGIGLPGSEVTADHHRLPGRGVSAGLHHLPVREASAGLHRRPVGEASAGHRRLPVRETSAGHHRLLAPEASVSHHRQPVNGAIAGPQHSHPSVRSPLMLITREHLVPQCWKCWGAGASTCFLECFGMTIEWPGGRVLFFAGICVLLLLIQLRKRDFS

SEQ ID NO: 37772 - protein, 164 aa, Zea mays subsp. mays
MAEGATAHGIGLPGSEVTADHHRLPGRGVSAGLHHLPVREASAGLHRRPVGEASAGHRRLPVRETSAGHHRLLAPEASVSHHRQPVNGAIAGPQHSHPSVRSPLMLITREHLVPQCWKCWGAGASTCFLECFGMTIEWPGGRVLFFAGICVLLLLIQLRKRDFS

SEQ ID NO: 37773 - DNA, 622 bp, Zea mays subsp. mays
attttttcccactttcctttgagaaaacagagcaaaatggcactgagaatgtgggcttcctctacagcaaacgctcttaagctctcttcttctacctccaaatctcatctccttcctgcgttctccatctccagatgcttctcctcagtgttggaaggactcaagtatgcaacttcacacgagtgggtgaaacatgatggctcggtggctaccattggcatcactgaccatgcccaggaccatctaggagaagttgtgtttgtggagctgccagaagagaaaagctcagtgagcaaagaaaagaactttggagctgtggagagtgtgaaggcaacaagtgagattctatctccaatctctggtgaagtcattgaggttaacacaaagctaaccgattcacctggtttgatcaactcaagcccctatgaagatggttggatgataaaggtgaaaccaagcaaccctgcagagttggaaaccttgatgggttcaaaggaatacaccaagttctgcgaagaggaagatgctgctcactagagggtttcatctgtctatgtttcgtaccctatctctctcagctttgtatctctgtaatactaatttggttgaaagatgatcattc

SEQ ID NO: 37774 - protein, 178 aa, Zea mays subsp. mays
IFSHFPLRKQSKMALRMWASSTANALKLSSSTSKSHLLPAFSISRCFSSVLEGLKYATSHEWVKHDGSVATIGITDHAQDHLGEVVFVELPEEKSSVSKEKNFGAVESVKATSEILSPISGEVIEVNTKLTDSPGLINSSPYEDGWMIKVKPSNPAELETLMGSKEYTKFCEEEDAAH

SEQ ID NO: 37775 - protein, 166 aa, Zea mays subsp. mays
MALRMWASSTANALKLSSSTSKSHLLPAFSISRCFSSVLEGLKYATSHEWVKHDGSVATIGITDHAQDHLGEVVFVELPEEKSSVSKEKNFGAVESVKATSEILSPISGEVIEVNTKLTDSPGLINSSPYEDGWMIKVKPSNPAELETLMGSKEYTKFCEEEDAAH

SEQ ID NO: 37776 - protein, 162 aa, Zea mays subsp. mays
MWASSTANALKLSSSTSKSHLLPAFSISRCFSSVLEGLKYATSHEWVKHDGSVATIGITDHAQDHLGEVVFVELPEEKSSVSKEKNFGAVESVKATSEILSPISGEVIEVNTKLTDSPGLINSSPYEDGWMIKVKPSNPAELETLMGSKEYTKFCEEEDAAH

SEQ ID NO: 37777 - DNA, 1371 bp, Zea mays subsp. mays
acaccacagcacaccaaccgcgcgccactgatccatcaactccactccactagctacgtaccttccgaccgagcagccagagagatggagaggatggtgatgaggctggtgaggaacaagcagtccctccgccagctgcaaggggccgccgccggcggcctagcgtcgtcgtcctccgcctcctcgaccgccggcgccgccgcgtcctccttctccaccctgcagcagcagcaggaggaccaccccggagtgctcaacatcagggacaccgccgcccacctcatcggccggacgccgctggtgtacctgaacaaggtgacggaggggtgcggcgcccgcgtcgccgccaagctcgagttcctccagccttccttcagcgtcaaggacaggccagcaatctccatgatcgaagacgcggagaagaaggggctgataaccccaggcaagacgacgctgatcgagcccacatccgggaacatgggcatcggcctggcgttcatggcagcactcaaagggtacgagctcgtgctgacgatgccatcatacaccagcctcgagaggagggtggtcatgaaggccttcggtgcgcagctcgtgctcactgacccggccaaggggatgggaggcaccgtcaggaaagcaacccagctctatgagaaccatcccagcgccttcatgctccagcagttcgagaatcccgccaacgtccaggtgcactacgagactaccggtccggagatatgggaggacacgctcgggcaggtcgacatcttcgtcatgggaatcggcagcggcggcaccgtcaccggcgtcggcaagtaccttaaggagaagaaccccaacgcaaagatctatggagttgaacctgccgaagcaaatgtcctgaacggtggcaagccagggcctcacctcatcactggaaatggagttggatttaagccagatattttggatatggatataatggagaaggttctagaggtgaaaagcgaggacgccgttacgatggcgcaacagttggcactgcaggagggcctgctggtggggatatcatcaggagccaacacagtggctgcgatcgaactcgcaaagaggccagaaaacaaagggaagctcatcgtgactgttcatccgagcgcgggagagcgatacttatcgtcggcgctattcgagggtctgaggaaggaggctgaggcaatgcagccagtgccagtggactaagttggagctatacaatgcatgtagaataaattcactgcaaccatgttgcaagtgctagtcatacctcatttgtgattcttcagtttgttcatcatgtggaagtcgtgtaaacaacagttcaaatggttgaaaaaaggactttacctctct

SEQ ID NO: 37778 - protein, 406 aa, Zea mays subsp. mays
TPQHTNRAPLIHQLHSTSYVPSDRAAREMERMVMRLVRNKQSLRQLQGAAAGGLASSSSASSTAGAAASSFSTLQQQQEDHPGVLNIRDTAAHLIGRTPLVYLNKVTEGCGARVAAKLEFLQPSFSVKDRPAISMIEDAEKKGLITPGKTTLIEPTSGNMGIGLAFMAALKGYELVLTMPSYTSLERRVVMKAFGAQLVLTDPAKGMGGTVRKATQLYENHPSAFMLQQFENPANVQVHYETTGPEIWEDTLGQVDIFVMGIGSGGTVTGVGKYLKEKNPNAKIYGVEPAEANVLNGGKPGPHLITGNGVGFKPDILDMDIMEKVLEVKSEDAVTMAQQLALQEGLLVGISSGANTVAAIELAKRPENKGKLIVTVHPSAGERYLSSALFEGLRKEAEAMQPVPVD

SEQ ID NO: 37779 - protein, 378 aa, Zea mays subsp. mays; identical to SEQ ID NO: 26552

SEQ ID NO: 37780 - protein, 375 aa, Zea mays subsp. mays; identical to SEQ ID NO: 26553

SEQ ID NO: 37781 - DNA, 785 bp, Zea mays subsp. mays
gctagatcactgcccccggcagaccacctgacccggccgctcgagatggccgccagaaggcacgccgggagcagctccggtcccacttcggccaacctaagcatgaagctgctggtggaggtggacaggcgcggcacgcccaggcgcgtggtgtacgccgaggccggcaaggacgtcgtcgacttcctcctcaccttcctcaccttgccgatcggcacggtcgtcaagctgctcaggaggaactccatgcccatggtaggctgcgtcggcaacctgtacggcagcgtcgaggagctccccgacgacttcatctgccacagggacgccagggccgccaaggacaccctgctcaggcccgccggcggcaggcttcccctgctcacgaacgcggggtcgtcgtcgtccagcaccggcggctttgtgagggcgggcgtgacctacgaggtcatggacgacctcgagattgctcccaggtctaacgtcgatttcatcaccaacctcaacagatatggtatcagggacatcggctgtctccagaggaagactgtccgagttggcgacaccgagggtctccagatactgagggcgtcactcaagtcgaagacggtcctcaccgacgtcttccttcggacgaacactccgagtccgagtccgagggccttaactgcagggtgaagtgtccttgccgtgtcatccttgtggtgcgtgcatgtgtttctttggtcatatcgttcgtgttggtcactggttcacggctcacatactatgaataaaggcaaggaatt

SEQ ID NO: 37782 - protein, 224 aa, Zea mays subsp. mays
ARSLPPADHLTRPLEMAARRHAGSSSGPTSANLSMKLLVEVDRRGTPRRVVYAEAGKDVVDFLLTFLTLPIGTVVKLLRRNSMPMVGCVGNLYGSVEELPDDFICHRDARAAKDTLLRPAGGRLPLLTNAGSSSSSTGGFVRAGVTYEVMDDLEIAPRSNVDFITNLNRYGIRDIGCLQRKTVRVGDTEGLQILRASLKSKTVLTDVFLRTNTPSPSPRALTAG

SEQ ID NO: 37783 - protein, 209 aa, Zea mays subsp. mays
MAARRHAGSSSGPTSANLSMKLLVEVDRRGTPRRVVYAEAGKDVVDFLLTFLTLPIGTVVKLLRRNSMPMVGCVGNLYGSVEELPDDFICHRDARAAKDTLLRPAGGRLPLLTNAGSSSSSTGGFVRAGVTYEVMDDLEIAPRSNVDFITNLNRYGIRDIGCLQRKTVRVGDTEGLQILRASLKSKTVLTDVFLRTNTPSPSPRALTAG

SEQ ID NO: 37784 - protein, 190 aa, Zea mays subsp. mays
MKLLVEVDRRGTPRRVVYAEAGKDVVDFLLTFLTLPIGTVVKLLRRNSMPMVGCVGNLYGSVEELPDDFICHRDARAAKDTLLRPAGGRLPLLTNAGSSSSSTGGFVRAGVTYEVMDDLEIAPRSNVDFITNLNRYGIRDIGCLQRKTVRVGDTEGLQILRASLKSKTVLTDVFLRTNTPSPSPRALTAG

SEQ ID NO: 37785 - DNA, 632 bp, Zea mays subsp. mays
aatcaaaactgatagaactcactctctaatatacttcatatccttttttcttctttgaatcaccaatcatgtctcaacaatcattcaatgctggacaaaccagaggccatgctcaagtcctttttatgatcttaatcattttcattaatttcaaaccatatcgaataattattttgagaaattctaaatatacttgatgtacataacatttgttggataatgcaggagaaggctgagcagtggactgagtctgccaagcagactgcacagtcagcatgtgacaagaccgcagatgtagcgctatcagcacgtgacaagactgccaatttgacacaatcaacacaaagcaagtctgcagatgcatctcattctacccgagaatcagctcaacatggccaggaacaaaccgctggttttctcggtcagaccggtgaatctgtaaagaacatggctcagggtgctttcgatggtgttaagaatagccttggcatgaacgagaagaaatgaggaaatgagtattcgtacttctcaaataactatttatttattcatggctatttctggtgtctagcaattttttatttctctaaattatgtttgtaataaatatatttttgaaaggtttcgtgatc

SEQ ID NO: 37786 - protein, 95 aa, Zea mays subsp. mays
MQEKAEQWTESAKQTAQSACDKTADVALSARDKTANLTQSTQSKSADASHSTRESAQHGQEQTAGFLGQTGESVKNMAQGAFDGVKNSLGMNEKK

SEQ ID NO: 37787 - DNA, 1329 bp, Zea mays subsp. mays
aatcaaacacaaacaaaacccaaagaagatctaagttcatcatgtctacgaccggacaaatcattcgatgcaaagctgccgtttgctgggaagctggaaagccactagtgatggaggaagtggaggttgctccaccgcagaagcatgaagtccgtatcaagattctcttcacttctctctgtcacaccgatgtttacttctgggaagctaagggacaaacgcctttgtttccacgtatcttcggacatgaagctggagggattgtggagagtgttggagaaggagtgactgatctccaaccaggagaccacgtcctccccatcttcaccggagaatgcggagactgccctcactgccactctgaggagtccaacatgtgcgaccttctcaggatcaacaccgagagaggagggatgatacacgacggcgaatcgagattctccatcaacggcaaaccgatctaccatttccttgggacctcaacgttcagcgagtacaccgtggttcactctggtcaagtcgctaagatcaaccctgaagctcctcttgacaaagtctgcatcgtcagctgtggcttgtccactgggctgggagctactttgaatgttgctaaacccaagaaaggtcagagcgttgctatctttggtcttggtgctgttgggttggctgctgcggaaggtgctaggattgctggtgctggtaggatcattggtgttgatcttaaccccaagagattcgaggaagctaagaagttcggtgtgacggagtttgtgaaccctaaggaacatgacaagccagttcagcaagtcatcgctgagatgactaacggcggtgtggacaggagtgtggagtgcactggaagcattcaagccatgattcaagcctttgaatgtgttcacgatggctggggtgttgcggtgctggttggtgtgccgagcaaagacgacgctttcaagactcatccgatgaacctcctgaacgagaggacactcaagggtactttctttggcaactacaaacccaaaaccgacattcccggggtggtcgaaaagtacatgaacaaggagctggagcttgagaagttcatcactcacacagtgccgttctctgagatcaacaaggcctttgattacatgttgttggagagagtatccgttgcatcatcaccatgggtgcttgaagaaactacatttctcctttaccaataaatgtctacttcgagtgtttttagtagacaaactcttattgcttttgtgttttttaagttcctactctattttaccatatcgttgtaatagttttcattctatcaaggttttaatataaact

SEQ ID NO: 37788 - protein, 401 aa, Zea mays subsp. mays
SNTNKTQRRSKFIMSTTGQIIRCKAAVCWEAGKPLVMEEVEVAPPQKHEVRIKILFTSLCHTDVYFWEAKGQTPLFPRIFGHEAGGIVESVGEGVTDLQPGDHVLPIFTGECGDCPHCHSEESNMCDLLRINTERGGMIHDGESRFSINGKPIYHFLGTSTFSEYTVVHSGQVAKINPEAPLDKVCIVSCGLSTGLGATLNVAKPKKGQSVAIFGLGAVGLAAAEGARIAGAGRIIGVDLNPKRFEEAKKFGVTEFVNPKEHDKPVQQVIAEMTNGGVDRSVECTGSIQAMIQAFECVHDGWGVAVLVGVPSKDDAFKTHPMNLLNERTLKGTFFGNYKPKTDIPGVVEKYMNKELELEKFITHTVPFSEINKAFDYMLLERVSVASSPWVLEETTFLLYQ

SEQ ID NO: 37789 - protein, 388 aa, Zea mays subsp. mays
MSTTGQIIRCKAAVCWEAGKPLVMEEVEVAPPQKHEVRIKILFTSLCHTDVYFWEAKGQTPLFPRIFGHEAGGIVESVGEGVTDLQPGDHVLPIFTGECGDCPHCHSEESNMCDLLRINTERGGMIHDGESRFSINGKPIYHFLGTSTFSEYTVVHSGQVAKINPEAPLDKVCIVSCGLSTGLGATLNVAKPKKGQSVAIFGLGAVGLAAAEGARIAGAGRIIGVDLNPKRFEEAKKFGVTEFVNPKEHDKPVQQVIAEMTNGGVDRSVECTGSIQAMIQAFECVHDGWGVAVLVGVPSKDDAFKTHPMNLLNERTLKGTFFGNYKPKTDIPGVVEKYMNKELELEKFITHTVPFSEINKAFDYMLLERVSVASSPWVLEETTFLLYQ

SEQ ID NO: 37790 - protein, 365 aa, Zea mays subsp. mays
MEEVEVAPPQKHEVRIKILFTSLCHTDVYFWEAKGQTPLFPRIFGHEAGGIVESVGEGVTDLQPGDHVLPIFTGECGDCPHCHSEESNMCDLLRINTERGGMIHDGESRFSINGKPIYHFLGTSTFSEYTVVHSGQVAKINPEAPLDKVCIVSCGLSTGLGATLNVAKPKKGQSVAIFGLGAVGLAAAEGARIAGAGRIIGVDLNPKRFEEAKKFGVTEFVNPKEHDKPVQQVIAEMTNGGVDRSVECTGSIQAMIQAFECVHDGWGVAVLVGVPSKDDAFKTHPMNLLNERTLKGTFFGNYKPKTDIPGVVEKYMNKELELEKFITHTVPFSEINKAFDYMLLERVSVASSPWVLEETTFLLYQ

SEQ ID NO: 37791 - DNA, 778 bp, Zea mays subsp. mays
attttcctttctcctccgttttttctctgccctttctctcctctcttatctcctgcggtagaagaaccatggcttcaaccaccgatttcacaaagtctttactatctcccttctcccaacatggctttaattcccagagaggaagtagcagacagaacaagaacgcgacatggccgaatcagcacaagcccaataggtctcttcgtgtgaacgggttgttcggaggtggaaacaacaaagataataataatactgaggatggacagtcaaaggcaggaggaatctttggtaatatgcagaatatgtatgagactgtcaagaaagctcaaatggttgttcaagttgaggcggttcgtgttcaaaaagagttagctgccgcagagtttgatggttattgtgaaggcgagcttgtcaaggttacgttatcaggtaaccagcaaccgatccgaactgatataacagaggcagcaatggagttaggctctgagaaactttcactgttggtcacggaggcttacaaggacgcgcacgcgaagagtgtcgtggctatgaaagaaagaatgagtgaccttgcgcagagcttaggcatgccacctggcctcagcgaaggaatgaagtaaagaaactgtttttgttgtttgtcacgactcaagtttcagttgtgagtttttctctatttatcatcagtcaggcagagaagcaaaaacctttgtactaatactattatggaatcagatatttttctcattaccctgagtatggtctataatttcaacgc

SEQ ID NO: 37792 - protein, 205 aa, Zea mays subsp. mays
FPFSSVFSLPFLSSLISCGRRTMASTTDFTKSLLSPFSQHGFNSQRGSSRQNKNATWPNQHKPNRSLRVNGLFGGGNNKDNNNTEDGQSKAGGIFGNMQNMYETVKKAQMVVQVEAVRVQKELAAAEFDGYCEGELVKVTLSGNQQPIRTDITEAAMELGSEKLSLLVTEAYKDAHAKSVVAMKERMSDLAQSLGMPPGLSEGMK

SEQ ID NO: 37793 - protein, 183 aa, Zea mays subsp. mays
MASTTDFTKSLLSPFSQHGFNSQRGSSRQNKNATWPNQHKPNRSLRVNGLFGGGNNKDNNNTEDGQSKAGGIFGNMQNMYETVKKAQMVVQVEAVRVQKELAAAEFDGYCEGELVKVTLSGNQQPIRTDITEAAMELGSEKLSLLVTEAYKDAHAKSVVAMKERMSDLAQSLGMPPGLSEGMK

SEQ ID NO: 37794 - protein, 108 aa, Zea mays subsp. mays
MQNMYETVKKAQMVVQVEAVRVQKELAAAEFDGYCEGELVKVTLSGNQQPIRTDITEAAMELGSEKLSLLVTEAYKDAHAKSVVAMKERMSDLAQSLGMPPGLSEGMK

SEQ ID NO: 37795 - DNA, 1584 bp, Zea mays subsp. mays
ctcactagtcccccccccccccccccctctcctccaacttggaacttcccgtcgtcgatcttctcttctctctcttcatcgcacgctgtgcccagctagctcaaaacactgcacttccgcttttatcaagatcaatctctatcaatacttagaaaagttctttcctttttgtcaaattctttcaatttctctcttcaattccctacgaattactcacttcggatccaatcagctctttatagcctctgcgtttgggagtcaatctttctctcttcgacaattaagggtttcgtataaagattgctgttttacgacaggattctgaataaggagaagaagggttggtttcatttggatggaaagtatatggtaggtctacacattaatatggaagcgcagattcatatacttgagcaggaagcttattctgctgtattaagagcttttcaagcacaggctgatgaattttcttgggataaagcaaccgtgatgacaaacctacgtaaagaattgaggatatctgatgatgaaaaccgacaactgttgaacaatgtccataatgatgatcttatcaaaagaataagagattcgagaccaagaggtggaaaccaggttgttagacatcagtccctcgatgttcatcctagtccgactttttcagcttctcggaagaaacagaagacgttccaatcctatccgtcgattggttctactagaagtaagtcattcaataaccgtgtagtatcagcaaatgaacctgcggaagctcttattggaagaaaagtgtggacaaaatggcctgaagacaacagcttttatgaagcagtagttacacaatacaatgcaaatgagggtcgacatgcgttggtatatgatataaacacagtgaatgagacatgggaatgggttgatcttaatgagattccaacgaaagatataagatgggatggagaggaagatggggtaactttgaatgtaggacatggcgatggaacaactcgtgggaatcgaaggaccttaagccatggtggtagagggagaggtccaagaactcagccaagaagagaacatttagcaacggaaaacggtggtgggaggaagtttttcggtgggattgaattgttcaacacagactcacttgtgaaagaggtcgagagagtttttgattcaaaccttcctgatccacatgagcttgataaggccaagaagctactcaaggaacatgaacaggcgcttattgctgccattgcaaggcttacggatgcttctgattacgaaagcgatggagaagaaccgtattagcatgagcttccaatgctgctggggtgagtatgtatgacaccatcacccctaggaaaaatgactagcaatatttctttttcttctgttttgctttaagggatcccagaaaatgattttgttcatatatgatgaacaattagtagtattcttctaatttgtggtttcagaatgtatgaaaataatcgttaggaattttgtttgtaaaaacactatttttttaaaaaaattctgaacttgtgtgatcaaaaaaaaaaaaaaaaaaaactcgagggggggcccggt

SEQ ID NO: 37796 - protein, 311 aa, Zea mays subsp. mays
MVGLHINMEAQIHILEQEAYSAVLRAFQAQADEFSWDKATVMTNLRKELRISDDENRQLLNNVHNDDLIKRIRDSRPRGGNQVVRHQSLDVHPSPTFSASRKKQKTFQSYPSIGSTRSKSFNNRVVSANEPAEALIGRKVWTKWPEDNSFYEAVVTQYNANEGRHALVYDINTVNETWEWVDLNEIPTKDIRWDGEEDGVTLNVGHGDGTTRGNRRTLSHGGRGRGPRTQPRREHLATENGGGRKFFGGIELFNTDSLVKEVERVFDSNLPDPHELDKAKKLLKEHEQALIAAIARLTDASDYESDGEEPY

SEQ ID NO: 37797 - protein, 304 aa, Zea mays subsp. mays
MEAQIHILEQEAYSAVLRAFQAQADEFSWDKATVMTNLRKELRISDDENRQLLNNVHNDDLIKRIRDSRPRGGNQVVRHQSLDVHPSPTFSASRKKQKTFQSYPSIGSTRSKSFNNRVVSANEPAEALIGRKVWTKWPEDNSFYEAVVTQYNANEGRHALVYDINTVNETWEWVDLNEIPTKDIRWDGEEDGVTLNVGHGDGTTRGNRRTLSHGGRGRGPRTQPRREHLATENGGGRKFFGGIELFNTDSLVKEVERVFDSNLPDPHELDKAKKLLKEHEQALIAAIARLTDASDYESDGEEPY

SEQ ID NO: 37798 - protein, 270 aa, Zea mays subsp. mays
MTNLRKELRISDDENRQLLNNVHNDDLIKRIRDSRPRGGNQVVRHQSLDVHPSPTFSASRKKQKTFQSYPSIGSTRSKSFNNRVVSANEPAEALIGRKVWTKWPEDNSFYEAVVTQYNANEGRHALVYDINTVNETWEWVDLNEIPTKDIRWDGEEDGVTLNVGHGDGTTRGNRRTLSHGGRGRGPRTQPRREHLATENGGGRKFFGGIELFNTDSLVKEVERVFDSNLPDPHELDKAKKLLKEHEQALIAAIARLTDASDYESDGEEPY

SEQ ID NO: 37799 - DNA, 2231 bp, Zea mays subsp. mays
ccccccccccccattagaaggcagaatcatggttcacgcatacttcactcttcctcggttgacatggggaacatgaaggttggtatggctaggcaatcttcagatgttttgttcaaaaggaattcagctgagcaatcttctttgaagaatgtgtctttggaaagacggtggagtcttgaggtggctattgaaaaatttattggccatgaatccagcgaaagttctggtctagaaagcttggaaaacttgagtgattctcgtttgcccatactggaaagagaatacaagcaaggtgttctaatcagtgaggtggttcttgacaggagtttttcagactcctcaaagaagacaaaacgccgccagaagaaaacggtgagggacacaaaaaagcctggagagacaataattaagggacacagaagctatgatttaatgctcagcctgcagcttggaatcaggtacacagttggaaagatcacaccaattcaaaaacgtgaagttcgtgcttcagattttggaccaagagcaagtttctggatgaacttcccaaaagaaggatctcggcttactccttcacattcagcggaagattttaaatggaaagactactgtcccatggttttcaggaatttgagagagatgttcaagattgatgctgcagactatatgatctccatatgtggaaattctgctcttaggcaactatcttcccctggaaagagtggaagtgtctttttcctgtcacaagatgatagattcatgattaagactctccgaaaatctgaagtgcaggttcttttacgaatgcttccaaactattatgatcatgtccgtacctatgagaacaccctcataactaagttttttggcctccacagggtgaaaccttctagtggtcaaaagtttcggtttgttgtaatgggaaacatgttttgcactgaattgagaatccaccggaggtttgatttgaaaggatcatctttaggccgttctactgataaaattgaaattgacgagaacacaactctgaaggatttggatcttaactattccttttatcttgaaccttcctggcgtgaggctcttcttaaacagattgaaacagacagtgattttttgagaacacagcggataatggattacagcctactgcttggtgtccattatagagctccacagcacttgcggacacgtgcatcttatcaccggagcatggcagcagatagattgactgttgtttcagaagaagatgctcaggaagatgatgcccttagccatccagaaggactagtcttggttcaaagcagtggtgagaacagtgttattgttggccctcacataagaggcagccgcttgcgtgcatcggctgctggatttggcgaagtagacctactgctgcctggaacagccaggcttcagatccagctaggagttaacatgcctgcaagggcagagcagacccctaaggaagatgaaagcaaaccgttccgtgaggtgtacgatgtggtcctctacctgggcatcattgacatactgcaagagtacaacatgacaaagaaaatcgagcacgctgtcaagtccatgcagtatgactcggtctcgatctcggctgtggacccccagttctactcggagcgtttcttgaacttcatccagaccgtcttccctgagaattcgtagctccatccaccaatacttttcttggaagatgcccgcccactaccacttgctgagaacttcatccagacgacagtccatgtcttcgaatttggagcttgcgagcatcataagaacattgcactctcttcagtgcgtgcctgttccttcctggatgaactggcaggaagagtggccaacaaaatgagattcgttagtgaaattgtgcagaagcaaatcgatcttctctaggctattttgccccgatccctggggtcaccggatcagccgtctggcttcctggagtaggcttggcgtattgggactcgagcaggaagtagatgtgagttgcgaggattctagtgacagcggcgccatagagctctgggattcactgttatgtctcggcagttgcagaaagctgaagcgcctgttgcctctggctcgtgtttcatctgttaaggtgctatggaggatatgtttaataagtccctgaaaacacgcatcaagctccgatacatttttttgtaggacaaacaaaagagtactatgtattttatcgcaaaaacgaaaag

SEQ ID NO: 37800 - protein, 559 aa, Zea mays subsp. mays
PPPPIRRQNHGSRILHSSSVDMGNMKVGMARQSSDVLFKRNSAEQSSLKNVSLERRWSLEVAIEKFIGHESSESSGLESLENLSDSRLPILEREYKQGVLISEVVLDRSFSDSSKKTKRRQKKTVRDTKKPGETIIKGHRSYDLMLSLQLGIRYTVGKITPIQKREVRASDFGPRASFWMNFPKEGSRLTPSHSAEDFKWKDYCPMVFRNLREMFKIDAADYMISICGNSALRQLSSPGKSGSVFFLSQDDRFMIKTLRKSEVQVLLRMLPNYYDHVRTYENTLITKFFGLHRVKPSSGQKFRFVVMGNMFCTELRIHRRFDLKGSSLGRSTDKIEIDENTTLKDLDLNYSFYLEPSWREALLKQIETDSDFLRTQRIMDYSLLLGVHYRAPQHLRTRASYHRSMAADRLTVVSEEDAQEDDALSHPEGLVLVQSSGENSVIVGPHIRGSRLRASAAGFGEVDLLLPGTARLQIQLGVNMPARAEQTPKEDESKPFREVYDVVLYLGIIDILQEYNMTKKIEHAVKSMQYDSVSISAVDPQFYSERFLNFIQTVFPENS

SEQ ID NO: 37801 - protein, 538 aa, Zea mays subsp. mays
MGNMKVGMARQSSDVLFKRNSAEQSSLKNVSLERRWSLEVAIEKFIGHESSESSGLESLENLSDSRLPILEREYKQGVLISEVVLDRSFSDSSKKTKRRQKKTVRDTKKPGETIIKGHRSYDLMLSLQLGIRYTVGKITPIQKREVRASDFGPRASFWMNFPKEGSRLTPSHSAEDFKWKDYCPMVFRNLREMFKIDAADYMISICGNSALRQLSSPGKSGSVFFLSQDDRFMIKTLRKSEVQVLLRMLPNYYDHVRTYENTLITKFFGLHRVKPSSGQKFRFVVMGNMFCTELRIHRRFDLKGSSLGRSTDKIEIDENTTLKDLDLNYSFYLEPSWREALLKQIETDSDFLRTQRIMDYSLLLGVHYRAPQHLRTRASYHRSMAADRLTVVSEEDAQEDDALSHPEGLVLVQSSGENSVIVGPHIRGSRLRASAAGFGEVDLLLPGTARLQIQLGVNMPARAEQTPKEDESKPFREVYDVVLYLGIIDILQEYNMTKKIEHAVKSMQYDSVSISAVDPQFYSERFLNFIQTVFPENS

SEQ ID NO: 37802 - protein, 535 aa, Zea mays subsp. mays
MKVGMARQSSDVLFKRNSAEQSSLKNVSLERRWSLEVAIEKFIGHESSESSGLESLENLSDSRLPILEREYKQGVLISEVVLDRSFSDSSKKTKRRQKKTVRDTKKPGETIIKGHRSYDLMLSLQLGIRYTVGKITPIQKREVRASDFGPRASFWMNFPKEGSRLTPSHSAEDFKWKDYCPMVFRNLREMFKIDAADYMISICGNSALRQLSSPGKSGSVFFLSQDDRFMIKTLRKSEVQVLLRMLPNYYDHVRTYENTLITKFFGLHRVKPSSGQKFRFVVMGNMFCTELRIHRRFDLKGSSLGRSTDKIEIDENTTLKDLDLNYSFYLEPSWREALLKQIETDSDFLRTQRIMDYSLLLGVHYRAPQHLRTRASYHRSMAADRLTVVSEEDAQEDDALSHPEGLVLVQSSGENSVIVGPHIRGSRLRASAAGFGEVDLLLPGTARLQIQLGVNMPARAEQTPKEDESKPFREVYDVVLYLGIIDILQEYNMTKKIEHAVKSMQYDSVSISAVDPQFYSERFLNFIQTVFPENS

SEQ ID NO: 37803 - DNA, 710 bp, Zea mays subsp. mays
gaaccctctgctagcaataaaagaaagccatcggcgaatatgcaaaccaaggctaagaaaaagaagaagaaacttaaggactcaaactttgaccttgacagtggtccaattgcaagagtgcgatggtttagggttgtgcttgatgaaagctcagacaataaaaaacttccgaactgtagtggccagagcctgttgtgggctaagagcaaagcggagatggtgcttatcaggaacacctatacaaaatgcaattgatgatctgtttagctatttccgttttttgaaatatgatccgtattgcacgtataactcgttttacacaatgattaagcacccaattgctagagatgcaattaatggatacaagaaacttcaggctgtgctgaaggtagttctcctgcgtcgtacgaaagaaactgtgaacaatggcaaaccaataataaatttacctcctaagacaattaatcctgaataaagtagatttcacacaagaggagcggtcgttttatttgatgctggaagaacgctctcggcaacaattcaaggcatttgctgcggctgggacactcaaacaaaactatgccaacatccttttaatgttgctgcgacttcggcaagcctgtgatcatcctattcttgtaaagggcaatcagtcagaatatggaggtgatggttctatagaaatggcaaagaaccttcctaaggaagtg

SEQ ID NO: 37804 - protein, 157 aa, Zea mays subsp. mays
NPLLAIKESHRRICKPRLRKRRRNLRTQTLTLTVVQLQECDGLGLCLMKAQTIKNFRTVVARACCGLRAKRRWCLSGTPIQNAIDDLFSYFRFLKYDPYCTYNSFYTMIKHPIARDAINGYKKLQAVLKVVLLRRTKETVNNGKPIINLPPKTINPE

SEQ ID NO: 37805 - protein, 110 aa, Zea mays subsp. mays
MKAQTIKNFRTVVARACCGLRAKRRWCLSGTPIQNAIDDLFSYFRFLKYDPYCTYNSFYTMIKHPIARDAINGYKKLQAVLKVVLLRRTKETVNNGKPIINLPPKTINPE

SEQ ID NO: 37806 - protein, 84 aa, Zea mays subsp. mays
EPSASNKRKPSANMQTKAKKKKKKLKDSNFDLDSGPIARVRWFRVVLDESSDNKKLPNCSGQSLLWAKSKAEMVLIRNTYTKCN

SEQ ID NO: 37807 - DNA, 1169 bp, Zea mays subsp. mays
  misc_feature (483)..(483): n is a, c, g, or t
taaacccccatttttcctatatggaaatgtggttgaggttccaaaagacacatggcatcaactcaaacaattcttatataatgtggagcctgagtttgtgaacagtcagtccttctccgctctaactcgaagggaaggttacattcacaaccttccagtggagaaaagaagtgtcgtggttccaaagtctccaatgactattgaagaagcacttccattcactcgacagtggtggccatcatgggatacaagaaaacatatcagtgttattactacagaggctgcagggattgagcagacatgtgaaagattggggggcatggttagagagtcaagaggagtgctttcacaagcaagacaaatgcagattatacaccagtgcagggtttcaaaccttatttgagtcggtcgggacaggttaggccctttggagcctcgtcaagtggaaaagatactaggttacccttataaccacacaaatcntgtttgaattaaaccaacctgatcgacttgctgccatgaaatatgcattccagactgatacattgtcatatcttttatcagtcctgaaaggtaagtatcaagatggaataagagtgttatccatctacagtggcattggaggtgcagaagtagcacttcatcgtctaggcatccctttgaaatgtgtgatatctgttgaggaatctgaggtgaatagaaaaattctaagaaggtggtggttgaaaactgaacaaactggagtactaaggcaacatgcaggaatttggaagctcaaaacacatgtgattgaagacttggtgaaagagtttggtggttttgatctgattatcggtgggaattatacttcttgcaaaggtggtactacagtaaatacgacaatgggcatggattcgaaccgcttctatgagtataaccgtgttgtcaaaagggtaaggactgcagtttggactcagttgaagagtccatctttaatgaagatcgcacgtcttcataaaactagcctgtaggaggatatagaatcatctgatccgtaaatgtaggatgctacaagtaaactttacaagtcttgggacttgattattgcaagcaattgacttgtcctttattttggtttgtgtttgttggtcacttctaatgtttgataatcattctgcgttactcctttc

SEQ ID NO: 37808 - protein, 163 aa, Zea mays subsp. mays
MKYAFQTDTLSYLLSVLKGKYQDGIRVLSIYSGIGGAEVALHRLGIPLKCVISVEESEVNRKILRRWWLKTEQTGVLRQHAGIWKLKTHVIEDLVKEFGGFDLIIGGNYTSCKGGTTVNTTMGMDSNRFYEYNRVVKRVRTAVWTQLKSPSLMKIARLHKTSL

SEQ ID NO: 37809 - protein, 133 aa, Zea mays subsp. mays
KPPFFLYGNVVEVPKDTWHQLKQFLYNVEPEFVNSQSFSALTRREGYIHNLPVEKRSVVVPKSPMTIEEALPFTRQWWPSWDTRKHISVITTEAAGIEQTCERLGGMVRESRGVLSQARQMQIIHQCRVSNLI

SEQ ID NO: 37810 - DNA, 727 bp, Zea mays subsp. mays
aaaatcattagtggactgtgcatataaccttcgtgcggagctagaaaatgcagcagcagatgtttctgggctattctccaaaatagagcgcaaagacaggatagaagatgggaacaggtcgatggtgcagagatttaggtctcaactgacccatcagctggatgcattgcataaaactgtatccagttctgtcatgcaacaggaggaccaccttaatgaaatggaacatgatatgcaatcctttgtttcttcaaaagatgaggctgcacaagggctaagagagggtgtgcaaaagctcaaagtcttgcatggttccggtatcactgctctggatgaattagcaggtgaaatcgacatgaactcgcggacaacatttgagagattaaattcacagatacagtcacacacatcagcccttgagaactgtttcggaggaatcgcttcggaagcagataacttgttagatgagcttcagcgcagcctatcgaaacaagaagagaggctagcccatttcgcagtgaagcagagggagggacacctgagagctgtggaagcgtcacgttccatctcaaagatcactgctgggttcttccactcgctagatgtccatgcatctaggctcaccagtattctggaacacacacacagcgtgcaagaccaacaacttcttgaccttgaaaagaaattcgaggagtgcgcagctaatgaagaaaaacagcttctagag

SEQ ID NO: 37811 - protein, 242 aa, Zea mays subsp. mays
KSLVDCAYNLRAELENAAADVSGLFSKIERKDRIEDGNRSMVQRFRSQLTHQLDALHKTVSSSVMQQEDHLNEMEHDMQSFVSSKDEAAQGLREGVQKLKVLHGSGITALDELAGEIDMNSRTTFERLNSQIQSHTSALENCFGGIASEADNLLDELQRSLSKQEERLAHFAVKQREGHLRAVEASRSISKITAGFFHSLDVHASRLTSILEHTHSVQDQQLLDLEKKFEECAANEEKQLLE

SEQ ID NO: 37812 - protein, 202 aa, Zea mays subsp. mays
MVQRFRSQLTHQLDALHKTVSSSVMQQEDHLNEMEHDMQSFVSSKDEAAQGLREGVQKLKVLHGSGITALDELAGEIDMNSRTTFERLNSQIQSHTSALENCFGGIASEADNLLDELQRSLSKQEERLAHFAVKQREGHLRAVEASRSISKITAGFFHSLDVHASRLTSILEHTHSVQDQQLLDLEKKFEECAANEEKQLLE

SEQ ID NO: 37813 - protein, 178 aa, Zea mays subsp. mays
MQQEDHLNEMEHDMQSFVSSKDEAAQGLREGVQKLKVLHGSGITALDELAGEIDMNSRTTFERLNSQIQSHTSALENCFGGIASEADNLLDELQRSLSKQEERLAHFAVKQREGHLRAVEASRSISKITAGFFHSLDVHASRLTSILEHTHSVQDQQLLDLEKKFEECAANEEKQLLE

SEQ ID NO: 37814 - DNA, 696 bp, Zea mays subsp. mays
gatcgccgcggcgcttcctgccgccgccggcgaagcgcagggttggaaatctgtttgacggaccactcagtgagtggcttcatgttaaatccatttctggtttcaagatgcttcaccaatgacatctggaaactgtaatagtatgtgctgatcttctatgcttcaccacctgatcatcaatgggctctttcctgaggaaacagcctagctacctcttcattttgataattctgcaccttgttgctcatgaggcaagaacactgagttcagatggcgaagcacttcttgccttcaaaaaggcagttacaaattcagatggagtcttcctaaattggcgtgagcaagatgcagacccctgcaattggaagggtgttagatgtgatagtcatagcaagagagtgattaatctgattcttgcataccacagattagttgggcccataccaccagaaattggaaggttaaatcagttgcaaaccttgtcattgcaggggaacagtttgtatggttcactccctcctgaactggggaattgtaccaagttgcaacaactgtatctacaaggaaattacttaagtggatacatcccttcagaattcggcgaactggtggaactcgaggcattggacttatccagtaatacattgagtggatctgttccacattctcttgataagtgtccaaacttacatcatt

SEQ ID NO: 37815 - protein, 172 aa, Zea mays subsp. mays
MGSFLRKQPSYLFILIILHLVAHEARTLSSDGEALLAFKKAVTNSDGVFLNWREQDADPCNWKGVRCDSHSKRVINLILAYHRLVGPIPPEIGRLNQLQTLSLQGNSLYGSLPPELGNCTKLQQLYLQGNYLSGYIPSEFGELVELEALDLSSNTLSGSVPHSLDKCPNLHH

SEQ ID NO: 37816 - DNA, 482 bp, Zea mays subsp. mays
cccccccccccccagaggggaggaggagaatacagcaacaatcgaattctttcaaagcctatgggtgcttgacatatgttgcactgattgggaattgactttatccccaaatacaatagtgaaaatggcaacaaacattagggagataaacataaagaggggaagaatctggcacagcagtatttcatggagatttcttggtaacattcacaagcttcgagtgattgagcctacaagtccttgggagacaagtaataaggatgaatttatggacatggtgaagctggagcttcttgacctgtcagggaataccacaatacaatttttgccaagcttgtcaggtgcaatcagcctcagaacccttattctagatggttgtattgaattgcaacatgttgtgcctgaaacactccctccatggcttgaaacatttagctttgatggaggatataaacaagctaaaatctcatgtatctccttgg

SEQ ID NO: 37817 - protein, 160 aa, Zea mays subsp. mays
PPPPRGEEENTATIEFFQSLWVLDICCTDWELTLSPNTIVKMATNIREINIKRGRIWHSSISWRFLGNIHKLRVIEPTSPWETSNKDEFMDMVKLELLDLSGNTTIQFLPSLSGAISLRTLILDGCIELQHVVPETLPPWLETFSFDGGYKQAKISCISL

SEQ ID NO: 37818 - protein, 119 aa, Zea mays subsp. mays
MATNIREINIKRGRIWHSSISWRFLGNIHKLRVIEPTSPWETSNKDEFMDMVKLELLDLSGNTTIQFLPSLSGAISLRTLILDGCIELQHVVPETLPPWLETFSFDGGYKQAKISCISL

SEQ ID NO: 37819 - DNA, 2147 bp, Zea mays subsp. mays
gagctgaggcgataccttgagagaatattaagagttcgttcgactggatggacacagggtgtattcgccaattttgctgctgaaagtatggttcctaaaggccctgaatgggcaggaggaaactgggagatcaaaacacctaccaacattaagaatatacctcagtgggagcttgcaggagaagtcatgccttatatgaagacaactgatgctggtatcccatctgttgttgcagatcatattggtgtgtacctgggtgtgatgaaaggaaggggtaatgttgtggaagtaagtgaaaagagtttggttaaagctatagctgcagctagcagtgagaacacacagccggtgtcttctgcatcagcagagaaaagtaaggcaattcctcgtggtgattcggttggtgatactttggcaaggcaactgggagtccagattgcatcttctgatgaacaggcaaaagctgccgaggacttcaagaagactttatatggtgttgttgatgatggaagtagtgatgaagacgagtcaacctcaaagactaaaaagatacatataaggatacgtgataaaccggctgcacctactgtagatgtcaacaaattgaaagaagccactaaacagctaggcttgggtcccccgctgagtaggacaaggtcattatcagggacacctcaagacttcaatcaggctcctacacaaccaggaggtccagccgcagctgtttccccagcaatgccaaattctgcgattgatttatttggaacaaatactttagtgcagccgcaagcaccctctagttccacaggtcctgttattgcaggcatgggagtgacggctgggccgatccctgaggacttcttccagaacactattccatcgcatcaacttgcggctcaactacctcctcctggaatagtcctgtcacggatggctcaacccgctcctggcattgaacaaggccgaccagtacctaatcaaatgatggctaatgttggtcttccagatggtggggtgccaccacaagcaccaccgcagcagtcccagtttcctccgcagcagtcccagtttcctcagcaaccaggcattcctatggattctattggcctgcctgatggtggtgtccccccacagagtcagccacttccttcacaaggccagtttcttccttcacaggcacagggctttcaacttggtattcctgctccatcacaaccaattgatctcagcgctctcgagggtcctggagcggcgaagcaagctgctcgccctccagcacctactgctgtgcggcctggccaggtaccacgcggggcccctgctgcagaatgctacaagatggctcttgctcatcttgagcagaatcagcttaccgatgcactatcttgtttggacgaagcattcttagcccttgcaaaggaccagtcacgtgaagccgacatcaaagcgcaggccaccatttgtgctcagtacaagatcgcagttgctctgctgcaggaaattgctcgtctgcaaagggttcaaggagctggtgctctcagtgcgaaggaggaaatggccaggctatctcggcaccttgcttccctgcccatccaggccaagcacaggatcaactgcatcaggaccgccatcaagcggaacatggaggtccagaactacgcctacgccaagcagatgctggacctcctctactccaaggcgcccccgacgaagcaggacgagctcaagagcctgatcgacatgtgcgtccagaggggcctgacgaacaaatccatcgacccgttcgaggacccctcgcagttctgctccgtgaccctcagccggctgtcgaccatcggccacgacgtgtgcgacctctgcggcgccaagttctcggcgctctccgcacccggttgcgtcatctgtggcatggggagcatcaagagatccgacgccctcgctggtgggcctggacccgtgccgtcacctttcggctgaaggtcgagtctgctcctttcgtcctccatcggtcctgatattgtatctatagtgttcagtttgcgttcattacattcgattcgttgcagcttgtattgtatgtagcctttttgacgtgtagcacgcttggtgttgagagcaatgtacacctgtactgttgggttggttgt

SEQ ID NO: 37820 - protein, 658 aa, Zea mays subsp. mays
ELRRYLERILRVRSTGWTQGVFANFAAESMVPKGPEWAGGNWEIKTPTNIKNIPQWELAGEVMPYMKTTDAGIPSVVADHIGVYLGVMKGRGNVVEVSEKSLVKAIAAASSENTQPVSSASAEKSKAIPRGDSVGDTLARQLGVQIASSDEQAKAAEDFKKTLYGVVDDGSSDEDESTSKTKKIHIRIRDKPAAPTVDVNKLKEATKQLGLGPPLSRTRSLSGTPQDFNQAPTQPGGPAAAVSPAMPNSAIDLFGTNTLVQPQAPSSSTGPVIAGMGVTAGPIPEDFFQNTIPSHQLAAQLPPPGIVLSRMAQPAPGIEQGRPVPNQMMANVGLPDGGVPPQAPPQQSQFPPQQSQFPQQPGIPMDSIGLPDGGVPPQSQPLPSQGQFLPSQAQGFQLGIPAPSQPIDLSALEGPGAAKQAARPPAPTAVRPGQVPRGAPAAECYKMALAHLEQNQLTDALSCLDEAFLALAKDQSREADIKAQATICAQYKIAVALLQEIARLQRVQGAGALSAKEEMARLSRHLASLPIQAKHRINCIRTAIKRNMEVQNYAYAKQMLDLLYSKAPPTKQDELKSLIDMCVQRGLTNKSIDPFEDPSQFCSVTLSRLSTIGHDVCDLCGAKFSALSAPGCVICGMGSIKRSDALAGGPGPVPSPFG

SEQ ID NO: 37821 - protein, 629 aa, Zea mays subsp. mays
MVPKGPEWAGGNWEIKTPTNIKNIPQWELAGEVMPYMKTTDAGIPSVVADHIGVYLGVMKGRGNVVEVSEKSLVKAIAAASSENTQPVSSASAEKSKAIPRGDSVGDTLARQLGVQIASSDEQAKAAEDFKKTLYGVVDDGSSDEDESTSKTKKIHIRIRDKPAAPTVDVNKLKEATKQLGLGPPLSRTRSLSGTPQDFNQAPTQPGGPAAAVSPAMPNSAIDLFGTNTLVQPQAPSSSTGPVIAGMGVTAGPIPEDFFQNTIPSHQLAAQLPPPGIVLSRMAQPAPGIEQGRPVPNQMMANVGLPDGGVPPQAPPQQSQFPPQQSQFPQQPGIPMDSIGLPDGGVPPQSQPLPSQGQFLPSQAQGFQLGIPAPSQPIDLSALEGPGAAKQAARPPAPTAVRPGQVPRGAPAAECYKMALAHLEQNQLTDALSCLDEAFLALAKDQSREADIKAQATICAQYKIAVALLQEIARLQRVQGAGALSAKEEMARLSRHLASLPIQAKHRINCIRTAIKRNMEVQNYAYAKQMLDLLYSKAPPTKQDELKSLIDMCVQRGLTNKSIDPFEDPSQFCSVTLSRLSTIGHDVCDLCGAKFSALSAPGCVICGMGSIKRSDALAGGPGPVPSPFG

SEQ ID NO: 37822 - protein, 596 aa, Zea mays subsp. mays
MPYMKTTDAGIPSVVADHIGVYLGVMKGRGNVVEVSEKSLVKAIAAASSENTQPVSSASAEKSKAIPRGDSVGDTLARQLGVQIASSDEQAKAAEDFKKTLYGVVDDGSSDEDESTSKTKKIHIRIRDKPAAPTVDVNKLKEATKQLGLGPPLSRTRSLSGTPQDFNQAPTQPGGPAAAVSPAMPNSAIDLFGTNTLVQPQAPSSSTGPVIAGMGVTAGPIPEDFFQNTIPSHQLAAQLPPPGIVLSRMAQPAPGIEQGRPVPNQMMANVGLPDGGVPPQAPPQQSQFPPQQSQFPQQPGIPMDSIGLPDGGVPPQSQPLPSQGQFLPSQAQGFQLGIPAPSQPIDLSALEGPGAAKQAARPPAPTAVRPGQVPRGAPAAECYKMALAHLEQNQLTDALSCLDEAFLALAKDQSREADIKAQATICAQYKIAVALLQEIARLQRVQGAGALSAKEEMARLSRHLASLPIQAKHRINCIRTAIKRNMEVQNYAYAKQMLDLLYSKAPPTKQDELKSLIDMCVQRGLTNKSIDPFEDPSQFCSVTLSRLSTIGHDVCDLCGAKFSALSAPGCVICGMGSIKRSDALAGGPGPVPSPFG

SEQ ID NO: 37823 - DNA, 2512 bp, Zea mays subsp. mays
gtccccccccccccccaacgggtggaaaattagaattatgtgttgtttgtgaataaagataggcatataaagggacaaaattaacgaatctctctgataatccagtatcattgaatattatgctatatatctgaaagcagaggtcagaaaaaatcaatcgataacgtttctctcgtggatatcttgcttttactttttttaatttggctggaacttctgctcgcactttttaactcttcctgcctctagcacaatctctatatcctgtcgcaagtactacatataccattgatcattgccttcaatgcatcgtggtccaaaataaatggatctatgtgcatcattgaaattcaacgaccatgtgaatggtagtcagttggcagatataacttggagcagactgccttgctaacagttccatgtgaagttcaagtttggattctgtgtagattgttactatgaaatacaggcagtagcttttttcatataactttttcctggcacttccttttgccattataatgaagtgagaaagaggtctttggcctcttttaaatttgaactcttgtttctatttttgggtgctgcgtctcctgttaatttgtttagccctttgctgattagtgatttcttagttccctagtaatatatgttttggatgttgcagatagagtctctttctttaacattccatggacacgaccttattgtggattctgatttggagctgaactacggaaggtaaacacataaatacataatgctaccattcagttacgagctggtatgctcttggagcatgtcacttgtaccttttatctgttatatttttatttgatatatcaggcgatacggtttgcttgggttgaatggctgtggaaaatctactcttctcacagcaataggctgcagagaacttcctatccctgaacacatggacatataccatctaagccatgagattgaagcttctgacatgtctgcactgcaagccattgttagttgtgacgaagaaagagtgaagttggaaaaggaagctgaaattttggctgcacaggatgatggtggtggtgaagcattggagcgtgtttatgagcgtctagatgcaatggatgctggaactgcagaaaagcgagctgctgaaattttatttggtctgggttttgacaaacaaatgcaagcaaagaaaactaaagatttctctggaggttggcgtatgaggattgctttagcaagagcactgtttatgaatccaacaatccttttgcttgatgagcccacaaaccatctagatcttgaggcttgtgtctggttggaagagacactgaagaaatttgaccgcatacttgttgtcatatcacactcccaagattttctaaatggagtgtgtactaacattatccatatgcaaaacaagaagctcaagttatacaccggtaactacgatcagtatgttcaaactcgctccgatcttgaagagaatcaaatgaagcagtacaaatgggagcaggaacagattgcttcaatgaaggagtacattgctcgcttcggtcatggttctgcaaagcttgctcgtcaggctcagagcaaagagaaaactcttgcaaagatggagcgaggtggtctcaccgagaaggttgttagggacagagttctagtgttcaggtttacagatgttggcaaacttcctccacctgtgctgcagtttgttgaagtcaagtttgggtatacaccagataatctcatatacaagagtcttgactttggagttgatcttgactctagaatcgcattggttggtcccaatggtgcagggaagagcactcttctgaagcttatgactggtgaccttgctccattagatggcatggttcggcgccacaatcacctgcgcattgcacagtaccatcagcatcttgcggacaagctggatctggacatgccggctctggcttacatgatgaaggaataccctgggaccgaagaagagaagatgcgagctgctgttggcaggtttggcctatcaggaaaggcgcaggtgatgccaatgaggaatctttctgatgggcaaaggagccgtgtcatctttgcatggttggcatataggcagccgcaactgctactgctcgatgagccgacaaatcatttggacattgagaccattgactccctggcggaggcactgaatgagtgggatggtggtttggtcttggtgagccatgatttcaggctgatcaaccaggttgctcaagagatttgggtgtgtgagaatcaggcggtgacaaggtgggaaggtgatatcatggatttcaaggcacacttgaagagcaaggctggtttatctgattagagggctttttccagcaaccatgagctttttaactctgtatcacgaagtcccagttttccaatagcgaactatcagagtactttattgtatcggatttcttttgacttgcattgcaacctgattaccttatactacctggaatatttatttatatatcttttg

SEQ ID NO: 37824 - protein, 471 aa, Zea mays subsp. mays
MDIYHLSHEIEASDMSALQAIVSCDEERVKLEKEAEILAAQDDGGGEALERVYERLDAMDAGTAEKRAAEILFGLGFDKQMQAKKTKDFSGGWRMRIALARALFMNPTILLLDEPTNHLDLEACVWLEETLKKFDRILVVISHSQDFLNGVCTNIIHMQNKKLKLYTGNYDQYVQTRSDLEENQMKQYKWEQEQIASMKEYIARFGHGSAKLARQAQSKEKTLAKMERGGLTEKVVRDRVLVFRFTDVGKLPPPVLQFVEVKFGYTPDNLIYKSLDFGVDLDSRIALVGPNGAGKSTLLKLMTGDLAPLDGMVRRHNHLRIAQYHQHLADKLDLDMPALAYMMKEYPGTEEEKMRAAVGRFGLSGKAQVMPMRNLSDGQRSRVIFAWLAYRQPQLLLLDEPTNHLDIETIDSLAEALNEWDGGLVLVSHDFRLINQVAQEIWVCENQAVTRWEGDIMDFKAHLKSKAGLSD

SEQ ID NO: 37825 - protein, 457 aa, Zea mays subsp. mays
MSALQAIVSCDEERVKLEKEAEILAAQDDGGGEALERVYERLDAMDAGTAEKRAAEILFGLGFDKQMQAKKTKDFSGGWRMRIALARALFMNPTILLLDEPTNHLDLEACVWLEETLKKFDRILVVISHSQDFLNGVCTNIIHMQNKKLKLYTGNYDQYVQTRSDLEENQMKQYKWEQEQIASMKEYIARFGHGSAKLARQAQSKEKTLAKMERGGLTEKVVRDRVLVFRFTDVGKLPPPVLQFVEVKFGYTPDNLIYKSLDFGVDLDSRIALVGPNGAGKSTLLKLMTGDLAPLDGMVRRHNHLRIAQYHQHLADKLDLDMPALAYMMKEYPGTEEEKMRAAVGRFGLSGKAQVMPMRNLSDGQRSRVIFAWLAYRQPQLLLLDEPTNHLDIETIDSLAEALNEWDGGLVLVSHDFRLINQVAQEIWVCENQAVTRWEGDIMDFKAHLKSKAGLSD

SEQ ID NO: 37826 - protein, 413 aa, Zea mays subsp. mays
MDAGTAEKRAAEILFGLGFDKQMQAKKTKDFSGGWRMRIALARALFMNPTILLLDEPTNHLDLEACVWLEETLKKFDRILVVISHSQDFLNGVCTNIIHMQNKKLKLYTGNYDQYVQTRSDLEENQMKQYKWEQEQIASMKEYIARFGHGSAKLARQAQSKEKTLAKMERGGLTEKVVRDRVLVFRFTDVGKLPPPVLQFVEVKFGYTPDNLIYKSLDFGVDLDSRIALVGPNGAGKSTLLKLMTGDLAPLDGMVRRHNHLRIAQYHQHLADKLDLDMPALAYMMKEYPGTEEEKMRAAVGRFGLSGKAQVMPMRNLSDGQRSRVIFAWLAYRQPQLLLLDEPTNHLDIETIDSLAEALNEWDGGLVLVSHDFRLINQVAQEIWVCENQAVTRWEGDIMDFKAHLKSKAGLSD

SEQ ID NO: 37827 - DNA, 2365 bp, Zea mays subsp. mays
cccccccccccgcgctcccctctaccgcctccgcaccgcagagccgcagccaagcaagctgcgcccctggacttggcctcaccggtgaagcggagctcgaggataggcggtgctcgggagataccaagcggtcggccgcaggcgccacgtcggcggagatgacggacggtcaccacttcaacaacatcctcctcggagggcgcggcggcacaaaccctggtcagtttaaagtgcattctggtggacttgcatggaagagacaaggtggaggaaagaccattgagatcgacaaagctgatgtaaccgcagttacttggatgaaagtccccagagcatatcagcttggagtcaggattaaggctggcctgttctacagatttattggcttccgtgaacaggatgtaagcaacttgaccaacttcatacaaaagaatatgggtgtcacaccagatgaaaaacagctttctgttagtggccagaattggggagggattgatatagatggtttgacttcaatgtttgttactcttgcctctgtaggaaacatgctaacctttatggttggttcaaagcaagcatttgaggtgtccctaccagatgttgcacaaacccagatgcaaggaaaaacagatgttctcttagagcttcatgttgatgatactactggagccaatgagaaagactccctcatggatttgagttttcatgtgcctacttcgaatactcagtttgttggggatgagagtcgccctccggctcatattttatgggagaccatattgaaatttgctgatgttggttcttctgaagaaccagttgtcacatttgaaggaattgcgattcttacaccaagaggacgttatagtgttgaacttcatctgtcatttctgcgactccaaggacaagctaacgattttaaaatccaatacagcagtattgttcgcctctttcttttgccaaagtcaaacaatcctcatacatttgttgttatcactcttgacccaccaatccgtaaaggacaaacattgtatcctcacattgttattcagtttgagacagaggcagtagtggaaagagatctggcattgagtaaagagctgttggttgaaaaatacaaggacaggctcgaggaatcttacaagggtctaatacatgaggtatttaccaaagttcttcgtggtctatctggtgctaaagtcacaaggccaggttctttcagaagttgccaagatggatatgcagttaaatcatctctcaaagctgaagatggactgttgtatccacttgaaaagggtttctttttcctgccaaagccacctacactcattcttcatgaggagattgagtttgttgagtttgaacgtcatggtgctgggggtgccagtatatcatctcactattttgacctccttgtcaaactgaaaaatgaccaagagcatctcttcagaaacattcaaaggaatgaataccacaacctcttcaatttcatcaatggaaagaacattaaaataatgaaccttggaggagatggtcaaggtgcaagtggtgtagttacagatgttctacgagacactgatgatgatgctgttgatccacatctagagcgtattaagaatcaggccggggatgaggaaagcgatgaagaggatgaagattttgttgcagacaaggatgatagtggatctcctactgatgactcaggtgatgaggaatcagatgctagtgatagtggtggtgaaaaggagaaatcatccaagaaggaagcaagcagttcaaagccagttcagaaaagaaagcataaggccagggatgacgaaggacaagagaagaaaaagccaaagaagaaaaaagatccgaatgctccgaaacgagccatgaccccgttcatgtatttctcaatggctgagcgaggaaacatgaagagcagcaacccagatttgcctacgactgagatcgcaaagaagcttggggagatgtggcaaaagatgtcaggcgaagagaaacagccttacatccagcaggcccaggtcgacaagaaacgttatgaaaaagaatccgctgtctatcgcggtgaagctacagtcgatgtggattctgggaacgagtctgactagagatccaagctcttgggctggcatggtggcacgggatgaaagtctagtgccatgtgtgctattgttatgtcagcaactgttgccaacaacattgctgacagtaaagagagtttctctcgcagcgtacctctgcagggcaaaagaatgtacgagtgtagtctagtgattttgtgtaaaacaaccaacatacgtggttttcttagagatggtaagacgtcaatttaactgctgtcgattggctgttttgcctc

SEQ ID NO: 37828 - protein, 703 aa, Zea mays subsp. mays
PPPALPSTASAPQSRSQASCAPGLGLTGEAELEDRRCSGDTKRSAAGATSAEMTDGHHFNNILLGGRGGTNPGQFKVHSGGLAWKRQGGGKTIEIDKADVTAVTWMKVPRAYQLGVRIKAGLFYRFIGFREQDVSNLTNFIQKNMGVTPDEKQLSVSGQNWGGIDIDGLTSMFVTLASVGNMLTFMVGSKQAFEVSLPDVAQTQMQGKTDVLLELHVDDTTGANEKDSLMDLSFHVPTSNTQFVGDESRPPAHILWETILKFADVGSSEEPVVTFEGIAILTPRGRYSVELHLSFLRLQGQANDFKIQYSSIVRLFLLPKSNNPHTFVVITLDPPIRKGQTLYPHIVIQFETEAVVERDLALSKELLVEKYKDRLEESYKGLIHEVFTKVLRGLSGAKVTRPGSFRSCQDGYAVKSSLKAEDGLLYPLEKGFFFLPKPPTLILHEEIEFVEFERHGAGGASISSHYFDLLVKLKNDQEHLFRNIQRNEYHNLFNFINGKNIKIMNLGGDGQGASGVVTDVLRDTDDDAVDPHLERIKNQAGDEESDEEDEDFVADKDDSGSPTDDSGDEESDASDSGGEKEKSSKKEASSSKPVQKRKHKARDDEGQEKKKPKKKKDPNAPKRAMTPFMYFSMAERGNMKSSNPDLPTTEIAKKLGEMWQKMSGEEKQPYIQQAQVDKKRYEKESAVYRGEATVDVDSGNESD

SEQ ID NO: 37829 - protein, 651 aa, Zea mays subsp. mays
MTDGHHFNNILLGGRGGTNPGQFKVHSGGLAWKRQGGGKTIEIDKADVTAVTWMKVPRAYQLGVRIKAGLFYRFIGFREQDVSNLTNFIQKNMGVTPDEKQLSVSGQNWGGIDIDGLTSMFVTLASVGNMLTFMVGSKQAFEVSLPDVAQTQMQGKTDVLLELHVDDTTGANEKDSLMDLSFHVPTSNTQFVGDESRPPAHILWETILKFADVGSSEEPVVTFEGIAILTPRGRYSVELHLSFLRLQGQANDFKIQYSSIVRLFLLPKSNNPHTFVVITLDPPIRKGQTLYPHIVIQFETEAVVERDLALSKELLVEKYKDRLEESYKGLIHEVFTKVLRGLSGAKVTRPGSFRSCQDGYAVKSSLKAEDGLLYPLEKGFFFLPKPPTLILHEEIEFVEFERHGAGGASISSHYFDLLVKLKNDQEHLFRNIQRNEYHNLFNFINGKNIKIMNLGGDGQGASGVVTDVLRDTDDDAVDPHLERIKNQAGDEESDEEDEDFVADKDDSGSPTDDSGDEESDASDSGGEKEKSSKKEASSSKPVQKRKHKARDDEGQEKKKPKKKKDPNAPKRAMTPFMYFSMAERGNMKSSNPDLPTTEIAKKLGEMWQKMSGEEKQPYIQQAQVDKKRYEKESAVYRGEATVDVDSGNESD

SEQ ID NO: 37830 - protein, 598 aa, Zea mays subsp. mays
MKVPRAYQLGVRIKAGLFYRFIGFREQDVSNLTNFIQKNMGVTPDEKQLSVSGQNWGGIDIDGLTSMFVTLASVGNMLTFMVGSKQAFEVSLPDVAQTQMQGKTDVLLELHVDDTTGANEKDSLMDLSFHVPTSNTQFVGDESRPPAHILWETILKFADVGSSEEPVVTFEGIAILTPRGRYSVELHLSFLRLQGQANDFKIQYSSIVRLFLLPKSNNPHTFVVITLDPPIRKGQTLYPHIVIQFETEAVVERDLALSKELLVEKYKDRLEESYKGLIHEVFTKVLRGLSGAKVTRPGSFRSCQDGYAVKSSLKAEDGLLYPLEKGFFFLPKPPTLILHEEIEFVEFERHGAGGASISSHYFDLLVKLKNDQEHLFRNIQRNEYHNLFNFINGKNIKIMNLGGDGQGASGVVTDVLRDTDDDAVDPHLERIKNQAGDEESDEEDEDFVADKDDSGSPTDDSGDEESDASDSGGEKEKSSKKEASSSKPVQKRKHKARDDEGQEKKKPKKKKDPNAPKRAMTPFMYFSMAERGNMKSSNPDLPTTEIAKKLGEMWQKMSGEEKQPYIQQAQVDKKRYEKESAVYRGEATVDVDSGNESD

SEQ ID NO: 37831 - DNA, 691 bp, Zea mays subsp. mays
gtggcaacatggggctggctctgcaagttgtattggatatggaagcaaacaatgtcaagccaaatgtcgttacatatagtacgcttatggatggattctccaaactggagaaatatgatgaggcactcaagttgcgtgaaaagatgaagtctttgagaatacaactggaccgagtttgctacaacaccttactggccatatatgtgaagacagggaaatatgatgaaattgctactgtatgtgaagaaatggagaaattgggcattgagaaggacactgttacttacaattccttgattaatggatacggaaagcaaggacgcttggacatggtcgctttccttgttcaagatatgcgggcgcaaggcgtagctcctagtgtgctgacatactcaactttgatagatatctattcgaaggcaggaatgcatggagatgcatttaatgtctatttggattttaaggagtctggtctaaaggcagatgttgttctgttcagctcttttattgatactttggccaagaatggcttggttgagtgtgctttgtctttgcttgatgagatgatgaagatgggtatcaagccaaatgttgtaacctacaacacaatcattgatgcatttggcaagtcgaagatttttactgaggaggattctgatattggtgacatgcgaattgttggggtttatgg

SEQ ID NO: 37832 - protein, 229 aa, Zea mays subsp. mays
GNMGLALQVVLDMEANNVKPNVVTYSTLMDGFSKLEKYDEALKLREKMKSLRIQLDRVCYNTLLAIYVKTGKYDEIATVCEEMEKLGIEKDTVTYNSLINGYGKQGRLDMVAFLVQDMRAQGVAPSVLTYSTLIDIYSKAGMHGDAFNVYLDFKESGLKADVVLFSSFIDTLAKNGLVECALSLLDEMMKMGIKPNVVTYNTIIDAFGKSKIFTEEDSDIGDMRIVGVY

SEQ ID NO: 37833 - protein, 227 aa, Zea mays subsp. mays
MGLALQVVLDMEANNVKPNVVTYSTLMDGFSKLEKYDEALKLREKMKSLRIQLDRVCYNTLLAIYVKTGKYDEIATVCEEMEKLGIEKDTVTYNSLINGYGKQGRLDMVAFLVQDMRAQGVAPSVLTYSTLIDIYSKAGMHGDAFNVYLDFKESGLKADVVLFSSFIDTLAKNGLVECALSLLDEMMKMGIKPNVVTYNTIIDAFGKSKIFTEEDSDIGDMRIVGVY

SEQ ID NO: 37834 - protein, 217 aa, Zea mays subsp. mays
MEANNVKPNVVTYSTLMDGFSKLEKYDEALKLREKMKSLRIQLDRVCYNTLLAIYVKTGKYDEIATVCEEMEKLGIEKDTVTYNSLINGYGKQGRLDMVAFLVQDMRAQGVAPSVLTYSTLIDIYSKAGMHGDAFNVYLDFKESGLKADVVLFSSFIDTLAKNGLVECALSLLDEMMKMGIKPNVVTYNTIIDAFGKSKIFTEEDSDIGDMRIVGVY

SEQ ID NO: 37835 - DNA, 1442 bp, Zea mays subsp. mays
gctctttcttcgcattcttctcctcctatcggactttgccacaccagatcggaaaatcccaatcctcttttcctttgttttttttgctatcttcaatcaaaaactctccgacagattcaatgaagcagcaaaagagataaaaccctaacaaaagtaaacaatcggagttttaatcttcttcttcttcggagccggagttttgtctgatctgtcggagaggacgtgtcggcatctattaaaatcctagctggacttccacatcactttactcaattagaagctgttttgagtaacacaagtaagtagtaagcttataaaacaatgggaacgagcgaagacaagatgccatttaagactaccaaaccaacatcttcggctcaggaagttcctcccacaccgtatccagattggcaaaattcaatgcaggcttattatggcggaggaggtactccaaatccttttttcccatccccagttggatctcctagtcctcacccctatatgtggggtgctcaacaccatatgatgccgccttatggcaccccagttccgtacccagcaatgtatcccccgggggcagtctatgctcatcctagcatgcccatgcctcctaattctggtcctaccaacaaggagcctgcgaaggaccaagcttctggcaagaagtcaaaggggaactcgaaaaaaaaggctgaaggaggtgataaagcgctctctggttcagggaacgatggtgcctctcatagtgatgaaagtgtcacagcgggttcatctgatgaaaatgatgagaatgccaatcaacaggaacagggttcaattcgaaagccaagctttggacagatgcttgctgacgcaagttctcaaagtacgactggtgaaatccaaggttcggtgcccatgaagccggtagccccggggactaatctgaatatcgggatggacttatggtcttcccaagctggtgtaccagtgaaggatgaacgagagctcaagcggcagaagaggaaacaatctaacagtgaatccgctaggcggtctagattgcggaagcaggccgaatgcgaacaacttcaacaaagagtagagagtttgtcgaacgagaatcaaagcctgagagatgagctacagagactctcaagcgaatgtgataagctcaagtctgagaacaactcaatccaggatgagttgcagagagtacttggagcagaggctgtagctaatctagaacagaatgctgctgggtcgaaagatggtgaaggaacaaattaacacttaggaaaattggaactttacaacggattattgggatttttcaacaccggataaaaaaaactgagtccaaagtcatttgagattacgtaactatacaatcgtttgacatttttgtgtaatagagatttgacctaaaaaaaaaaaaaaaaaaactcgagggggggcccggt

SEQ ID NO: 37836 - protein, 315 aa, Zea mays subsp. mays
MGTSEDKMPFKTTKPTSSAQEVPPTPYPDWQNSMQAYYGGGGTPNPFFPSPVGSPSPHPYMWGAQHHMMPPYGTPVPYPAMYPPGAVYAHPSMPMPPNSGPTNKEPAKDQASGKKSKGNSKKKAEGGDKALSGSGNDGASHSDESVTAGSSDENDENANQQEQGSIRKPSFGQMLADASSQSTTGEIQGSVPMKPVAPGTNLNIGMDLWSSQAGVPVKDERELKRQKRKQSNSESARRSRLRKQAECEQLQQRVESLSNENQSLRDELQRLSSECDKLKSENNSIQDELQRVLGAEAVANLEQNAAGSKDGEGTN

SEQ ID NO: 37837 - protein, 308 aa, Zea mays subsp. mays
MPFKTTKPTSSAQEVPPTPYPDWQNSMQAYYGGGGTPNPFFPSPVGSPSPHPYMWGAQHHMMPPYGTPVPYPAMYPPGAVYAHPSMPMPPNSGPTNKEPAKDQASGKKSKGNSKKKAEGGDKALSGSGNDGASHSDESVTAGSSDENDENANQQEQGSIRKPSFGQMLADASSQSTTGEIQGSVPMKPVAPGTNLNIGMDLWSSQAGVPVKDERELKRQKRKQSNSESARRSRLRKQAECEQLQQRVESLSNENQSLRDELQRLSSECDKLKSENNSIQDELQRVLGAEAVANLEQNAAGSKDGEGTN

SEQ ID NO: 37838 - protein, 282 aa, Zea mays subsp. mays
MQAYYGGGGTPNPFFPSPVGSPSPHPYMWGAQHHMMPPYGTPVPYPAMYPPGAVYAHPSMPMPPNSGPTNKEPAKDQASGKKSKGNSKKKAEGGDKALSGSGNDGASHSDESVTAGSSDENDENANQQEQGSIRKPSFGQMLADASSQSTTGEIQGSVPMKPVAPGTNLNIGMDLWSSQAGVPVKDERELKRQKRKQSNSESARRSRLRKQAECEQLQQRVESLSNENQSLRDELQRLSSECDKLKSENNSIQDELQRVLGAEAVANLEQNAAGSKDGEGTN

SEQ ID NO: 37839 - DNA, 2036 bp, Zea mays subsp. mays
ggggacaaattcgcagttggattcagcatatgcattttttatgctgacataggatgtgctcaaccatccgtggactccctctagttgcacaaaccacctcagtgctctctctttcttcgaatcgggctaataatgggcagtgcttgccaagctggcacagacgggccttcccgcaaggatgtgttagggatagggaatgccgccttagagaatggccaccatcaggctgaagctgacgcagatgaatggagggaaaaggaagaggacttggccaacgggcacagtgcgccaccgccaggcatgcagcaggtggatgagcataaggaggaacaaagacaaagcattcactgggagaggttcctacctgtgaagacactgagagtcttgctggtggagaatgatgactctactcgtcaggtggtcagtgccctgctccgtaagtgctgctatgaagttattcctgctgaaaatggtttgcatgcatggcgatatcttgaagatctgcagaacaacatcgaccttgtattgactgaggttttcatgacttgtctatctggtatcggtctgcttagcaaaatcacaagtcacaaaatttgcaaagacattcctgtgattatgatgtctacgaatgattctatgagtatggtgtttaagtgtttgtcgaagggagcagttgatttcttggtaaaaccactacgtaagaatgagcttaagaacctttggcagcatgtttggaggcgatgccacagttccagtggaagtgaaagtggcatccagacacagaagtgtgccaaactaaatactggcgacgagtatgagaacggcagtgacagcaatcatgatgatgaagaaaatgatgacggcgacgatgacgacttcagtgttggactcaatgctagggatggaagtgacaatggcagtggtactcaaagctcatggacaaagcgtgctgtggagattgacagcccacaacctatatctcccgatcaactagttgatccacctgatagtacatgtgcacaagtaattcaccctagatcagagatatgcagtaacaagtggttaccgacagcaaacaaaaggaatgtcaagaaacagaaggagaataaagatgaatctatgggaagatacttaggaataggtgctcctaggaactcaagtgcagaatatcaatcatctctcaatgatgtatctgttaatccaatagaaaaaggacatgagaatcacatgtccaaatgcaaatctaaaaaggaaacaatggcagaagatgattgtacaaacatgcctagtgcaacaaatgctgaaactgctgatttgattagctcaatagccagaaacacagaaggccaacaagcagtacaagccgttgacgcaccagatggcccttccaaaatggctaatggaaatgataagaatcatgattctcatatcgaagtgacaccccatgagttgggtttgaagagatcgagaacaaatggagctacagcggaaatccatgatgagcgaaatattctgaaaagatcagatcagtcagccttcaccaggtaccatacatctgtggcttccaatcaaggtggagcaagatatggggaaagctcttcaccacaagataacagttctgaggccatgaaaacggactctacatgcaagatgaagtcaaattcagatgctgctccaataaagcagggctccaatggcagtagcaataacgatgtgggatccagtacaaagaatgttgctgcaaggccttcgggtgacagggagagagtagcgtcaccattagccatcaaatctacccagcatgcctcagcatttcatactatacagaatcaaacgtcaccagctaatctgattggggaagacaaagctgatgaaggaatttccaatgcagtgaaaatgagccacccaacagaggttccacaagggtgcgtccagcatcatcatcatgtgcattattacctccatgttatgacacagaaacagccatcaacagcccgtggatgtttaaacacaataaagtgggaactggagggggg

SEQ ID NO: 37840 - protein, 634 aa, Zea mays subsp. mays
MGSACQAGTDGPSRKDVLGIGNAALENGHHQAEADADEWREKEEDLANGHSAPPPGMQQVDEHKEEQRQSIHWERFLPVKTLRVLLVENDDSTRQVVSALLRKCCYEVIPAENGLHAWRYLEDLQNNIDLVLTEVFMTCLSGIGLLSKITSHKICKDIPVIMMSTNDSMSMVFKCLSKGAVDFLVKPLRKNELKNLWQHVWRRCHSSSGSESGIQTQKCAKLNTGDEYENGSDSNHDDEENDDGDDDDFSVGLNARDGSDNGSGTQSSWTKRAVEIDSPQPISPDQLVDPPDSTCAQVIHPRSEICSNKWLPTANKRNVKKQKENKDESMGRYLGIGAPRNSSAEYQSSLNDVSVNPIEKGHENHMSKCKSKKETMAEDDCTNMPSATNAETADLISSIARNTEGQQAVQAVDAPDGPSKMANGNDKNHDSHIEVTPHELGLKRSRTNGATAEIHDERNILKRSDQSAFTRYHTSVASNQGGARYGESSSPQDNSSEAMKTDSTCKMKSNSDAAPIKQGSNGSSNNDVGSSTKNVAARPSGDRERVASPLAIKSTQHASAFHTIQNQTSPANLIGEDKADEGISNAVKMSHPTEVPQGCVQHHHHVHYYLHVMTQKQPSTARGCLNTIKWELEG

SEQ ID NO: 37841 - protein, 578 aa, Zea mays subsp. mays
MQQVDEHKEEQRQSIHWERFLPVKTLRVLLVENDDSTRQVVSALLRKCCYEVIPAENGLHAWRYLEDLQNNIDLVLTEVFMTCLSGIGLLSKITSHKICKDIPVIMMSTNDSMSMVFKCLSKGAVDFLVKPLRKNELKNLWQHVWRRCHSSSGSESGIQTQKCAKLNTGDEYENGSDSNHDDEENDDGDDDDFSVGLNARDGSDNGSGTQSSWTKRAVEIDSPQPISPDQLVDPPDSTCAQVIHPRSEICSNKWLPTANKRNVKKQKENKDESMGRYLGIGAPRNSSAEYQSSLNDVSVNPIEKGHENHMSKCKSKKETMAEDDCTNMPSATNAETADLISSIARNTEGQQAVQAVDAPDGPSKMANGNDKNHDSHIEVTPHELGLKRSRTNGATAEIHDERNILKRSDQSAFTRYHTSVASNQGGARYGESSSPQDNSSEAMKTDSTCKMKSNSDAAPIKQGSNGSSNNDVGSSTKNVAARPSGDRERVASPLAIKSTQHASAFHTIQNQTSPANLIGEDKADEGISNAVKMSHPTEVPQGCVQHHHHVHYYLHVMTQKQPSTARGCLNTIKWELEG

SEQ ID NO: 37842 - protein, 498 aa, Zea mays subsp. mays
MTCLSGIGLLSKITSHKICKDIPVIMMSTNDSMSMVFKCLSKGAVDFLVKPLRKNELKNLWQHVWRRCHSSSGSESGIQTQKCAKLNTGDEYENGSDSNHDDEENDDGDDDDFSVGLNARDGSDNGSGTQSSWTKRAVEIDSPQPISPDQLVDPPDSTCAQVIHPRSEICSNKWLPTANKRNVKKQKENKDESMGRYLGIGAPRNSSAEYQSSLNDVSVNPIEKGHENHMSKCKSKKETMAEDDCTNMPSATNAETADLISSIARNTEGQQAVQAVDAPDGPSKMANGNDKNHDSHIEVTPHELGLKRSRTNGATAEIHDERNILKRSDQSAFTRYHTSVASNQGGARYGESSSPQDNSSEAMKTDSTCKMKSNSDAAPIKQGSNGSSNNDVGSSTKNVAARPSGDRERVASPLAIKSTQHASAFHTIQNQTSPANLIGEDKADEGISNAVKMSHPTEVPQGCVQHHHHVHYYLHVMTQKQPSTARGCLNTIKWELEG

SEQ ID NO: 37843 - DNA, 575 bp, Zea mays subsp. mays
attggacttaggaacaataacacaagtgaatatatgagaactctatggaacaaaataatcacagcaaagcaaaatgttgtaggaacaaagtgggtgttttgcaacaagcaagatgagcacggggtggtgacaagaaacaaggctcgacttatggcaaaaggttatgcccaagtcgcatgtttggatttcgaggagactttttctcctgtagctaggctcaagtcaatacgtatattattgacctatgctgctcgccactcgtttaagttgtttcaaacggacgtgaatagcgtcttcctaaatggaccaatcaagaggaagtatatgtggaacaacctcaggcttcgaggatgacaggtatcccgaccatgtctacaagctctctaaggcgctctacggacttaagcaagctccaagagcatggtatgaatgccttagaggttttcttatttctaatgctttcaaggttgggaaagttgatcctactctctttattaagacttgtaatggtgatttgtttgtatgccaaatatatgttgatgatataatatttgtgtcggggaccataattaggg

SEQ ID NO: 37844 - protein, 117 aa, Zea mays subsp. mays
IGLRNNNTSEYMRTLWNKIITAKQNVVGTKWVFCNKQDEHGVVTRNKARLMAKGYAQVACLDFEETFSPVARLKSIRILLTYAARHSFKLFQTDVNSVFLNGPIKRKYMWNNLRLRG

SEQ ID NO: 37845 - protein, 106 aa, Zea mays subsp. mays
MRTLWNKIITAKQNVVGTKWVFCNKQDEHGVVTRNKARLMAKGYAQVACLDFEETFSPVARLKSIRILLTYAARHSFKLFQTDVNSVFLNGPIKRKYMWNNLRLRG

SEQ ID NO: 37846 - protein, 91 aa, Zea mays subsp. mays
MDQSRGSICGTTSGFEDDRYPDHVYKLSKALYGLKQAPRAWYECLRGFLISNAFKVGKVDPTLFIKTCNGDLFVCQIYVDDIIFVSGTIIR

SEQ ID NO: 37847 - DNA, 2976 bp, Zea mays subsp. mays
gatggggggtctgttccaaagaagggcagtaggtatgttccatccttcttgccaccatcatttgcaaaatagcctgagaaaaagaaggaaggggagaggccaaaggaaaaggaaaagggaaagccacgagtaatagatagattcttggaggaaatcaagcttgaacaagagcagcgagagaagcgccatcaggatcgagatcaccgccgtgaaggtcgccatggcgatagctccatgtcctcgagccggtttgatgaactaccagatgaatttgatccgactgggagatttccaggatcatttgatgatggtgatcctcaaaccaccaacttatatgttggcaatctatctcccaaggtcgatgagaattttcttttgaggacatttggtcggtttggacctattgctagtgtcaagattatgtggcctagaacagaagaggaacgcagaaggcaaagaaattgtggttttgttgccttcatgaatagaacagatggacaagcagcaaaggatgaaatgcaaggtgttattgtgtatgactatgaactgaagattgggtggggtaaatctgttgctcttccgtcacaggctttgcctgctcctcctccaggacacatggcaatcagaaataaggagggtggtacagctacagtcatactttctggtcctggcggccctgctgttgcatctattaaaccacaaacctcagagctggtccttacaccaaatgttcctgatattgtggttgctccacctgatgatgggcatcttcggcatgtgattgacacaatggctctgcacgtacttgatggtggatgtgcttttgaacaagctgtaatggagagagggcgaggaaatcctttatttgatttcttgttcaatcttaaatctaaagagcacacatattatgtttggaggctatactcatttgcccagggtgatactctacaacgatggagaacagaaccctacatcatgatcacaggaagtggaagatgggtcccacctcccttgtcgtccaacagaagccctgaacgtgaaaaggaatctacatttgctgctggtagaagcaggcgtgttgaagtggagcgtacattgactgactcacagcgtgatgaatttgaggacatgctgcgagctttgacattagagaggagccaaataaaagacgccatgggatttgccttggataatgctgatgcagctggcgagattgttgaggttcttacagaatccttgacactcaaggagacgtctattccaacaaaggttgctcggcttatgctagtgtatgacatccttcataacagtagcgctcctgtgaagaacgcatctgcattccgaacgaagtttgaagcttctttgccagatgttatggagagctttaatgacttgtatcgcagtatcactggaaggattactgctgaagctctgaaggagaaggttatgaaagttctacaagtttgggcagactggttcctgttttctgatgcatttcttaatgggctgagggctacttttcttagatcaggcaactctggtgttgttccgtttcactcgttatgcggtgatgcacccgaaattaaaaagaaaggtagctctgaggacggaaatgatggatttaagcttaatgaagacggtgccttggctactggaaaggcagcagcgacaaaggagctattagggctcccgctagctgaacttgagcgccgctgtagacataatggcctctctctgtgcggtggtaaagaaatgatggtcgccaggctgcttaacttggaagaggctgagaaggaacgaatttacgagaaggatgttgacatgaaatatgtgcagggtgaacagcatgtggttggaagagaggacagtggtgtgaatgctcatagtacttcaaggtttgatgaaggttctaatggtgatgaattagatgcctctcggaacagtatgagagctggtaaaggacgttctggaggatctgcttctgccgaacttgaatcatttccaagcaagaagccgaaatacgatcctgttttgccagcttctaaatggagtcgagaggatgacatcagtgacgatgaagataggaaaggtggccgaggcttgggattaagctattcgtccggaagcgatattgctgatggtctcggaaaggtcgatacaacagaagctagtactgaccacacaagtcatcatcatgatacgattgttgatgaagagcacaggcataagttgaggcagattgaaatttctgtcatgcagtaccgtgaatctcttgaggagcagggtctgcgtgacttggatgagattgagaggaaggttgccagccatcgaagacgtctccagtcagaatatggtttatccactccaactgatggtgctaacagcaggcgatcttctgaaagaacatcatcgtcgtcggagcggaaagagaggcatggcgatgcacatgatcatcctaggaaacgtcgccggagcgagagtagaagctgcagtcctccaaggaagtctcaggagagggatcgagagcacaatcgcagtagggaccgagatagggtacgcgagaaaagtgcaagccgagggcgagacgaccaccacgacagaagccgagatagagaggacaggagaaaggggaggtgaccgacccgaaaaacctcgtcactatgcaccatttgccctaaccgaagggcccaggagcatcatttgagctgggctacacgcccaccagcatctccatcggtaaacatatcttccgcaccaggcaggttaccctggtctgctccatgcttcgtctgcaataggagtttttgaggattaagttgaggttttgtaaagaagacttgttcgttacttttttttgtggattattaagatatatcctatgtgtagtttatgcttaaaatttaaaaccaatgttgaatacagccagacccagaattgtcagtatcagacaaccgaggtatggactgcgattctgtt

SEQ ID NO: 37848 - protein, 800 aa, Zea mays subsp. mays
MSSSRFDELPDEFDPTGRFPGSFDDGDPQTTNLYVGNLSPKVDENFLLRTFGRFGPIASVKIMWPRTEEERRRQRNCGFVAFMNRTDGQAAKDEMQGVIVYDYELKIGWGKSVALPSQALPAPPPGHMAIRNKEGGTATVILSGPGGPAVASIKPQTSELVLTPNVPDIVVAPPDDGHLRHVIDTMALHVLDGGCAFEQAVMERGRGNPLFDFLFNLKSKEHTYYVWRLYSFAQGDTLQRWRTEPYIMITGSGRWVPPPLSSNRSPEREKESTFAAGRSRRVEVERTLTDSQRDEFEDMLRALTLERSQIKDAMGFALDNADAAGEIVEVLTESLTLKETSIPTKVARLMLVYDILHNSSAPVKNASAFRTKFEASLPDVMESFNDLYRSITGRITAEALKEKVMKVLQVWADWFLFSDAFLNGLRATFLRSGNSGVVPFHSLCGDAPEIKKKGSSEDGNDGFKLNEDGALATGKAAATKELLGLPLAELERRCRHNGLSLCGGKEMMVARLLNLEEAEKERIYEKDVDMKYVQGEQHVVGREDSGVNAHSTSRFDEGSNGDELDASRNSMRAGKGRSGGSASAELESFPSKKPKYDPVLPASKWSREDDISDDEDRKGGRGLGLSYSSGSDIADGLGKVDTTEASTDHTSHHHDTIVDEEHRHKLRQIEISVMQYRESLEEQGLRDLDEIERKVASHRRRLQSEYGLSTPTDGANSRRSSERTSSSSERKERHGDAHDHPRKRRRSESRSCSPPRKSQERDREHNRSRDRDRVREKSASRGRDDHHDRSRDREDRRKGR

SEQ ID NO: 37849 - protein, 738 aa, Zea mays subsp. mays
MWPRTEEERRRQRNCGFVAFMNRTDGQAAKDEMQGVIVYDYELKIGWGKSVALPSQALPAPPPGHMAIRNKEGGTATVILSGPGGPAVASIKPQTSELVLTPNVPDIVVAPPDDGHLRHVIDTMALHVLDGGCAFEQAVMERGRGNPLFDFLFNLKSKEHTYYVWRLYSFAQGDTLQRWRTEPYIMITGSGRWVPPPLSSNRSPEREKESTFAAGRSRRVEVERTLTDSQRDEFEDMLRALTLERSQIKDAMGFALDNADAAGEIVEVLTESLTLKETSIPTKVARLMLVYDILHNSSAPVKNASAFRTKFEASLPDVMESFNDLYRSITGRITAEALKEKVMKVLQVWADWFLFSDAFLNGLRATFLRSGNSGVVPFHSLCGDAPEIKKKGSSEDGNDGFKLNEDGALATGKAAATKELLGLPLAELERRCRHNGLSLCGGKEMMVARLLNLEEAEKERIYEKDVDMKYVQGEQHVVGREDSGVNAHSTSRFDEGSNGDELDASRNSMRAGKGRSGGSASAELESFPSKKPKYDPVLPASKWSREDDISDDEDRKGGRGLGLSYSSGSDIADGLGKVDTTEASTDHTSHHHDTIVDEEHRHKLRQIEISVMQYRESLEEQGLRDLDEIERKVASHRRRLQSEYGLSTPTDGANSRRSSERTSSSSERKERHGDAHDHPRKRRRSESRSCSPPRKSQERDREHNRSRDRDRVREKSASRGRDDHHDRSRDREDRRKGR

SEQ ID NO: 37850 - protein, 718 aa, Zea mays subsp. mays
MNRTDGQAAKDEMQGVIVYDYELKIGWGKSVALPSQALPAPPPGHMAIRNKEGGTATVILSGPGGPAVASIKPQTSELVLTPNVPDIVVAPPDDGHLRHVIDTMALHVLDGGCAFEQAVMERGRGNPLFDFLFNLKSKEHTYYVWRLYSFAQGDTLQRWRTEPYIMITGSGRWVPPPLSSNRSPEREKESTFAAGRSRRVEVERTLTDSQRDEFEDMLRALTLERSQIKDAMGFALDNADAAGEIVEVLTESLTLKETSIPTKVARLMLVYDILHNSSAPVKNASAFRTKFEASLPDVMESFNDLYRSITGRITAEALKEKVMKVLQVWADWFLFSDAFLNGLRATFLRSGNSGVVPFHSLCGDAPEIKKKGSSEDGNDGFKLNEDGALATGKAAATKELLGLPLAELERRCRHNGLSLCGGKEMMVARLLNLEEAEKERIYEKDVDMKYVQGEQHVVGREDSGVNAHSTSRFDEGSNGDELDASRNSMRAGKGRSGGSASAELESFPSKKPKYDPVLPASKWSREDDISDDEDRKGGRGLGLSYSSGSDIADGLGKVDTTEASTDHTSHHHDTIVDEEHRHKLRQIEISVMQYRESLEEQGLRDLDEIERKVASHRRRLQSEYGLSTPTDGANSRRSSERTSSSSERKERHGDAHDHPRKRRRSESRSCSPPRKSQERDREHNRSRDRDRVREKSASRGRDDHHDRSRDREDRRKGR

SEQ ID NO: 37851 - DNA, 553 bp, Zea mays subsp. mays
aaaaatcaaacaagcaacaaaggaatgaggagatggtggcaaggatcctgccgtacttgacctatggggaaccaacagctatggaagctcttattcaacattttgagccctaccttagggactggtctgaatttgatcaattgcagaagcaacatgaagataatccaaaagatgataatataagccaaaagctgtcaacacagcgatctgctatcgacaactttgttcgtgtatcagagtcactcaagactagttcatgtggtgagaggctaaaggatattattctggagaagggcatcacaaaagctgctgttgagcatgtaaaggaaagctttgcttctgctggacagactggcttcagaacaagtgaagaatggacaacaggcttaaaactgccatctattccacccattctgtcaatgttgaaggggctggctaagggccatctgcctacacagaaatgcattgatgaagaaggcatattaccactgctccatgctctggaaggggtgcctggtgaaaatgaaattggtgcaagagcagaaaatctttt

SEQ ID NO: 37852 - protein, 183 aa, Zea mays subsp. mays
KSNKQQRNEEMVARILPYLTYGEPTAMEALIQHFEPYLRDWSEFDQLQKQHEDNPKDDNISQKLSTQRSAIDNFVRVSESLKTSSCGERLKDIILEKGITKAAVEHVKESFASAGQTGFRTSEEWTTGLKLPSIPPILSMLKGLAKGHLPTQKCIDEEGILPLLHALEGVPGENEIGARAENL

SEQ ID NO: 37853 - protein, 173 aa, Zea mays subsp. mays
MVARILPYLTYGEPTAMEALIQHFEPYLRDWSEFDQLQKQHEDNPKDDNISQKLSTQRSAIDNFVRVSESLKTSSCGERLKDIILEKGITKAAVEHVKESFASAGQTGFRTSEEWTTGLKLPSIPPILSMLKGLAKGHLPTQKCIDEEGILPLLHALEGVPGENEIGARAENL

SEQ ID NO: 37854 - protein, 157 aa, Zea mays subsp. mays
MEALIQHFEPYLRDWSEFDQLQKQHEDNPKDDNISQKLSTQRSAIDNFVRVSESLKTSSCGERLKDIILEKGITKAAVEHVKESFASAGQTGFRTSEEWTTGLKLPSIPPILSMLKGLAKGHLPTQKCIDEEGILPLLHALEGVPGENEIGARAENL

SEQ ID NO: 37855 - DNA, 1605 bp, Zea mays subsp. mays
aacttattcaaagatgcatttcagatgcagtgtcgtctggaaatgtatttgctgatgcaatattgcaacatctctaccgctggctttgcagcccacgatcgaaacttcatgatccagctctccatcgtcttcttcataatgtgatgaagaaagtctttgctctattgttggccgagttacgaaagctgggggctaatgttatttttgcaaacttttctaagataatcatagatactggaaaagtagatttgtcatctgcacatgcatattgtgacagcttattaaggaccttgcagacgagggacctcttcgagtggatagaattggaaccattgcacttttggcattccttactgttcatggatcagtataactatggcggaattcaagctaaaacacaaaacgtagactcttcagatggtgataatgatattgatattgtctcaagctggaacatggcagaagatttgcccaaagatacacaggatcattttgtcttaatcgtatcagaattcctatatattccgtggaaattcatgaaggaacaagtagctgctcaagctaccataagggatgatacctcatgcactccatctgtaacaatcatggctgctgagaatcttgagggccaggtgatagaacacctccgtgacaagattagcaattactttgcagacaagcttctaagaactgtaagtgatatacttcaccatttcaaagggaaaagcaaacatgagtcagatgaacctgcaaaatctgatcctcacacgcataaaggcgatgctgcattggagttcattaagcatatctgtgcagttcttgctcttgatcaaaatgttcagcatgatattttgagaatgaggaagaacctgttaaagttagttcgtgtgaaggagtttgctccagaagcacaattccaagacccatgcgcctcattcactctgccaaatgtgatctgcagctattgcaacgattgccgggacctggatctctgccgcgactcggcactccagggccaggagtggagatgcgcggtgccgcagtgcgggcagccgtaccaccgcgagcagatggagaacgcgcttctgcaggtggtccggcagcgagagaggctgtaccacctgcaggacctggtgtgcgtgcgctgcaggcaggtgaaggccgcccatctgtcggagcagtgttcctgcgggggctccttccggtgcaaggaagagccttcgtatttcctcagcaaaatgcgggtgttcctgaaggtggcggtgagccaaaagttcccgctcctgcaggactgcgtgcagtggattcttgaagccagatgatgcgggctgctacttcaacatagttcattagttcacctgatcgctaggttgtacaacgtgcacaggctgtagctccgaagagtgtataaacgggtgtatagcgctgccacacagttcattgtagctctgccctgcttgcaaaaggttgttgttgtattgtagatattcaaaggtggatggcgatagtaaccttggtatcgaaacatctggataactagccctctcgtatgtgacaaaaaaaagaaaaaaaaaaaaaaaaaaaactcgagggggggcccggtac

SEQ ID NO: 37856 - protein, 439 aa, Zea mays subsp. mays
LIQRCISDAVSSGNVFADAILQHLYRWLCSPRSKLHDPALHRLLHNVMKKVFALLLAELRKLGANVIFANFSKIIIDTGKVDLSSAHAYCDSLLRTLQTRDLFEWIELEPLHFWHSLLFMDQYNYGGIQAKTQNVDSSDGDNDIDIVSSWNMAEDLPKDTQDHFVLIVSEFLYIPWKFMKEQVAAQATIRDDTSCTPSVTIMAAENLEGQVIEHLRDKISNYFADKLLRTVSDILHHFKGKSKHESDEPAKSDPHTHKGDAALEFIKHICAVLALDQNVQHDILRMRKNLLKLVRVKEFAPEAQFQDPCASFTLPNVICSYCNDCRDLDLCRDSALQGQEWRCAVPQCGQPYHREQMENALLQVVRQRERLYHLQDLVCVRCRQVKAAHLSEQCSCGGSFRCKEEPSYFLSKMRVFLKVAVSQKFPLLQDCVQWILEAR

SEQ ID NO: 37857 - protein, 392 aa, Zea mays subsp. mays
MKKVFALLLAELRKLGANVIFANFSKIIIDTGKVDLSSAHAYCDSLLRTLQTRDLFEWIELEPLHFWHSLLFMDQYNYGGIQAKTQNVDSSDGDNDIDIVSSWNMAEDLPKDTQDHFVLIVSEFLYIPWKFMKEQVAAQATIRDDTSCTPSVTIMAAENLEGQVIEHLRDKISNYFADKLLRTVSDILHHFKGKSKHESDEPAKSDPHTHKGDAALEFIKHICAVLALDQNVQHDILRMRKNLLKLVRVKEFAPEAQFQDPCASFTLPNVICSYCNDCRDLDLCRDSALQGQEWRCAVPQCGQPYHREQMENALLQVVRQRERLYHLQDLVCVRCRQVKAAHLSEQCSCGGSFRCKEEPSYFLSKMRVFLKVAVSQKFPLLQDCVQWILEAR

SEQ ID NO: 37858 - protein, 320 aa, Zea mays subsp. mays
MDQYNYGGIQAKTQNVDSSDGDNDIDIVSSWNMAEDLPKDTQDHFVLIVSEFLYIPWKFMKEQVAAQATIRDDTSCTPSVTIMAAENLEGQVIEHLRDKISNYFADKLLRTVSDILHHFKGKSKHESDEPAKSDPHTHKGDAALEFIKHICAVLALDQNVQHDILRMRKNLLKLVRVKEFAPEAQFQDPCASFTLPNVICSYCNDCRDLDLCRDSALQGQEWRCAVPQCGQPYHREQMENALLQVVRQRERLYHLQDLVCVRCRQVKAAHLSEQCSCGGSFRCKEEPSYFLSKMRVFLKVAVSQKFPLLQDCVQWILEAR

SEQ ID NO: 37859 - DNA, 1818 bp, Zea mays subsp. mays
atgataatgttttaaaaccagctgctttgaaagtatttcctctaactaggctccagttttgtaagtggcacatcatgaacgaagcacatgataagctgtcatatctcctagatgcatttccatcgttccatgacgactttattaattgcatcaatatgtctgagacaatcgacgagtttgaagaaaattggaaggcattaatttctaaggtcagctctcaaaaaagtgaatggcttgactcggtgtacaattgtcgtcatcattgggtcccggtatatctgagagatacattctttggggatgtgtcattaaagctgcagtgttctagcatgagtttgttgtttgaaggttatattagtgccaaaactgattcacagtcattcattcagcagtatgaaaaagctttagactgttgttatgagaaggaggtgaaggaagaatttgaaacaaaatattcacttcccgatattaagacatcatctcctatagaaagcaaggagcagagttatatacgaggtcaatgtttttgaaattccaacaggaattgatatgtgccactgcttacactgctgaaatggtgaaagaggagggcaatgcttcaatttatacagtggccatatctgaaggaagtgagaagtctgtgacagttcagttctgttcttctggaagttctgcgacatgtagctgtcggatgtttgaatattttggtattgtctgcaggcacatacttactgtgtttggtgtaagaggtgtctctgcacttccttctcattattttgtaaaaagatggacaaagaatgcattggatagaagcttaggcaagaatgttgatgaagttagcagagaggagctcaaggaggagccaagaagtagtgctgaagatgatgagcaatccctgacatggcgttacaacagtttgtgtcgtgaagcactaaggtatgctgaagagggagcatcatcattagaggtttatattgtggcgatgcaagctcttcaagaggctgctaacagggttaatatggccaagagaggtattggacaggtagcaccattagcggtgatgccaattgcagcacaaccaccagaaagttttgcaagaaatcaggagattagttccaataagcaaaagaagagaaaaaagaattcaagtagctcaagggagaacgccacatcaaatcaacttatgtatgtgcgacaacctgttaattttctttttgttgctcctggttcatcaagtgctttacaagggcctagtcaactagttgctgctcctcctgtttctttgagtagcaaatatggacaaacatctggtgcaaataattcagtagatgacaatatacctcctgcttctgtagttgataagttttctgggttacctgaccaaaatgcaccagcaacttcaactggaaatctgcaaggtggagtaacaaaatccataggggctgattcacgaataaaagagagtcatgaattatcccaagctaatggtaacaggggatgcagtgtaaatgcattaaactctagtgctgcgcgacagctcgtgactgtccctattggattgtgccttccacccactgatggctccgagttatctgcggactctggagatatcagtagcaatggcaagttatcacttggtcttcatcaatctcagtcatctgcacaacagccagctacaccgtcacagacaaaaacacttgacagtattgattctcgtgcaaatcctgagggttcatctataagggctgcagccattgcagccggtgcacgcattggatcatcatctgatgcagctacaatcataaaagcgcctcagtc

SEQ ID NO: 37860 - protein, 432 aa, Zea mays subsp. mays
MFLKFQQELICATAYTAEMVKEEGNASIYTVAISEGSEKSVTVQFCSSGSSATCSCRMFEYFGIVCRHILTVFGVRGVSALPSHYFVKRWTKNALDRSLGKNVDEVSREELKEEPRSSAEDDEQSLTWRYNSLCREALRYAEEGASSLEVYIVAMQALQEAANRVNMAKRGIGQVAPLAVMPIAAQPPESFARNQEISSNKQKKRKKNSSSSRENATSNQLMYVRQPVNFLFVAPGSSSALQGPSQLVAAPPVSLSSKYGQTSGANNSVDDNIPPASVVDKFSGLPDQNAPATSTGNLQGGVTKSIGADSRIKESHELSQANGNRGCSVNALNSSAARQLVTVPIGLCLPPTDGSELSADSGDISSNGKLSLGLHQSQSSAQQPATPSQTKTLDSIDSRANPEGSSIRAAAIAAGARIGSSSDAATIIKAPQ

SEQ ID NO: 37861 - protein, 414 aa, Zea mays subsp. mays
MVKEEGNASIYTVAISEGSEKSVTVQFCSSGSSATCSCRMFEYFGIVCRHILTVFGVRGVSALPSHYFVKRWTKNALDRSLGKNVDEVSREELKEEPRSSAEDDEQSLTWRYNSLCREALRYAEEGASSLEVYIVAMQALQEAANRVNMAKRGIGQVAPLAVMPIAAQPPESFARNQEISSNKQKKRKKNSSSSRENATSNQLMYVRQPVNFLFVAPGSSSALQGPSQLVAAPPVSLSSKYGQTSGANNSVDDNIPPASVVDKFSGLPDQNAPATSTGNLQGGVTKSIGADSRIKESHELSQANGNRGCSVNALNSSAARQLVTVPIGLCLPPTDGSELSADSGDISSNGKLSLGLHQSQSSAQQPATPSQTKTLDSIDSRANPEGSSIRAAAIAAGARIGSSSDAATIIKAPQ

SEQ ID NO: 37862 - protein, 375 aa, Zea mays subsp. mays
MFEYFGIVCRHILTVFGVRGVSALPSHYFVKRWTKNALDRSLGKNVDEVSREELKEEPRSSAEDDEQSLTWRYNSLCREALRYAEEGASSLEVYIVAMQALQEAANRVNMAKRGIGQVAPLAVMPIAAQPPESFARNQEISSNKQKKRKKNSSSSRENATSNQLMYVRQPVNFLFVAPGSSSALQGPSQLVAAPPVSLSSKYGQTSGANNSVDDNIPPASVVDKFSGLPDQNAPATSTGNLQGGVTKSIGADSRIKESHELSQANGNRGCSVNALNSSAARQLVTVPIGLCLPPTDGSELSADSGDISSNGKLSLGLHQSQSSAQQPATPSQTKTLDSIDSRANPEGSSIRAAAIAAGARIGSSSDAATIIKAPQ

SEQ ID NO: 37863 - DNA, 998 bp, Zea mays subsp. mays
acttagctcttcctagtgttaaaccagagtaaagcttgaaactttggactaaaagaatggcgtctttgggtgtgtcggaaatgcttggtactccccttaacttcagggcagtttcaagatcgtctgctccgttggcatcaagcccatccacgttcaagactgttgctctcttctctaagaaaaagccagctcctgctaagtccaaggctgtctctgagactagcgatgagctcgccaagtggtatggtcctgacaggagaattttcttgcctgatggtcttttggatagatcagagatcccagagtacttaaacggtgaagttgctggagattatggttatgacccatttggtcttggaaagaagcctgagaactttgctaaataccaagcttttgaattgatccatgcgagatgggctatgttaggagcagctggtttcatcattcctgaagctttaaacaaatatggcgctaactgtggccctgaagctgtctggtttaagactggtgctttgcttcttgatggaaacacattgaactactttggcaagaacatccctatcaaccttgttctcgccgtagttgctgaggttgttctcctcggtggagccgagtactacagaatcaccaacggattggatttcgaggacaagctacacccaggaggtccatttgatcctctaggccttgctaaggaccctgagcaaggagctcttctcaaagtcaaagagatcaagaacgggagattagccatgtttgcgatgctcggtttctttatccaagcgtatgttaccggagaaggtcctgttgagaaccttgcaaagcatctcagtgatccttttggaaacaacttgcttaccgtcatcgctggaactgccgagagagctcccactctctaagccatttctactttttttaagagcttccaaaatgtacactttgttcgattggaactccttttgacaatgttaaaaaaacttccatctgaattttccttg

SEQ ID NO: 37864 - protein, 280 aa, Zea mays subsp. mays
MASLGVSEMLGTPLNFRAVSRSSAPLASSPSTFKTVALFSKKKPAPAKSKAVSETSDELAKWYGPDRRIFLPDGLLDRSEIPEYLNGEVAGDYGYDPFGLGKKPENFAKYQAFELIHARWAMLGAAGFIIPEALNKYGANCGPEAVWFKTGALLLDGNTLNYFGKNIPINLVLAVVAEVVLLGGAEYYRITNGLDFEDKLHPGGPFDPLGLAKDPEQGALLKVKEIKNGRLAMFAMLGFFIQAYVTGEGPVENLAKHLSDPFGNNLLTVIAGTAERAPTL

SEQ ID NO: 37865 - protein, 272 aa, Zea mays subsp. mays
MLGTPLNFRAVSRSSAPLASSPSTFKTVALFSKKKPAPAKSKAVSETSDELAKWYGPDRRIFLPDGLLDRSEIPEYLNGEVAGDYGYDPFGLGKKPENFAKYQAFELIHARWAMLGAAGFIIPEALNKYGANCGPEAVWFKTGALLLDGNTLNYFGKNIPINLVLAVVAEVVLLGGAEYYRITNGLDFEDKLHPGGPFDPLGLAKDPEQGALLKVKEIKNGRLAMFAMLGFFIQAYVTGEGPVENLAKHLSDPFGNNLLTVIAGTAERAPTL

SEQ ID NO: 37866 - protein, 159 aa, Zea mays subsp. mays
MLGAAGFIIPEALNKYGANCGPEAVWFKTGALLLDGNTLNYFGKNIPINLVLAVVAEVVLLGGAEYYRITNGLDFEDKLHPGGPFDPLGLAKDPEQGALLKVKEIKNGRLAMFAMLGFFIQAYVTGEGPVENLAKHLSDPFGNNLLTVIAGTAERAPTL

SEQ ID NO: 37867 - DNA, 1715 bp, Zea mays subsp. mays
attccactagaacactaccaccacctccacctcgtcgtctcccaccaccgccgcgcgcgagccctagcccgatctagccggcggcaggcactagatcccgccgcttgcggcatcccgggacgcgcctcgccgaattcgccgctccccgcactgcaacacgcccggaccactgttactgcatgccatgtagtattttattattggtggaggttgtcaccacaagacatatgttgtgatttctcgatggcgaggagatgaaacaggtgtgggggcggagcagcaaggacatgacaaccatgccccctccgcgccaccgtggcgctgctaagaagcccatgtggatcatagtgctattgtcgttgatttgtgttgcccttatgggggcctatgtctacccaccacggcactactctgcatgctacttctttgcttcgagtgtctgtaccccgttcaaggattggctacctgctgttgttcgggagcgaactgatgaagagatagtgtcatccgtggttattaggaatctcctttcgatgcctatggctgtgtcgaagaacccaaagattgcctttatgttcttgacaccaggttcattgccttttgagaagttgtgggaggaatttttacagggtcatgatggtcgatattccatctatatccatgcatctcgtgaaataccctgtacattctagctccctctttgttggacgtgaaattcgcagtgaaaaggtagtatgggggaggatttcgatggtgatgcagagaagaggctgttagcaaatgcattggaagatgtcgataatcaatttttgtcttgctttctgacagctgtgttccagtacatacatttgattacatatataattatctgatgggaacaaatgtcagcttcattgattgcttcctggatcctggcccacatggaactggaaggtattccatggaaatgcttcctgaaatagaacagagggacttcaggaagggtgcccagtggtttgctataacacgaaggcatgctttattgattctggctgacaacctttactacaataagttcaagctgtactgcaagccagcagaggaacgcaactgtattgctgatgagcattatttgccaaccttcttcaatatggtcgatcctggtggaatagctaactggtcagtgactcatgttgattggtccgagggaaaatggcatccaaggtcatatagagctgcagatgttacctatgaactcttaaagaacataacgtctgtcaatgagaatttccgcattacaagtgatgataagaaagttgtgacacggatcccatgtatgtggaatggaacaaaaaggccatgctacctttttgctagaaagttctacccagaatctctgaacaacttgctgaagctattttccagttacacatcggcttgattcgacatttttttgttcatttggcctaggagattcccctagttttttttctgcttcatgtaaattgtgaaattgatacttagaggcttaacacagagttacgggtacagggccagtgatgtaattctgtgagtcccttggtagggctgaggtgctgtttgtttagtattgacctgccctccctgtcgttcttggtgccgtctgttaggttcctagcgcccattccctgagtaacagggtttttgtcagttattactgattaattcttttagacatgaagagattcgaaatcagt

SEQ ID NO: 37868 - protein, 182 aa, Zea mays subsp. mays
MGTNVSFIDCFLDPGPHGTGRYSMEMLPEIEQRDFRKGAQWFAITRRHALLILADNLYYNKFKLYCKPAEERNCIADEHYLPTFFNMVDPGGIANWSVTHVDWSEGKWHPRSYRAADVTYELLKNITSVNENFRITSDDKKVVTRIPCMWNGTKRPCYLFARKFYPESLNNLLKLFSSYTSA

SEQ ID NO: 37869 - protein, 159 aa, Zea mays subsp. mays
MEMLPEIEQRDFRKGAQWFAITRRHALLILADNLYYNKFKLYCKPAEERNCIADEHYLPTFFNMVDPGGIANWSVTHVDWSEGKWHPRSYRAADVTYELLKNITSVNENFRITSDDKKVVTRIPCMWNGTKRPCYLFARKFYPESLNNLLKLFSSYTSA

SEQ ID NO: 37870 - protein, 157 aa, Zea mays subsp. mays
MLPEIEQRDFRKGAQWFAITRRHALLILADNLYYNKFKLYCKPAEERNCIADEHYLPTFFNMVDPGGIANWSVTHVDWSEGKWHPRSYRAADVTYELLKNITSVNENFRITSDDKKVVTRIPCMWNGTKRPCYLFARKFYPESLNNLLKLFSSYTSA

SEQ ID NO: 37871 - DNA, 1369 bp, Zea mays subsp. mays
ccccccccccggagggccgcgaggacacttagagacaaagagcagctcgtcagctcacccgtctgaagtatctcgccagccggcccgtctcaagcagctcgtcagctcacccgtctgaagcatctcgtcagccggtccgtctcaagtagctcatcagctcgcccgtctcaagcagctcgtcagctcacccgtccgaagtatctcgccagccggcccgttaaattttcccgatggagattcttccgattccggcggagagtttcaaggtaggattcatcggagctggtaaaatggcggagagtatagctagaggtgtggttgcttccggtgtgcttcctcctaatcgtatatgcaccgccgttcactcaaatctcaatcgccgtgatgtcttcgaatcctttggcgtcaatgtcttctccactagcgaagaagttgttaaagaaagcgatgttgtcatattctctgtgaaacctcaagttgttaagaaggctgtcacagaattaaagtcgaagctttcaaagaataagattctggtttctgttgcagctggaatcaagttgaatgatttacaggaatggtctggtcaagatcgattcataagggtgatgcctaatacacctgccgctgttggtgaggcagcttcagttatgagccttggcacaggagcaacggaagaggatggagcaattgttgctatgttgtttggcgcggtggggaagatattgaaagctgatgagaaaatgtttgatgctgtcactggtctcagtggaagtggaccagcatacatatttttagcaattgaagctttagccgatggaggagtagctgctggtttaccccgagagcttgcattgagtttagcttcacagaccgttcttggagctgcaacgatggttagcaaaactgggaagcatccaggtgtgttgaaagatgatgttacctcacctggcggcactacaatagccggagttcatgaactagagaaaggctctttccgggcaacacttatgaatgcagttgttgctgcagctaaacgaagccgcgagctctcacagagctaaatgatacatatgtagttgctgctattgtttcacctcacagattaatcaaaataagggttatgggccttatggcattgcttgtttttaggcgagagttttatcccacttgtcttcgatggtagaggtgaagattatttatctagactatgatgtattagttcagacagaactcagatacttttctataattcttaatctaataaaaatcactttcaaaaaaaaaaaaaaaaaaaactcgagggggggcccggtacccacttcaccctatagtgagtagtattccaattcactggccgtcgttttacatc

SEQ ID NO: 37872 - protein, 276 aa, Zea mays subsp. mays; identical to SEQ ID NO: 5975

SEQ ID NO: 37873 - protein, 256 aa, Zea mays subsp. mays; identical to SEQ ID NO: 5976

SEQ ID NO: 37874 - protein, 151 aa, Zea mays subsp. mays; identical to SEQ ID NO: 5977

SEQ ID NO: 37875 - DNA, 881 bp, Zea mays subsp. mays
tagtcccccccccccccccccgacaacacaacttcagctttaagacagctaaaactaaatacaaagaaacagagatgggtttggttacagaggaggtgagagctaaggcagagatgtacaccggagatgagatatgtagagagaagacaaagtgtttcctcaaggaaatatctatgcccaatggtttattaccattgaaggatatagaagaggttgggtatgacagagagtcaggtgttgtatggctgaagcagaagaagagcatcactcacaagttcacagagatagataagcttgtctcctatggaaccgaagtcacagccattgttgagaccgggaaaatcaagaagctcactggagtcaaagccaaggaacttcttatttgggtcactatcaatgagatctataccgaggaaccccctaccaagatcacgttcaagacaccgaccacactgtccaggactttcccggtcacagcttttatagtcccagaagaacctgccaaggaggaacctgccaaagaggaacctgccaaggagaagagcagcgaagccaccgaggccaaggaggctgttgcaatcaaggaggctgtcgcagtcaaagaggcggcctaatcagctcagcttcagcagataaaagagacccgaatttttaagtgtacttcaagaatttgaacaaatcatggagagttagtgtttctcactgctctaactatcatgtattaactacctaccacttgttgctgcttgttttacctgtaataagatatcaatatcatcctgttccactaaaacttatccttaaaaaaaaaaaaaaaaaaactcgagggggggcccggtacccaattgtttaaacacaataaagttggaactggagggggg

SEQ ID NO: 37876 - protein, 203 aa, Zea mays subsp. mays
VPPPPPRQHNFSFKTAKTKYKETEMGLVTEEVRAKAEMYTGDEICREKTKCFLKEISMPNGLLPLKDIEEVGYDRESGVVWLKQKKSITHKFTEIDKLVSYGTEVTAIVETGKIKKLTGVKAKELLIWVTINEIYTEEPPTKITFKTPTTLSRTFPVTAFIVPEEPAKEEPAKEEPAKEKSSEATEAKEAVAIKEAVAVKEAA

SEQ ID NO: 37877 - protein, 179 aa, Zea mays subsp. mays
MGLVTEEVRAKAEMYTGDEICREKTKCFLKEISMPNGLLPLKDIEEVGYDRESGVVWLKQKKSITHKFTEIDKLVSYGTEVTAIVETGKIKKLTGVKAKELLIWVTINEIYTEEPPTKITFKTPTTLSRTFPVTAFIVPEEPAKEEPAKEEPAKEKSSEATEAKEAVAIKEAVAVKEAA

SEQ ID NO: 37878 - protein, 166 aa, Zea mays subsp. mays
MYTGDEICREKTKCFLKEISMPNGLLPLKDIEEVGYDRESGVVWLKQKKSITHKFTEIDKLVSYGTEVTAIVETGKIKKLTGVKAKELLIWVTINEIYTEEPPTKITFKTPTTLSRTFPVTAFIVPEEPAKEEPAKEEPAKEKSSEATEAKEAVAIKEAVAVKEAA

SEQ ID NO: 37879 - DNA, 3050 bp, Zea mays subsp. mays
ccgtcgcagaattcgcgccaccgcccgcgatggcttcgtcctcgaaggcctccgattcctcccaacgatccaagcggtcggatcaggggatgggcaaggacgccgctgccgcctctgttgtcccgatccacgcgaacctgacgcagctgatacggcaagtccaatcggggcgcctcgcgtacatcaaggagaaattggaggtgaacaggaaaacgctgcagaggcactcctgctcgctgttcgacgtggcagcggcggcggaggtggcgtcgaggggcaccgatggcggcaacgcgctgtcacagcgcgcggcggagagacagtgtgggtcagacctggcaaacgggataggggagagggacgtggtttccgttcaggaggagaacctggctaccggtacgctcgcgctctccagctcgggcgctaccgcgcagcggacaattgtgcggttcgtgaagctgccgctggttgagaagatccctccgtacaccacttggatcttcctggacaaaaaccaaagaatggctgacgatcagtcagttgttggtaggagaaggatatactatgatacagttggaaacgaggctctgatctgcagtgacagtgatgaagaaattccagaaccagaggaagagaaacactttttcacaaagggagaagatcatttgatatggagagctactcaagaccatgggttaaaccaagaggttgttaatgtcctttgccagtttattggtgcaaccccatcagaaattgaggaaagatctgaagtcctatttgagaaaaatgagaagcactcaggatcttcagataagatagagagccgactttctcttgacaaaactatggatgccgttctggattcttttgataatctcttctgccgcagatgcttggtttttgattgccgccttcatggttgttcacagaatttggtatttccatgtgagaagcaaccctacagctttgaccctgatgaaaacaagaagccatgtggtcatttgtgctaccttcgatttccccagtggagagaaggatttaaagagatgcatgatgatggtcttgctggtggtgcaacatatactatggaatcgggaactgcctcacagagagttgatgttaatgttatgtatgaatcagaagattcaaaccgacagaaaggcaacattaggtccatgacactagttggaaccagtggatcaaaaataatttcttctgtcagtgcggaagaaagcactactactccttcagcagatatctctgaaacagagaatgtatcctctgatttgcctcccagtagtttaaggaaacacaagatttcaaaacatggacctaggtacagggagcattctcctggcaaaaggcagaaggttttcacttctgacatttcttttgaaggcaatataatgaataaactttccattccggagattcgtgacacaagactagagtccagagaatctggtggtgataaactacgaattcttgacgagtccactaagaagacttcaaggaaagatatgtgtggggaaagcccagctactaccatggaaaatgtgggaagacagagtaataaagtgtattcaacaaagaatttcttggagtccactctttcttgttggagtgccttagagcgagatctatacttgaagggcatagagatatttggaaagaacagctgtctcatcgccagaaacttactatctggtcttaagacctgcatagaagtggcaaactacatgtataacaatggtgcagcgatggcgaagagacctctcttgaataaatccatctcaggcgactttgcagaaaatgaacaagactacatggagcaagacatggctgccagaacaagaatctatcgtcggaggggccgcaatcgaaagctgaaatatacttggaaatctgcagggcatccaactgttagaaaaagaactgatgacgggaagcaatgttacacacaatatagcccatgtgcgtgccagcaaatgtgtggtaaagattgcccctgtgcggacaagggaacttgctgtgagaagtactgtgggtgttcgaagagctgcaaaaacaagtttagaggctgtcattgtgcaaaaagccaatgcagaagcagacagtgcccctgttttgcagccagtcgtgaatgtgatccagatgtttgtaggaattgctgggtgagctgtggagatggttcactaggtgagccacttgcaagaggtgatggttatcagtgtggaaatatgaagctccttttgaaacaacagcaaaggattttgttaggaagatctgatgttgcaggttggggtgcattcattaagaatcctgtaaataaaaatgattatcttggagaatatactggtgaattgatctctcacaaggaagcagacaaacgcggcaaaatttatgaccgggcaaactcatcttttctgttcgatttaaatgaccagtatgtgttggatgcttatcgcaagggggacaaattgaagttcgcaaatcactcatctaaccccaactgctatgcaaaggtgatgctggtggctggcgaccatcgggttggtatatatgcgaaggagcatattgaggctagcgaggaactcttttatgattatcgttatggacctgaccaggctccggcttgggctaggagacccgaaggatcaaagaaggacgaggcatccgtctctcaccgtcgagcacacaaagtggctcgatagctgaagagtcgctccggatgatacaatatgcagtaaacttaatacttaatacatgattcagtcctagttcattggtagataaacatgctatatactatccattagtaaataaactctcattcatcgagttggagaataaatgcgtataaacatatgtggacctcaggtcgggaaggtggcaaccttgttagtttgagcaccaacaggttctcaaacttgagtggctattgctagagtatcaaataatggctgcgactatagccttgtttgtatattttcttggtgagatgaaataatttgtcaaatgtacactttattcctgaaaaaaaacccccc

SEQ ID NO: 37880 - protein, 903 aa, Zea mays subsp. mays
VAEFAPPPAMASSSKASDSSQRSKRSDQGMGKDAAAASVVPIHANLTQLIRQVQSGRLAYIKEKLEVNRKTLQRHSCSLFDVAAAAEVASRGTDGGNALSQRAAERQCGSDLANGIGERDVVSVQEENLATGTLALSSSGATAQRTIVRFVKLPLVEKIPPYTTWIFLDKNQRMADDQSVVGRRRIYYDTVGNEALICSDSDEEIPEPEEEKHFFTKGEDHLIWRATQDHGLNQEVVNVLCQFIGATPSEIEERSEVLFEKNEKHSGSSDKIESRLSLDKTMDAVLDSFDNLFCRRCLVFDCRLHGCSQNLVFPCEKQPYSFDPDENKKPCGHLCYLRFPQWREGFKEMHDDGLAGGATYTMESGTASQRVDVNVMYESEDSNRQKGNIRSMTLVGTSGSKIISSVSAEESTTTPSADISETENVSSDLPPSSLRKHKISKHGPRYREHSPGKRQKVFTSDISFEGNIMNKLSIPEIRDTRLESRESGGDKLRILDESTKKTSRKDMCGESPATTMENVGRQSNKVYSTKNFLESTLSCWSALERDLYLKGIEIFGKNSCLIARNLLSGLKTCIEVANYMYNNGAAMAKRPLLNKSISGDFAENEQDYMEQDMAARTRIYRRRGRNRKLKYTWKSAGHPTVRKRTDDGKQCYTQYSPCACQQMCGKDCPCADKGTCCEKYCGCSKSCKNKFRGCHCAKSQCRSRQCPCFAASRECDPDVCRNCWVSCGDGSLGEPLARGDGYQCGNMKLLLKQQQRILLGRSDVAGWGAFIKNPVNKNDYLGEYTGELISHKEADKRGKIYDRANSSFLFDLNDQYVLDAYRKGDKLKFANHSSNPNCYAKVMLVAGDHRVGIYAKEHIEASEELFYDYRYGPDQAPAWARRPEGSKKDEASVSHRRAHKVAR

SEQ ID NO: 37881 - protein, 894 aa, Zea mays subsp. mays
MASSSKASDSSQRSKRSDQGMGKDAAAASVVPIHANLTQLIRQVQSGRLAYIKEKLEVNRKTLQRHSCSLFDVAAAAEVASRGTDGGNALSQRAAERQCGSDLANGIGERDVVSVQEENLATGTLALSSSGATAQRTIVRFVKLPLVEKIPPYTTWIFLDKNQRMADDQSVVGRRRIYYDTVGNEALICSDSDEEIPEPEEEKHFFTKGEDHLIWRATQDHGLNQEVVNVLCQFIGATPSEIEERSEVLFEKNEKHSGSSDKIESRLSLDKTMDAVLDSFDNLFCRRCLVFDCRLHGCSQNLVFPCEKQPYSFDPDENKKPCGHLCYLRFPQWREGFKEMHDDGLAGGATYTMESGTASQRVDVNVMYESEDSNRQKGNIRSMTLVGTSGSKIISSVSAEESTTTPSADISETENVSSDLPPSSLRKHKISKHGPRYREHSPGKRQKVFTSDISFEGNIMNKLSIPEIRDTRLESRESGGDKLRILDESTKKTSRKDMCGESPATTMENVGRQSNKVYSTKNFLESTLSCWSALERDLYLKGIEIFGKNSCLIARNLLSGLKTCIEVANYMYNNGAAMAKRPLLNKSISGDFAENEQDYMEQDMAARTRIYRRRGRNRKLKYTWKSAGHPTVRKRTDDGKQCYTQYSPCACQQMCGKDCPCADKGTCCEKYCGCSKSCKNKFRGCHCAKSQCRSRQCPCFAASRECDPDVCRNCWVSCGDGSLGEPLARGDGYQCGNMKLLLKQQQRILLGRSDVAGWGAFIKNPVNKNDYLGEYTGELISHKEADKRGKIYDRANSSFLFDLNDQYVLDAYRKGDKLKFANHSSNPNCYAKVMLVAGDHRVGIYAKEHIEASEELFYDYRYGPDQAPAWARRPEGSKKDEASVSHRRAHKVAR

SEQ ID NO: 37882 - protein, 874 aa, Zea mays subsp. mays
MGKDAAAASVVPIHANLTQLIRQVQSGRLAYIKEKLEVNRKTLQRHSCSLFDVAAAAEVASRGTDGGNALSQRAAERQCGSDLANGIGERDVVSVQEENLATGTLALSSSGATAQRTIVRFVKLPLVEKIPPYTTWIFLDKNQRMADDQSVVGRRRIYYDTVGNEALICSDSDEEIPEPEEEKHFFTKGEDHLIWRATQDHGLNQEVVNVLCQFIGATPSEIEERSEVLFEKNEKHSGSSDKIESRLSLDKTMDAVLDSFDNLFCRRCLVFDCRLHGCSQNLVFPCEKQPYSFDPDENKKPCGHLCYLRFPQWREGFKEMHDDGLAGGATYTMESGTASQRVDVNVMYESEDSNRQKGNIRSMTLVGTSGSKIISSVSAEESTTTPSADISETENVSSDLPPSSLRKHKISKHGPRYREHSPGKRQKVFTSDISFEGNIMNKLSIPEIRDTRLESRESGGDKLRILDESTKKTSRKDMCGESPATTMENVGRQSNKVYSTKNFLESTLSCWSALERDLYLKGIEIFGKNSCLIARNLLSGLKTCIEVANYMYNNGAAMAKRPLLNKSISGDFAENEQDYMEQDMAARTRIYRRRGRNRKLKYTWKSAGHPTVRKRTDDGKQCYTQYSPCACQQMCGKDCPCADKGTCCEKYCGCSKSCKNKFRGCHCAKSQCRSRQCPCFAASRECDPDVCRNCWVSCGDGSLGEPLARGDGYQCGNMKLLLKQQQRILLGRSDVAGWGAFIKNPVNKNDYLGEYTGELISHKEADKRGKIYDRANSSFLFDLNDQYVLDAYRKGDKLKFANHSSNPNCYAKVMLVAGDHRVGIYAKEHIEASEELFYDYRYGPDQAPAWARRPEGSKKDEASVSHRRAHKVAR

SEQ ID NO: 37883 - DNA, 340 bp, Zea mays subsp. mays
  misc_feature (290)..(290): n is a, c, g, or t
gctccgcagcctcaacatatcctacctcaaggggggtaatggatcccttagatcaatttcctcactcgagaggcttgaggaattggcaatggtttgttgttcatgtattgatgatgaaggcctggaattgctgagcaaggggagtgattcgctgcagagtgttgatgtgtcaagatgtgatcatgtgacttcccatgggttagcttcactcatagacggtcgcaattttctccagaagttatatgctgcagattgtttgcatgagataggacagcgttttgtatccaagntggcaacactgaaggaaaccttgacaacgttgaactcgacggtcttgaag

SEQ ID NO: 37884 - protein, 113 aa, Zea mays subsp. mays
  misc_feature (97)..(97): Xaa can be any naturally occurring amino acid
LRSLNISYLKGGNGSLRSISSLERLEELAMVCCSCIDDEGLELLSKGSDSLQSVDVSRCDHVTSHGLASLIDGRNFLQKLYAADCLHEIGQRFVSKXATLKETLTTLNSTVLK

SEQ ID NO: 37885 - protein, 84 aa, Zea mays subsp. mays
  misc_feature (68)..(68): Xaa can be any naturally occurring amino acid
MVCCSCIDDEGLELLSKGSDSLQSVDVSRCDHVTSHGLASLIDGRNFLQKLYAADCLHEIGQRFVSKXATLKETLTTLNSTVLK

SEQ ID NO: 37886 - DNA, 738 bp, Zea mays subsp. mays
ggcgacgacttggcggtccccgctgccgccgtgcccaggcctctacttcgggagttcgggaccttcaccggcgacgagcacccatcgggttgcttcgcaaaacttccaacatccaggatacaattaattacgattccttcaactttatctcgatttataggaggttgcacagagcccatccaacagggtgtctcagacatactgatggatggggtgcccaatatccttgagaaatcatcacatgaatgcatgtactcttggtacttcaccagggaagaactagagaaattttctccatcaaggaaagatggtattactgaaaacaaggaatcagaaattcggcatttatattgttcatttatccgggatgttggcatcaggctgaagctacctcagatgacactagcaacagcagtcatgctttgccatcgcttctatttacaccagtcccttgccaaaaatggatggcagacagttgcaacagtatgtgtatttctggcgtcgaaagttgaagatactccttgtcccctggaccatgtagttagagtggcctatgaaacaatgtataggcgggacactgctgcggctcaaaggatccgtcagaaggatgtttttgagaagcagaaagcgctcattttgatcggagagagattgcttcttacaactattcgatttgatttcaacattcagcatccttatagaccacttcttgatgccatgcaaaatcttggcatcaat

SEQ ID NO: 37887 - protein, 246 aa, Zea mays subsp. mays
GDDLAVPAAAVPRPLLREFGTFTGDEHPSGCFAKLPTSRIQLITIPSTLSRFIGGCTEPIQQGVSDILMDGVPNILEKSSHECMYSWYFTREELEKFSPSRKDGITENKESEIRHLYCSFIRDVGIRLKLPQMTLATAVMLCHRFYLHQSLAKNGWQTVATVCVFLASKVEDTPCPLDHVVRVAYETMYRRDTAAAQRIRQKDVFEKQKALILIGERLLLTTIRFDFNIQHPYRPLLDAMQNLGIN

SEQ ID NO: 37888 - protein, 178 aa, Zea mays subsp. mays
MDGVPNILEKSSHECMYSWYFTREELEKFSPSRKDGITENKESEIRHLYCSFIRDVGIRLKLPQMTLATAVMLCHRFYLHQSLAKNGWQTVATVCVFLASKVEDTPCPLDHVVRVAYETMYRRDTAAAQRIRQKDVFEKQKALILIGERLLLTTIRFDFNIQHPYRPLLDAMQNLGIN

SEQ ID NO: 37889 - protein, 163 aa, Zea mays subsp. mays
MYSWYFTREELEKFSPSRKDGITENKESEIRHLYCSFIRDVGIRLKLPQMTLATAVMLCHRFYLHQSLAKNGWQTVATVCVFLASKVEDTPCPLDHVVRVAYETMYRRDTAAAQRIRQKDVFEKQKALILIGERLLLTTIRFDFNIQHPYRPLLDAMQNLGIN

SEQ ID NO: 37890 - DNA, 2517 bp, Zea mays subsp. mays
atcctgtcatccaccctcgcccaaccgacggctaccggttgtaagattggaatcgtttgatggccgccgccgccgcttcgcctccggttcctttaggacccgatgcctccgatctactggacggggatctccgtctcaagcccgctgtggcaatctcatgggattccgaagcactacacagccatgcagaaaggtgtgagatagagtcaaaagtgtgtgtcattgatccttctctgcttccagctctagatgatttattgcaggacatctatgaatcattgcaaccacagccagtggactatgaacaccgaaaccttatggttaatgttttcaacaaaattgttggagaaatttttggtaaaaataatgagcttccaattgtggaaccatttggatctttcacaatggatctatttactcctcaaagtgacctggacctctctgtgaacttcaatactgatgcaaatgatcagtatcctcgcaagaacaagatttctgctattaggaagcttgcacatgttctattttctcatcagcgtcatggtcgctgttatggtgtttcacctattgtgactgctagagttcctgtactgaaggttattgataagggaactggtgtagagtgtgatatttcagtagaaaacaaagacggcatgtcaagatcagccatatttaaatttatttcatcaattgataaaagattccggatactttgttatctgatgaagttctgggctaaggtacatgatgtgaactgccccaaagatcgaacaatgagctctatggcaattatttctttagtttcttttcatttacagactcggtgtcctccaatattacctgcattttctgccgtattgaaagatggtacagattttgcaagtattgagaagaatgtatcactattccagggttttgggcacagcaataaagagtctattgctgaactttttgtatcactaatgagtaaactagtgtcagtggagggtttatgggagcaagggctctgtgctagcaattttgaagggacatggatatcgaagacctgggcgaagggtgttggcaacttgaatgttgaggacttcttggaccgatctcagaattttgccagatcggtaggggtgaaggagatgcagaaaatatgtgaatgcctaagggctagcgtttctgatttgagcaagttttctaagggtgaaattgctgcgcccaagctaaaggccctgttgtttaagcctttgaaccaggttaacccagtcattaaaccccatcagaaaactattaagaggaagcgtactaatccaaataagaccagaactaaccctattcagaaaaatgctaagaaaaagaaggcccttgagcaggataaattagccatttctcctggtcagaaagatggtaagaagacccttgatcaagagaagtcagttagttctcccattcagaaaggtgctaagaagaccaaaccccttaaccaggataagttagtcatttctcccggccaggaagatgacaagaagccccttgtgcaggatgagccaatagtagtgtctcccatccagaagaataacaataagtatgttgatcaggagaagtcccttcagcaggagaagcaaatcatctctcccggacagaaagatgataagaagagcagcaaggtgggacctgactcagcatgtaatcatgtgcaacagaagaaagtgaaggctactgtatctaccggccgtgctgctaatactcatgtttctagttccaggcctcgctctgtttttatcccccaagcacattggcccagccagccaattgttgatcggtttgcgcatatacctgagcacctgatcagcccttctgcttttagttatgggttgccacaaccacttatgcatccagcctatcctcatcctcattctcatcagggattggtaggtcaaggacagggtaatttccttcatttcaatcctggtattgagctgcagcatcaaggccaggctttcttcggtcctccagctgtctaccaccccatggtgaatgggtttcacccattcggtatcaatggtgctcagcaagtgcagtacatcgacaataggatggtgcagaggccaccatatggttttggcccaggtttctggggatgatggttgcagcctgaggaaaggttggttgctaactagtgggggtttgaggtgaaagttgtcagttcaaagaaaaaaaaagctgttgtgtctaatatactcaaagatttagctttaaataggggccagtggaaaatagctaaccatgtgtctgaaccttgatttgtggtttttgttcggtttcagctctagcttaccttagaagtaaaatgttctgttgatgttggattttaactctagcctatcctgggattaaaaggttttgttgttgttgttgtaagttgtaattgtaactgttaggtttgtactctagtctgatttaaaagtaaaaaggctatattgttgttgttgtatctagacctgtacaaggagaaataatcaaataagg

SEQ ID NO: 37891 - protein, 690 aa, Zea mays subsp. mays
MAAAAASPPVPLGPDASDLLDGDLRLKPAVAISWDSEALHSHAERCEIESKVCVIDPSLLPALDDLLQDIYESLQPQPVDYEHRNLMVNVFNKIVGEIFGKNNELPIVEPFGSFTMDLFTPQSDLDLSVNFNTDANDQYPRKNKISAIRKLAHVLFSHQRHGRCYGVSPIVTARVPVLKVIDKGTGVECDISVENKDGMSRSAIFKFISSIDKRFRILCYLMKFWAKVHDVNCPKDRTMSSMAIISLVSFHLQTRCPPILPAFSAVLKDGTDFASIEKNVSLFQGFGHSNKESIAELFVSLMSKLVSVEGLWEQGLCASNFEGTWISKTWAKGVGNLNVEDFLDRSQNFARSVGVKEMQKICECLRASVSDLSKFSKGEIAAPKLKALLFKPLNQVNPVIKPHQKTIKRKRTNPNKTRTNPIQKNAKKKKALEQDKLAISPGQKDGKKTLDQEKSVSSPIQKGAKKTKPLNQDKLVISPGQEDDKKPLVQDEPIVVSPIQKNNNKYVDQEKSLQQEKQIISPGQKDDKKSSKVGPDSACNHVQQKKVKATVSTGRAANTHVSSSRPRSVFIPQAHWPSQPIVDRFAHIPEHLISPSAFSYGLPQPLMHPAYPHPHSHQGLVGQGQGNFLHFNPGIELQHQGQAFFGPPAVYHPMVNGFHPFGINGAQQVQYIDNRMVQRPPYGFGPGFWG

SEQ ID NO: 37892 - protein, 604 aa, Zea mays subsp. mays
MVNVFNKIVGEIFGKNNELPIVEPFGSFTMDLFTPQSDLDLSVNFNTDANDQYPRKNKISAIRKLAHVLFSHQRHGRCYGVSPIVTARVPVLKVIDKGTGVECDISVENKDGMSRSAIFKFISSIDKRFRILCYLMKFWAKVHDVNCPKDRTMSSMAIISLVSFHLQTRCPPILPAFSAVLKDGTDFASIEKNVSLFQGFGHSNKESIAELFVSLMSKLVSVEGLWEQGLCASNFEGTWISKTWAKGVGNLNVEDFLDRSQNFARSVGVKEMQKICECLRASVSDLSKFSKGEIAAPKLKALLFKPLNQVNPVIKPHQKTIKRKRTNPNKTRTNPIQKNAKKKKALEQDKLAISPGQKDGKKTLDQEKSVSSPIQKGAKKTKPLNQDKLVISPGQEDDKKPLVQDEPIVVSPIQKNNNKYVDQEKSLQQEKQIISPGQKDDKKSSKVGPDSACNHVQQKKVKATVSTGRAANTHVSSSRPRSVFIPQAHWPSQPIVDRFAHIPEHLISPSAFSYGLPQPLMHPAYPHPHSHQGLVGQGQGNFLHFNPGIELQHQGQAFFGPPAVYHPMVNGFHPFGINGAQQVQYIDNRMVQRPPYGFGPGFWG

SEQ ID NO: 37893 - protein, 575 aa, Zea mays subsp. mays
MDLFTPQSDLDLSVNFNTDANDQYPRKNKISAIRKLAHVLFSHQRHGRCYGVSPIVTARVPVLKVIDKGTGVECDISVENKDGMSRSAIFKFISSIDKRFRILCYLMKFWAKVHDVNCPKDRTMSSMAIISLVSFHLQTRCPPILPAFSAVLKDGTDFASIEKNVSLFQGFGHSNKESIAELFVSLMSKLVSVEGLWEQGLCASNFEGTWISKTWAKGVGNLNVEDFLDRSQNFARSVGVKEMQKICECLRASVSDLSKFSKGEIAAPKLKALLFKPLNQVNPVIKPHQKTIKRKRTNPNKTRTNPIQKNAKKKKALEQDKLAISPGQKDGKKTLDQEKSVSSPIQKGAKKTKPLNQDKLVISPGQEDDKKPLVQDEPIVVSPIQKNNNKYVDQEKSLQQEKQIISPGQKDDKKSSKVGPDSACNHVQQKKVKATVSTGRAANTHVSSSRPRSVFIPQAHWPSQPIVDRFAHIPEHLISPSAFSYGLPQPLMHPAYPHPHSHQGLVGQGQGNFLHFNPGIELQHQGQAFFGPPAVYHPMVNGFHPFGINGAQQVQYIDNRMVQRPPYGFGPGFWG

SEQ ID NO: 37894 - DNA, 639 bp, Zea mays subsp. mays
tagataacggatgggtgaaaatacactcttgcagtacacgtcagaggcaaccgtggggtcctttctttcttatccaaaaccaaaaccagcgaaaccaccggccccgcccttgaccaaaactagtccgtcagccggtggctcccgctcccctcgctgccgctcgtaactggggaaggccgcaaccccctcgggcaggcagcggctacccccaccaccaccagtgcaccaccactccaccagcgtggcagcgacgttgctgctgtcggcccgtacgtcctggcgtgtccttggcctacttaacccgcaaggacacgccgccattccgcagggcgagctcaagcctcaagctgggattggcccgtcggcagaacaagtgcacgcgggaccgggcaacatttcccgctgcagccaacaagcagagggggcgacgatatatagccacgggcggccgttgctggatccggcatcttcctcgatcggcaagacgataggatggggttccacctgctggcgttcgtggcggcgaggggcctcatgcaggcgttcaacctgtcggcgccgctcagcctccggctgccgctcgcgcgccacctgccggaggccctcgccgtcctgtacggcgtgctcgccgcgcaagcc

SEQ ID NO: 37895 - protein, 51 aa, Zea mays subsp. mays
MGENTLLQYTSEATVGSFLSYPKPKPAKPPAPPLTKTSPSAGGSRSPRCRS

SEQ ID NO: 37896 - protein, 49 aa, Zea mays subsp. mays
MGFHLLAFVAARGLMQAFNLSAPLSLRLPLARHLPEALAVLYGVLAAQA

SEQ ID NO: 37897 - protein, 36 aa, Zea mays subsp. mays
DNGWVKIHSCSTRQRQPWGPFFLIQNQNQRNHRPRP

SEQ ID NO: 37898 - DNA, 999 bp, Zea mays subsp. mays
  misc_feature (933)..(933): n is a, c, g, or t
  misc_feature (986)..(986): n is a, c, g, or t
  misc_feature (990)..(990): n is a, c, g, or t
  misc_feature (993)..(993): n is a, c, g, or t
  misc_feature (995)..(995): n is a, c, g, or t
ttttcagagatggggcttaaactgcgggttgacatgcctcagcaggctatggatattgccacagtattctttcgtcagtcaaccacagcaagtgaagcaaaggagaacataaaaacacttaatgaccaaagagagagaaatgtcaaagctcttcaagaaaagatgaaattgaacaagaaggaggttcaacgctttaatcctgttgatgctttccccggggatgccataatatttaagggtcttgaatctcctcagaggtctttcagcttcactaaatgttaggatagtttatctggacatcatgaggccatctgctgaatcaactttgttagggagtttgacacacggacaaatacctaacagtcagtggatttttgactcacctgctaactctgatgtggagtctaaactgagaaattatctgcttgagttgggaagcgacaaaattttaggaatacaagtctgcgcatataaagatggaaaggtcataatagatactgctgctggtatgctggggaagtatatccccgacctgttcaacctgattctctttttcctgttttctcagtgactaagggtatcactgctgggatggtacattggcttgtggacaaagggaagctgaagtacgaggaaacagttgccaacatatggccgaattttggaactaacggaaaggagttaataaaggtccatcatcttctaaatcacacatccggtttgcacaatgcactggggtgatgtggtaaagaatgatcctttgttggtatgtgactgggaggagacactaaaccagattacgaagagtacacctgagaccgaacctggttcagcacaaatttaccattacctctccttcggttggctgtgtgggggagtcatagagcatgcatctgggaagaagtttcaagagattctagaagaggctattgntcgtcctcttcacattgagggggagttgtatgttggcattccaccaggtgtcnagtntcngntggc

SEQ ID NO: 37899 - protein, 93 aa, Zea mays subsp. mays
FSEMGLKLRVDMPQQAMDIATVFFRQSTTASEAKENIKTLNDQRERNVKALQEKMKLNKKEVQRFNPVDAFPGDAIIFKGLESPQRSFSFTKC

SEQ ID NO: 37900 - protein, 90 aa, Zea mays subsp. mays
MGLKLRVDMPQQAMDIATVFFRQSTTASEAKENIKTLNDQRERNVKALQEKMKLNKKEVQRFNPVDAFPGDAIIFKGLESPQRSFSFTKC

SEQ ID NO: 37901 - protein, 89 aa, Zea mays subsp. mays
  misc_feature (69)..(69): Xaa can be any naturally occurring amino acid
  misc_feature (87)..(89): Xaa can be any naturally occurring amino acid
MHWGDVVKNDPLLVCDWEETLNQITKSTPETEPGSAQIYHYLSFGWLCGGVIEHASGKKFQEILEEAIXRPLHIEGELYVGIPPGVXXX

SEQ ID NO: 37902 - DNA, 3505 bp, Zea mays subsp. mays
gacaaatatggctgataatggtgatgccaaagggggatctggcgcctatgcaattaatatagagaattttagtaagcggctgaaggtattctatgaccattggaaggagcacaagtctgatctttggggctcgtctgatgctattgcaattgctaccccacctccttctgatgatctccgttatttgaaatcatcagccctggatatttggttacttggatatgaatttccagaaacaataattgttttcatgcacaagcaaatacatgttttaagcagtcagaagaaaggaaatcttattgggaccctcaagaaggctgcaaacgaggctgttggtgttgacattgtgttgcatgtgaaaaccaagaatagtgatggtgctgacttgatggatgacatagtgcatgctgctcgtaatcaatcaaaatcagataagccagttgttggacacatagccaaagaggcacctgagggtaagcttcttgaaacatggataaaaaaattatctggatcaggcctacgactcgttgatgtaacaaacggcttctctgagctctttgctgtgaaggacaccacagagatcacatgtgtgaagaaggctgcttacttaacttcatccgttctgaaaaattttgtgattcctaagttggagaaggttatcgatgaggagaaggaagtctcacactcatcgttgatggatgacgcagagaaggctattctggacccactaaaggtcaaggtgaaattgaagcctgataatgttgatatatgctaccctccagtctttcaaagtgggggtaagtttgatctaaagcctggtgcgtctagcaatgacgagtacctgtattatgattcagcaagtattatcatctgtgcaattggttccaaatacagtagctattgctcaaatgttgctcggacatatcttatcgacgctacccctacacagaataaagcatatgagacccttaggaaagctcatgaagctgctattcaacaagtgaaaccaggcaatcagatgagtgcagtttatcaagctgcagtggctgtgattgagagggatgcacctgaacttcttcctaatctaacaaagtcagctggaactggaataggccttgaattccgagaatctggcttaaatctgaatgccaagaatgatcgtaggataaaaaagggaatggtttttaatgtatcccttggtttgcataacatccaggcagaaacaaccagtgagaagacaaagcagttttcactattattagctgatacagttttagtcaatgaaagaggacatgagatcttaacagcaccctgctccaaggcattcaaagatgttgcttattcgttcaacgaagatgatgatgctgttgctgctgaggttaagataaagtcgaagaccatagatgttatgccaaccaaggcaactctcaggtcagacaaccaggagatgtcgaaggaagagctcaggagacagcaccaggctgaacttgctcgccagaagaatgaagagactgctagaaggcttgctggggttggtactggatctggtgacggacgtggtcctgcgagggcttcaaatgagcttgttgcatataagaatgttaatgatgtaccatttgtaagagatttggtgatccaagtagatcagaagaatgaagctgtcctcttacctatttatggtagtatggttcctttccatgtttctactgtcaagagtgtgacaagtcaccaggacaaccgcacctgcactatccgtatcttcttcaatgtgcctggcatgccattctcaaatgatagcaagtttaattctcaaggtgctatctatctgaaagaaattacattccgctcaaaagatccacggcatagcagtgaagttgttcagcagatcaaaacattgaggaggcaagtggcatcaagggagtcagagagagctgaaagggcaactcttgttacccaggagaaacttcagattggaagcaacagaatgaagatgatgaggctttctgatgtgtggatacgacctgcatttggtggtcgtgggaggaagctcacaggaaatcttgaggctcatttcaatggtttcagatattctacttcaaggtctgatgagcgtgtggacatcatgtttggaaatataaagcatgcctttttccagcctgcagagaaagaaatgattactctccttcacttccatttgcacaaccatatcatggttggaaacaagaagacaaaggatgttcagttctatgttgaagttatggatgttgtacagacgcttgggggcagtagaagatcggcacttgatcctgatgagattgaagaagagcagcgtgagagggataggaagaacagaataaacatggatttccagaactttgtgaacaaggttaacgaccactggtcgcaaccacagttcaaggggcttgacctggagtttgatgtcccccttagagagcttgggttccatggtgtcccatataaagcttctgctttcattattccaacttctacatgtttggttgagctgattgagacccccttccttgtggtgagcctgagcgagatagagattgttaacctggagagggtgggctttgggacaaagaacttcgacatggctatcgtgttcaaggatttcaagaaagacgttctccgcattgactccatcccttcagcatcgcttgacgcgataaaggaatggctggacacaactgacctcaagtactatgagagcaggctgaatctgaactggcgccctatcctgaaaactataatcgatgatcctcagaagttcattgacgatggcggctgggagttcctgaacatggaggcgagtgactcagagactgaggacacagaggaatcagaccaaggctatgtgccttcagacgctgagcccgaatccgagtcagaagatgatgactctgacagtgagtccttggtggaatctgatgatgacgatgaggagtcagacgaggactcagaggaggagaagggcaagacctgggaggagctggagcgtgaggcaagcaacgcggaccgtgagcacggtgcggagtcggacagcgaggaggagaggaggcgccgcaaggcaaagaccttcggcaagtcgcgtgcgccggagcgcagcagcttcaagggagcgccgccctccaagaagccaaagttcaggtgaatgctgccttcggcaattcgctcgtgccaaagtgcagcagcttcaagggagcaccacctccaagaaggcagctctggttaatgggactccttgaagctttggcccccggagtagacgtgtctgtaggagtgtggtttgttatatctagattatctgcagtagcttagtccatctaaatgaaatgtgacagctgaactttggaagtcgcatcattggggaaacgaaatttaagtcgattgatttgttaatgccctcgttgatgtaatatttcccttgttcggtggatttccggtctgtataatatttatgcacgcttgcctttatccatgg

SEQ ID NO: 37903 - protein, 1057 aa, Zea mays subsp. mays
TNMADNGDAKGGSGAYAINIENFSKRLKVFYDHWKEHKSDLWGSSDAIAIATPPPSDDLRYLKSSALDIWLLGYEFPETIIVFMHKQIHVLSSQKKGNLIGTLKKAANEAVGVDIVLHVKTKNSDGADLMDDIVHAARNQSKSDKPVVGHIAKEAPEGKLLETWIKKLSGSGLRLVDVTNGFSELFAVKDTTEITCVKKAAYLTSSVLKNFVIPKLEKVIDEEKEVSHSSLMDDAEKAILDPLKVKVKLKPDNVDICYPPVFQSGGKFDLKPGASSNDEYLYYDSASIIICAIGSKYSSYCSNVARTYLIDATPTQNKAYETLRKAHEAAIQQVKPGNQMSAVYQAAVAVIERDAPELLPNLTKSAGTGIGLEFRESGLNLNAKNDRRIKKGMVFNVSLGLHNIQAETTSEKTKQFSLLLADTVLVNERGHEILTAPCSKAFKDVAYSFNEDDDAVAAEVKIKSKTIDVMPTKATLRSDNQEMSKEELRRQHQAELARQKNEETARRLAGVGTGSGDGRGPARASNELVAYKNVNDVPFVRDLVIQVDQKNEAVLLPIYGSMVPFHVSTVKSVTSHQDNRTCTIRIFFNVPGMPFSNDSKFNSQGAIYLKEITFRSKDPRHSSEVVQQIKTLRRQVASRESERAERATLVTQEKLQIGSNRMKMMRLSDVWIRPAFGGRGRKLTGNLEAHFNGFRYSTSRSDERVDIMFGNIKHAFFQPAEKEMITLLHFHLHNHIMVGNKKTKDVQFYVEVMDVVQTLGGSRRSALDPDEIEEEQRERDRKNRINMDFQNFVNKVNDHWSQPQFKGLDLEFDVPLRELGFHGVPYKASAFIIPTSTCLVELIETPFLVVSLSEIEIVNLERVGFGTKNFDMAIVFKDFKKDVLRIDSIPSASLDAIKEWLDTTDLKYYESRLNLNWRPILKTIIDDPQKFIDDGGWEFLNMEASDSETEDTEESDQGYVPSDAEPESESEDDDSDSESLVESDDDDEESDEDSEEEKGKTWEELEREASNADREHGAESDSEEERRRRKAKTFGKSRAPERSSFKGAPPSKKPKFR

SEQ ID NO: 37904 - protein, 1055 aa, Zea mays subsp. mays
MADNGDAKGGSGAYAINIENFSKRLKVFYDHWKEHKSDLWGSSDAIAIATPPPSDDLRYLKSSALDIWLLGYEFPETIIVFMHKQIHVLSSQKKGNLIGTLKKAANEAVGVDIVLHVKTKNSDGADLMDDIVHAARNQSKSDKPVVGHIAKEAPEGKLLETWIKKLSGSGLRLVDVTNGFSELFAVKDTTEITCVKKAAYLTSSVLKNFVIPKLEKVIDEEKEVSHSSLMDDAEKAILDPLKVKVKLKPDNVDICYPPVFQSGGKFDLKPGASSNDEYLYYDSASIIICAIGSKYSSYCSNVARTYLIDATPTQNKAYETLRKAHEAAIQQVKPGNQMSAVYQAAVAVIERDAPELLPNLTKSAGTGIGLEFRESGLNLNAKNDRRIKKGMVFNVSLGLHNIQAETTSEKTKQFSLLLADTVLVNERGHEILTAPCSKAFKDVAYSFNEDDDAVAAEVKIKSKTIDVMPTKATLRSDNQEMSKEELRRQHQAELARQKNEETARRLAGVGTGSGDGRGPARASNELVAYKNVNDVPFVRDLVIQVDQKNEAVLLPIYGSMVPFHVSTVKSVTSHQDNRTCTIRIFFNVPGMPFSNDSKFNSQGAIYLKEITFRSKDPRHSSEVVQQIKTLRRQVASRESERAERATLVTQEKLQIGSNRMKMMRLSDVWIRPAFGGRGRKLTGNLEAHFNGFRYSTSRSDERVDIMFGNIKHAFFQPAEKEMITLLHFHLHNHIMVGNKKTKDVQFYVEVMDVVQTLGGSRRSALDPDEIEEEQRERDRKNRINMDFQNFVNKVNDHWSQPQFKGLDLEFDVPLRELGFHGVPYKASAFIIPTSTCLVELIETPFLVVSLSEIEIVNLERVGFGTKNFDMAIVFKDFKKDVLRIDSIPSASLDAIKEWLDTTDLKYYESRLNLNWRPILKTIIDDPQKFIDDGGWEFLNMEASDSETEDTEESDQGYVPSDAEPESESEDDDSDSESLVESDDDDEESDEDSEEEKGKTWEELEREASNADREHGAESDSEEERRRRKAKTFGKSRAPERSSFKGAPPSKKPKFR

SEQ ID NO: 37905 - protein, 974 aa, Zea mays subsp. mays
MHKQIHVLSSQKKGNLIGTLKKAANEAVGVDIVLHVKTKNSDGADLMDDIVHAARNQSKSDKPVVGHIAKEAPEGKLLETWIKKLSGSGLRLVDVTNGFSELFAVKDTTEITCVKKAAYLTSSVLKNFVIPKLEKVIDEEKEVSHSSLMDDAEKAILDPLKVKVKLKPDNVDICYPPVFQSGGKFDLKPGASSNDEYLYYDSASIIICAIGSKYSSYCSNVARTYLIDATPTQNKAYETLRKAHEAAIQQVKPGNQMSAVYQAAVAVIERDAPELLPNLTKSAGTGIGLEFRESGLNLNAKNDRRIKKGMVFNVSLGLHNIQAETTSEKTKQFSLLLADTVLVNERGHEILTAPCSKAFKDVAYSFNEDDDAVAAEVKIKSKTIDVMPTKATLRSDNQEMSKEELRRQHQAELARQKNEETARRLAGVGTGSGDGRGPARASNELVAYKNVNDVPFVRDLVIQVDQKNEAVLLPIYGSMVPFHVSTVKSVTSHQDNRTCTIRIFFNVPGMPFSNDSKFNSQGAIYLKEITFRSKDPRHSSEVVQQIKTLRRQVASRESERAERATLVTQEKLQIGSNRMKMMRLSDVWIRPAFGGRGRKLTGNLEAHFNGFRYSTSRSDERVDIMFGNIKHAFFQPAEKEMITLLHFHLHNHIMVGNKKTKDVQFYVEVMDVVQTLGGSRRSALDPDEIEEEQRERDRKNRINMDFQNFVNKVNDHWSQPQFKGLDLEFDVPLRELGFHGVPYKASAFIIPTSTCLVELIETPFLVVSLSEIEIVNLERVGFGTKNFDMAIVFKDFKKDVLRIDSIPSASLDAIKEWLDTTDLKYYESRLNLNWRPILKTIIDDPQKFIDDGGWEFLNMEASDSETEDTEESDQGYVPSDAEPESESEDDDSDSESLVESDDDDEESDEDSEEEKGKTWEELEREASNADREHGAESDSEEERRRRKAKTFGKSRAPERSSFKGAPPSKKPKFR

SEQ ID NO: 37906 - DNA, 2288 bp, Zea mays subsp. mays
ttcacctgaggatacaggtttgagtggcaaacatatatcagggttctatgaggaataccccatccttaaatcagagtatgttcagaatcttgttactgtcactgtgaggagagacattgaagcgcataaaagacttgtggaatttgacactgatattcctggagaagttatcattcattggggagtttgcagagacaatactatgacatgggagatcccaccagaaccacatccaccaaaaacgaaaatattccgacacaaagctcttcaaactttgctgcagcaaaaagctgatggagcaggaaactcaatttcattctcacttgatgcagagtattcttgtctgttttttgtgctcaaacttgacgagtatacttggttgagaaatcttgagaatggatctgatttctatgtgccacttacaagagtggggcagtatggcagcactcaggatcctgacaaggctgaggcacagaaaatagaggataagtcttcacaggctgatggcttaatcagtgatataagaaatctggtggttggcctatcgtctagaagaggtcagaaagctaagaataaagttcttcaagaggacatcctacaagaaatcgaaagacttgcagcagaagcttatagcattttcaggagccccactattgattccgtagatgaatctgtacagctcgatgacacattaagcgcaaagccagcatgttctggcactggatctggttttgagatattgtgccaaggatttaactgggaatctcataaatcagggaaatggtatgttgagcttggcacaaaggccaaggagttgtcgtccttgggtttcaccattgtctggtcaccaccaccaactgattctgtgtcacctgaaggatacatgccaagggatctatataatctaaactcacgatatgggtccatggatgagctgaaggaacttgtgaagattttccatgaagctggtatcaaggttcttggcgacgctgttctaaatcataggtgtgctcagtttcagaacaacaatggtgtctggaatatatttggtggtcgtatgaactgggatgatcgagcagttgttgctgatgatccacatttccagggaagaggaaacaagagcagtggagataatttccatgcagcaccaaacattgatcactcccaagagtttgtgaggaatgatcttaaagaatggctttgctggatgagaaaggaagtcggctacgatggatggagacttgactttgttcgtggtttctggggtggatatgtcaaggactatttggaagcaagtgaaccatactttgcagtaggagagtactgggactccctcagttatacttatggtgaaatggactacaatcaggatgcccacaggcagagaattgttgattggataaatgctacaaatggaactgctggcgcatttgatgttaccactaaaggaatacttcatgcggcgcttgaaagatcagagtattggcgcctgtccgatgaaaaagggaaaccccctggagtattgggttggtggccttcaagagcagtcacatttatagagaatcatgatactggttctactcagggccattggaggttcccctatggtatggaactgcaaggatacgcctacatcctgacacaccctggcactcccgcagtcttctatgaccacatattttcacacttacaaccagagatcgctaaatttatttccattcgacaccgtcaaaagattcattgccgcagcaagatcaagatactaaaggcagagaggagtttatatgcggctgaaattgatgagaaggtaacaatgaaaatcggatcagaacattttgagccaagcggtccccagaactggattgttgctgctgagggtcaagattacaaaatctgggaagcgtcttcatagacttggcgggctgcgagtgccatataactgctcaaagactaaaaagctacaagaaagcataatgctaggagatggcgcctcagaatggtcagctggcgggagctgctgccgctgccgccatggagcagcaaaattcaacaacataagctatggaagcacttgccacggcgataggattatctaataggactactgttgaacattcgatatatccagaaccacccatcatttgcaggcacattggccattaaaatttagcttcgtcctctattttggagctatgtaaaagcatgcacaactctatttatgtgtgaaataaaatttgaatcttcatcaaagaaaaaaaaaaaaaaaaaaactcgagggggggcccggt

SEQ ID NO: 37907 - protein, 636 aa, Zea mays subsp. mays
SPEDTGLSGKHISGFYEEYPILKSEYVQNLVTVTVRRDIEAHKRLVEFDTDIPGEVIIHWGVCRDNTMTWEIPPEPHPPKTKIFRHKALQTLLQQKADGAGNSISFSLDAEYSCLFFVLKLDEYTWLRNLENGSDFYVPLTRVGQYGSTQDPDKAEAQKIEDKSSQADGLISDIRNLVVGLSSRRGQKAKNKVLQEDILQEIERLAAEAYSIFRSPTIDSVDESVQLDDTLSAKPACSGTGSGFEILCQGFNWESHKSGKWYVELGTKAKELSSLGFTIVWSPPPTDSVSPEGYMPRDLYNLNSRYGSMDELKELVKIFHEAGIKVLGDAVLNHRCAQFQNNNGVWNIFGGRMNWDDRAVVADDPHFQGRGNKSSGDNFHAAPNIDHSQEFVRNDLKEWLCWMRKEVGYDGWRLDFVRGFWGGYVKDYLEASEPYFAVGEYWDSLSYTYGEMDYNQDAHRQRIVDWINATNGTAGAFDVTTKGILHAALERSEYWRLSDEKGKPPGVLGWWPSRAVTFIENHDTGSTQGHWRFPYGMELQGYAYILTHPGTPAVFYDHIFSHLQPEIAKFISIRHRQKIHCRSKIKILKAERSLYAAEIDEKVTMKIGSEHFEPSGPQNWIVAAEGQDYKIWEASS

SEQ ID NO: 37908 - protein, 569 aa, Zea mays subsp. mays
MTWEIPPEPHPPKTKIFRHKALQTLLQQKADGAGNSISFSLDAEYSCLFFVLKLDEYTWLRNLENGSDFYVPLTRVGQYGSTQDPDKAEAQKIEDKSSQADGLISDIRNLVVGLSSRRGQKAKNKVLQEDILQEIERLAAEAYSIFRSPTIDSVDESVQLDDTLSAKPACSGTGSGFEILCQGFNWESHKSGKWYVELGTKAKELSSLGFTIVWSPPPTDSVSPEGYMPRDLYNLNSRYGSMDELKELVKIFHEAGIKVLGDAVLNHRCAQFQNNNGVWNIFGGRMNWDDRAVVADDPHFQGRGNKSSGDNFHAAPNIDHSQEFVRNDLKEWLCWMRKEVGYDGWRLDFVRGFWGGYVKDYLEASEPYFAVGEYWDSLSYTYGEMDYNQDAHRQRIVDWINATNGTAGAFDVTTKGILHAALERSEYWRLSDEKGKPPGVLGWWPSRAVTFIENHDTGSTQGHWRFPYGMELQGYAYILTHPGTPAVFYDHIFSHLQPEIAKFISIRHRQKIHCRSKIKILKAERSLYAAEIDEKVTMKIGSEHFEPSGPQNWIVAAEGQDYKIWEASS

SEQ ID NO: 37909 - protein, 342 aa, Zea mays subsp. mays
MPRDLYNLNSRYGSMDELKELVKIFHEAGIKVLGDAVLNHRCAQFQNNNGVWNIFGGRMNWDDRAVVADDPHFQGRGNKSSGDNFHAAPNIDHSQEFVRNDLKEWLCWMRKEVGYDGWRLDFVRGFWGGYVKDYLEASEPYFAVGEYWDSLSYTYGEMDYNQDAHRQRIVDWINATNGTAGAFDVTTKGILHAALERSEYWRLSDEKGKPPGVLGWWPSRAVTFIENHDTGSTQGHWRFPYGMELQGYAYILTHPGTPAVFYDHIFSHLQPEIAKFISIRHRQKIHCRSKIKILKAERSLYAAEIDEKVTMKIGSEHFEPSGPQNWIVAAEGQDYKIWEASS

SEQ ID NO: 37910 - DNA, 644 bp, Zea mays subsp. mays
gaaaaagaaagaaggcgcaaggaggatggtgacgaaagaatccattgaagtgatagctcagagcattggactctccactctttctccggacgtctcagccgctcttgctcccgatgtcgagtatcgcgtccgagaggtcatgcaggaagctatcaaatgcatgcgtcatgctcgacgcaccactttaatggctcatgatgtcgattctgctcttcatttcaggaatttggagcctacctctggctccaaaagtatgcggttcaagagagctcctgagaacagagatctatacttcttcgatgacaaagatgtcgagctcaagaatgttatcgaagctcctctaccaaatgcacctcctgatgcatctgttttctctcattggttggcaattgatggtattcaaccttccattccacagaattctcctctccaagccatatctgaccttaaacgatcggaatataaggacgatggcttggctgctagacaggtgctttctaaggaccttcagatttactttgacaaagtcacggagtgggctttgactcaatctggctccaccctctttagacaagcactcgccagcttggaaattgatcctggactccacccattagttccctttttcacttctttcatcgctg

SEQ ID NO: 37911 - protein, 214 aa, Zea mays subsp. mays
KKKEGARRMVTKESIEVIAQSIGLSTLSPDVSAALAPDVEYRVREVMQEAIKCMRHARRTTLMAHDVDSALHFRNLEPTSGSKSMRFKRAPENRDLYFFDDKDVELKNVIEAPLPNAPPDASVFSHWLAIDGIQPSIPQNSPLQAISDLKRSEYKDDGLAARQVLSKDLQIYFDKVTEWALTQSGSTLFRQALASLEIDPGLHPLVPFFTSFIA

SEQ ID NO: 37912 - protein, 206 aa, Zea mays subsp. mays
MVTKESIEVIAQSIGLSTLSPDVSAALAPDVEYRVREVMQEAIKCMRHARRTTLMAHDVDSALHFRNLEPTSGSKSMRFKRAPENRDLYFFDDKDVELKNVIEAPLPNAPPDASVFSHWLAIDGIQPSIPQNSPLQAISDLKRSEYKDDGLAARQVLSKDLQIYFDKVTEWALTQSGSTLFRQALASLEIDPGLHPLVPFFTSFIA

SEQ ID NO: 37913 - protein, 168 aa, Zea mays subsp. mays
MQEAIKCMRHARRTTLMAHDVDSALHFRNLEPTSGSKSMRFKRAPENRDLYFFDDKDVELKNVIEAPLPNAPPDASVFSHWLAIDGIQPSIPQNSPLQAISDLKRSEYKDDGLAARQVLSKDLQIYFDKVTEWALTQSGSTLFRQALASLEIDPGLHPLVPFFTSFIA

SEQ ID NO: 37914 - DNA, 733 bp, Zea mays subsp. mays
atcagtctctcagtgctgatacttctctccactctcctctttctttccctgtcccgacagagttcgaggaagctggggtgggcctgatgcttctccttctcttgcagtctagcgtccattccacttcgcaagggcttttctttctgttttaagtaaaacggatccagcaacgcaccagttcctgaaacagaaacgtgatgatggattcagtaagcatgaagctgttagcttttgtgttccttctgttgcgatgccagcgggcatcgcttgctcttgctgtcgacttccaagtcgaagcattggttgaaatgaggacgcaacttggtgacaaacgtggtgtccttagtgattggaaggataatcaaatgagcccctgctactgggccaatgttaattgccaagataacaaagtcacaacaataattttgagctcgtcagggttaacaggatccttatcacccagcattgcaaagctaacaactttacagcagctgatactggataacaacaacattactggagggattcctccggagtttggaaacctatcaggtttgacaattctaaaccttggaagaaataatttaaatgggtcaataccggactcccttggacaactttctaaactccaaaatctggatctaagccataattatttgaccggaaatatcccaagctctttctcaaatcttctgtcattgagtgatattaatctggcatataataatataag

SEQ ID NO: 37915 - protein, 178 aa, Zea mays subsp. mays
MMDSVSMKLLAFVFLLLRCQRASLALAVDFQVEALVEMRTQLGDKRGVLSDWKDNQMSPCYWANVNCQDNKVTTIILSSSGLTGSLSPSIAKLTTLQQLILDNNNITGGIPPEFGNLSGLTILNLGRNNLNGSIPDSLGQLSKLQNLDLSHNYLTGNIPSSFSNLLSLSDINLAYNNI

SEQ ID NO: 37916 - protein, 177 aa, Zea mays subsp. mays
MDSVSMKLLAFVFLLLRCQRASLALAVDFQVEALVEMRTQLGDKRGVLSDWKDNQMSPCYWANVNCQDNKVTTIILSSSGLTGSLSPSIAKLTTLQQLILDNNNITGGIPPEFGNLSGLTILNLGRNNLNGSIPDSLGQLSKLQNLDLSHNYLTGNIPSSFSNLLSLSDINLAYNNI

SEQ ID NO: 37917 - protein, 172 aa, Zea mays subsp. mays
MKLLAFVFLLLRCQRASLALAVDFQVEALVEMRTQLGDKRGVLSDWKDNQMSPCYWANVNCQDNKVTTIILSSSGLTGSLSPSIAKLTTLQQLILDNNNITGGIPPEFGNLSGLTILNLGRNNLNGSIPDSLGQLSKLQNLDLSHNYLTGNIPSSFSNLLSLSDINLAYNNI

SEQ ID NO: 37918 - DNA, 649 bp, Zea mays subsp. mays
gagatccgctcagttttgccgaatggcgcagcctgttccgtaaccgtacaatgtggggaatgatgctcggattcagtggcatcaactacactgcgtggctgtatctggcctggcttcctggttacctgcaaacagcctataacctggatttaaaaagcacagggttgatggcggctatccctttcctgtttggggctgccgggatgctggtcaacggttacgttaccgactggctggtcaaagggggaatggctccgattaaaagccgtaagatctgcattattgccgggatgttctgttctgccgcctttacgctgatagtaccacaagcgacaacatccatgacggcggttctgctgattggcatggcactgttctgtattcactttgccggaacatcctgctggggcttgatccacgtcgcagttgcttctcgcatgactgcgtcggtgggcagtatccagaactttgccagcttcatctgcgcctcttttgcgccgatcattactggttttattgttgataccacccactcattccgtctggcactaatcatctgcggttgcgtcaccgcagcgggggcactggcgtacatcttcctggttcgtcagccgatcaacgacccacgtaaagattaatctccttatgc

SEQ ID NO: 37919 - protein, 211 aa, Zea mays subsp. mays
DPLSFAEWRSLFRNRTMWGMMLGFSGINYTAWLYLAWLPGYLQTAYNLDLKSTGLMAAIPFLFGAAGMLVNGYVTDWLVKGGMAPIKSRKICIIAGMFCSAAFTLIVPQATTSMTAVLLIGMALFCIHFAGTSCWGLIHVAVASRMTASVGSIQNFASFICASFAPIITGFIVDTTHSFRLALIICGCVTAAGALAYIFLVRQPINDPRKD

SEQ ID NO: 37920 - protein, 195 aa, Zea mays subsp. mays
MWGMMLGFSGINYTAWLYLAWLPGYLQTAYNLDLKSTGLMAAIPFLFGAAGMLVNGYVTDWLVKGGMAPIKSRKICIIAGMFCSAAFTLIVPQATTSMTAVLLIGMALFCIHFAGTSCWGLIHVAVASRMTASVGSIQNFASFICASFAPIITGFIVDTTHSFRLALIICGCVTAAGALAYIFLVRQPINDPRKD

SEQ ID NO: 37921 - protein, 192 aa, Zea mays subsp. mays
MMLGFSGINYTAWLYLAWLPGYLQTAYNLDLKSTGLMAAIPFLFGAAGMLVNGYVTDWLVKGGMAPIKSRKICIIAGMFCSAAFTLIVPQATTSMTAVLLIGMALFCIHFAGTSCWGLIHVAVASRMTASVGSIQNFASFICASFAPIITGFIVDTTHSFRLALIICGCVTAAGALAYIFLVRQPINDPRKD

SEQ ID NO: 37922 - DNA, 1910 bp, Zea mays subsp. mays
ccccccccccccgactccgccgttgaaaaaccacaaaatccgctgtagctaagctcggtgagtaaaatggcgacggcgacgacggtgaatgtcaaactttctcgatcaaatcgtatctatcgctcttccgaaccagtggaaggaaaaattgtgataaaatctgcaacttcgatttcgcatcaagcaatacgtttatccgtcaatggatcagtcaacttgcaggttcgtggaggatcagctggagttatcgagtccttctatggtgtcatcaagcctattcaaatcgtcaagaagacgatcgaagttaagtcttctggcaaaatccctccgggaactacagagataccattctctttgaatctgagggagcctggggaaggcattgtagagaagttctatgagacatttcatggaacaaatatcaacatccaatatctactactatcacccttggtgaagcatcgcgcgggacaccgatcaacgatatcgccaccagcctggcagtggggattgcactctccggcgtgctgacgatgttgattggttttagcggattaggccatcgcctggcacggttatttacgccgtcggtgatggtcttgtttatgttgatgctgggcgcgcagctgaccactatctttttcaaaggtatgctcgggctgccgtttggcatagccgacccgaattttaaaattcagttaccgccgttcgcgctctcggtggcggtgatgtacctggtactggcgatgattatcttcctgccgcaacgttttgcccgttatggcctgctggtcggcaccataaccggctggttgttgtggtacttttgctttccttcttcgcactcgctctccggtgagttgcactggcagtggttcccgctcggcagtggcggtgctttgtcgccgggaattattctgacggcggtgattacaggtctggtaaatatcagcaatacctacggtgcgattcggggcacggatgttttttatccgcagcagggcgcagggaatacgcgttatcgtcgtagctttgtggcgaccggatttatgacgctgataaccgtaccgctggcggtaattccattttcaccgtttgtttcatccattggtttattaacccagactggcgattacacgcggcgttcgtttatttatggcagcgttatttgcctgctggtggcgctggttcctgcactcacgcgactgttttgcagtatccctttacccgtgagtagtgcggtcatgctggtttcttatctgcctttactcttttccgcgctggtgtttagccagcaaataacgtttaccgctcgcaatatttatcgactcgcattgccgttatttgtcggcatatttttaatggcattaccgcctgtgtatctgcaagaccttccattaacgcttcgtcctctgctcagtaacggcttattggtcgggattttactggctgttcttatggataaccttattccgtgggaacgcatcgaataatttgttgaaaaaggattgataatgaagattgtcattgcgccagactcttttaaagagagcttaagtgcagaaaaatgttgtcaggcaattaaagccgggttttcgaccctctttcccgatgcgaactatatctgtttgccgatagcggatggcggcgaagggacggtggatgcgatggtcgccgcgacgggcggcaacatcgtgacgcttgaagtctgcgggccgatgggcgaaaaagtgaatgctttttatggccttaccggcgacgggaaaacggcggtgattgagatggcggcagcaagtggactgatgctggtcgcgcctgaaaagcgtaatccgttgctggcctccagttttggtacgggggagttaattcgtcatgcgctggataacgacattcgcgggggggcccggtac

SEQ ID NO: 37923 - protein, 319 aa, Zea mays subsp. mays
MLIGFSGLGHRLARLFTPSVMVLFMLMLGAQLTTIFFKGMLGLPFGIADPNFKIQLPPFALSVAVMYLVLAMIIFLPQRFARYGLLVGTITGWLLWYFCFPSSHSLSGELHWQWFPLGSGGALSPGIILTAVITGLVNISNTYGAIRGTDVFYPQQGAGNTRYRRSFVATGFMTLITVPLAVIPFSPFVSSIGLLTQTGDYTRRSFIYGSVICLLVALVPALTRLFCSIPLPVSSAVMLVSYLPLLFSALVFSQQITFTARNIYRLALPLFVGIFLMALPPVYLQDLPLTLRPLLSNGLLVGILLAVLMDNLIPWERIE

SEQ ID NO: 37924 - protein, 299 aa, Zea mays subsp. mays
MVLFMLMLGAQLTTIFFKGMLGLPFGIADPNFKIQLPPFALSVAVMYLVLAMIIFLPQRFARYGLLVGTITGWLLWYFCFPSSHSLSGELHWQWFPLGSGGALSPGIILTAVITGLVNISNTYGAIRGTDVFYPQQGAGNTRYRRSFVATGFMTLITVPLAVIPFSPFVSSIGLLTQTGDYTRRSFIYGSVICLLVALVPALTRLFCSIPLPVSSAVMLVSYLPLLFSALVFSQQITFTARNIYRLALPLFVGIFLMALPPVYLQDLPLTLRPLLSNGLLVGILLAVLMDNLIPWERIE

SEQ ID NO: 37925 - protein, 295 aa, Zea mays subsp. mays
MLMLGAQLTTIFFKGMLGLPFGIADPNFKIQLPPFALSVAVMYLVLAMIIFLPQRFARYGLLVGTITGWLLWYFCFPSSHSLSGELHWQWFPLGSGGALSPGIILTAVITGLVNISNTYGAIRGTDVFYPQQGAGNTRYRRSFVATGFMTLITVPLAVIPFSPFVSSIGLLTQTGDYTRRSFIYGSVICLLVALVPALTRLFCSIPLPVSSAVMLVSYLPLLFSALVFSQQITFTARNIYRLALPLFVGIFLMALPPVYLQDLPLTLRPLLSNGLLVGILLAVLMDNLIPWERIE

SEQ ID NO: 37926 - DNA, 1244 bp, Zea mays subsp. mays
agtatctggaaaatctcaatggtatctttaacctacgctttgtcagcgagccagataacggtatctacgacgccatgaacaaaggcattgcgatggcacaaggcaagttcgcgttgtttctcaattcgggcgatatttttcatcagaatgccgcaaattttgtccgtaagttaaaaatgcaaaaagataacgtgatgatcaccggcgatgcgctgctggattttggcgacgggcataaaattaaacgtagcgccaaaccgggctggtatatttatcacagcctgcccgccagtcatcaggcgatatttttccctgtatccggcttgaaaaaatggcgttatgacctggaatataaagtttcttccgactacgcgctggcagccaaaatgtataaagccggttatgcatttaaaaaactcaatggcctggtgtctgaattttccatgggtggggtatctaccaccaataatatggaattgtgtgctgacgcgaaaaaagtccaacgacaaatattacatgtgcctggcttttgggctgaattatcctggcatttacgccaacgtactacctcaaagacgaaagccttatataacaaagtctgaatataaggaaaaccaatgcaagatttaagcggtttctcggtgccgaaagggttccggggcggcaacgctattaaagtgcaattatggtgggcagtacaggcaacaatatttgcctggtcgccacaagtattgtatcgctggcgggcttttttattacgtttattcggagcaaaaataggaaaaaacgtagttattcgtccgtcagtaaaaattacctatccgtggaaattaaccttaggtgattacgcgtgggtcggcgatgacgtcaatttatataccctcggtgaaataaccattggcgcacattcggtgatatcgcaaaaaagttatttatgcaccggtagccacgaccatgcaagtcaacatttcaccattaacgccacgcctattgtgattggcgagaaatgctggctggcaaccgatgtctttgttgccccaggcgtcacaatcggcgacggcaccgtcgtgggtgcacgaagcagtgtttttaaatcgcttccggcaaatgtggtttgccgggggaatcccgcagtggtgatacgcgaacgcgttgaaactgaataaattcaaaaatacagaggaataatacatgtcaaaagtcgctctcatcaccggtgtaaccggacaagacggttcttacct

SEQ ID NO: 37927 - protein, 199 aa, Zea mays subsp. mays
YLENLNGIFNLRFVSEPDNGIYDAMNKGIAMAQGKFALFLNSGDIFHQNAANFVRKLKMQKDNVMITGDALLDFGDGHKIKRSAKPGWYIYHSLPASHQAIFFPVSGLKKWRYDLEYKVSSDYALAAKMYKAGYAFKKLNGLVSEFSMGGVSTTNNMELCADAKKVQRQILHVPGFWAELSWHLRQRTTSKTKALYNKV

SEQ ID NO: 37928 - protein, 182 aa, Zea mays subsp. mays
MQDLSGFSVPKGFRGGNAIKVQLWWAVQATIFAWSPQVLYRWRAFLLRLFGAKIGKNVVIRPSVKITYPWKLTLGDYAWVGDDVNLYTLGEITIGAHSVISQKSYLCTGSHDHASQHFTINATPIVIGEKCWLATDVFVAPGVTIGDGTVVGARSSVFKSLPANVVCRGNPAVVIRERVETE

SEQ ID NO: 37929 - protein, 175 aa, Zea mays subsp. mays
MNKGIAMAQGKFALFLNSGDIFHQNAANFVRKLKMQKDNVMITGDALLDFGDGHKIKRSAKPGWYIYHSLPASHQAIFFPVSGLKKWRYDLEYKVSSDYALAAKMYKAGYAFKKLNGLVSEFSMGGVSTTNNMELCADAKKVQRQILHVPGFWAELSWHLRQRTTSKTKALYNKV

SEQ ID NO: 37930 - DNA, 707 bp, Zea mays subsp. mays
agagagagagagagagctcactagtcccccccccccccctctctcgctttgctctctcggaattgtttttgcagaaagctctctcatctgaactcagaaaatctccgagttcgtatatcttctccgtttgagcaatggcgttggtcatgcacacatacaagggaaacaaaggtgccaataaggcacttattgctgcagagtatgcgggtgtgaagatcgaggagtccgcagactttcagatgggcgtcactaacaagtcacctgagttccttaagatgaaccctattggaaaggttcctgtgcttgagactcctgaaggtcccatatttgagagcaatgccattgcccgatatgtgagccgtaagaatggtgacaactctttgaatggatcctcccttattgaatacgctcacattgagcaatggatcgatttctcctcattggagattgatgctaacatgttgaagtggtttgctccaagaatgggctatgctcccttctctgccccagctgaggaagcggcaatttctgcattgaagagaggacttgaggctctgaacactcatctcgcctccaacactttccttgttggacactctgtcacccttgctgatattgtcacaatctgcaacttgaacttgcgatttgccaccgcgatgaccaagacatttacctctgcattccctcatgttgagagatacttctgg

SEQ ID NO: 37931 - protein, 191 aa, Zea mays subsp. mays
MALVMHTYKGNKGANKALIAAEYAGVKIEESADFQMGVTNKSPEFLKMNPIGKVPVLETPEGPIFESNAIARYVSRKNGDNSLNGSSLIEYAHIEQWIDFSSLEIDANMLKWFAPRMGYAPFSAPAEEAAISALKRGLEALNTHLASNTFLVGHSVTLADIVTICNLNLRFATAMTKTFTSAFPHVERYFW

SEQ ID NO: 37932 - protein, 187 aa, Zea mays subsp. mays
MHTYKGNKGANKALIAAEYAGVKIEESADFQMGVTNKSPEFLKMNPIGKVPVLETPEGPIFESNAIARYVSRKNGDNSLNGSSLIEYAHIEQWIDFSSLEIDANMLKWFAPRMGYAPFSAPAEEAAISALKRGLEALNTHLASNTFLVGHSVTLADIVTICNLNLRFATAMTKTFTSAFPHVERYFW

SEQ ID NO: 37933 - protein, 156 aa, Zea mays subsp. mays
MGVTNKSPEFLKMNPIGKVPVLETPEGPIFESNAIARYVSRKNGDNSLNGSSLIEYAHIEQWIDFSSLEIDANMLKWFAPRMGYAPFSAPAEEAAISALKRGLEALNTHLASNTFLVGHSVTLADIVTICNLNLRFATAMTKTFTSAFPHVERYFW

SEQ ID NO: 37934 - DNA, 1604 bp, Zea mays subsp. mays
atttgttttgtagggacttgtttacagactatgctgacttctgttttaagacctacggcgatcgcgtaaagcactggtttacattcaatgagccaaggatagtagcgctacttggctatgacacagggtcaaatcctcctcaaaggtgcaccagatgcgctgctggtgggaattcagcaaccgaaccttacatagttgctcataattttctcttggcacatgctactgcagttgcaagataccgtacgaaatatcaggtatttccatcttgagaacctcagaagttcctctgaaaaataacatcactctagcactcctaggagtggtaaactgatgttattttattcaatgaagtgtgtggtccaggattttatttttaaatgaaatgtgggcagggtctatatatgcttggaagttggaacaatggtcagcatactttcacattaataactctactgttcatgaaatgcattagcttgttctcctaaacgattggacatgtgcctgtcgaatttcattagtttcttggactgaaaactgctgatggaagagtgacatgatgttttaaaaacataggctgctcagaagggtaaggtcggaatagtcctggacttcaactggtacgaggctcttacaaactcacctgatgaccaagcagcagcccaaagagccagggacttccacattggctggtttgttgatccattgataaacggacactatccacagataatgcaagatctcgtgaaggagaggctgcccaggttcactcctgagcaggctaaactggtgaagggctcggcagactacatcggtatcaacgagtacacatccagctacatgaaggggcagaagctggtccagctggcgcccagtagctactctgccgattggcaggttcaatatgtttgtgagtttaatttcttgtgctttaaactcgatatttcgaataaatatgtatttgccttggatatatatttttttcaccaaacctaaacatccgtcccataaattctgtagttgcacgcaatggcaaaccgattggaccacaggcgaattctaagtggctctacatcgccccgacggggatgtacgggtgcgtgaactacctcaaggagaagtatgggaatccaacgatctacataacggagaacggaatggaccagcctggaaacttgacccgagaccagtacctgcgcgacgccacgagggtgcggttctacaggagctacatcggccagctgaagaaggccatagaccagggagcgaacgtggctggctacttcgcctggtctctcctcgacaacttcgagtggctggcagggtactcgtccaagttcggcatcgtctacgtggacttcaacacgctcgaacgccacccgaaggcgtcggcctactggttcagggacatgcttcagaagcattgagatctccagagccgagcctgagcacggaaggtaccattttgttcagcttcgcctagtgtttgggatggcccaatggttcaaatccggctcagtgcctggctaccaaaatgggaacaaaggacagctaccccgatcaattgtgatgttgtgtgtttgtgggtatgttctctctggagt

SEQ ID NO: 37935 - protein, 112 aa, Zea mays subsp. mays
MYGCVNYLKEKYGNPTIYITENGMDQPGNLTRDQYLRDATRVRFYRSYIGQLKKAIDQGANVAGYFAWSLLDNFEWLAGYSSKFGIVYVDFNTLERHPKASAYWFRDMLQKH

SEQ ID NO: 37936 - protein, 89 aa, Zea mays subsp. mays
MDQPGNLTRDQYLRDATRVRFYRSYIGQLKKAIDQGANVAGYFAWSLLDNFEWLAGYSSKFGIVYVDFNTLERHPKASAYWFRDMLQKH

SEQ ID NO: 37937 - protein, 89 aa, Zea mays subsp. mays
LFCRDLFTDYADFCFKTYGDRVKHWFTFNEPRIVALLGYDTGSNPPQRCTRCAAGGNSATEPYIVAHNFLLAHATAVARYRTKYQVFPS

SEQ ID NO: 37938 - DNA, 700 bp, Zea mays subsp. mays
aactagggttaagggaattaggggccgagaggagcgcaatgagcatcgtgcccaaggagacgatcgaggtcatcgctcagagcgtcggcatccccagcctcggtgccgatgtcgccgtcgcgctcgcccctgacgtcgaataccgcctccgcgagatcatgcaggaatccattaaatgtatgcggcatgcaaagcggactgttctgacggcggatgatgttgacagtgccctgggtctcaggaatgttgagcccgtatatggatttgcctctggtgatccattgcgttttaagagagctgttggacataaggatctcttctatcttgatgatcgggaggtagacttcaaagagattattgactgtcctctgcctaaagccccactggacacatcagttgtagcccattggctagcgattgagggggtacagcctgcaataccggagaatcctgctattgatgcaattgtaccaccaactgaaaataaaaggtctgagcatgggaaagatgatggacttccagctgatgtcaagcttcctgttaagcatgtattatctagagaactacagatgtactttgataaaatagctgaacttactatgagtagatctgatacgtccctttttaaagaagctttagtgagcttggcaaaagattctggggctcatcctttagttccttacttttcctacttcattgc

SEQ ID NO: 37939 - protein, 232 aa, Zea mays subsp. mays
LGLRELGAERSAMSIVPKETIEVIAQSVGIPSLGADVAVALAPDVEYRLREIMQESIKCMRHAKRTVLTADDVDSALGLRNVEPVYGFASGDPLRFKRAVGHKDLFYLDDREVDFKEIIDCPLPKAPLDTSVVAHWLAIEGVQPAIPENPAIDAIVPPTENKRSEHGKDDGLPADVKLPVKHVLSRELQMYFDKIAELTMSRSDTSLFKEALVSLAKDSGAHPLVPYFSYFI

SEQ ID NO: 37940 - protein, 220 aa, Zea mays subsp. mays
MSIVPKETIEVIAQSVGIPSLGADVAVALAPDVEYRLREIMQESIKCMRHAKRTVLTADDVDSALGLRNVEPVYGFASGDPLRFKRAVGHKDLFYLDDREVDFKEIIDCPLPKAPLDTSVVAHWLAIEGVQPAIPENPAIDAIVPPTENKRSEHGKDDGLPADVKLPVKHVLSRELQMYFDKIAELTMSRSDTSLFKEALVSLAKDSGAHPLVPYFSYFI

SEQ ID NO: 37941 - protein, 180 aa, Zea mays subsp. mays
MQESIKCMRHAKRTVLTADDVDSALGLRNVEPVYGFASGDPLRFKRAVGHKDLFYLDDREVDFKEIIDCPLPKAPLDTSVVAHWLAIEGVQPAIPENPAIDAIVPPTENKRSEHGKDDGLPADVKLPVKHVLSRELQMYFDKIAELTMSRSDTSLFKEALVSLAKDSGAHPLVPYFSYFI

SEQ ID NO: 37942 - DNA, 2306 bp, Zea mays subsp. mays
  misc_feature (595)..(595): n is a, c, g, or t
aaactaattgagactgatgcagaggcatgccttgatcgaaatgatccaaattatgacagtggtgaggagccatatgagttagttgaggcccctgtttcaaccccactagaagactacaagaaatctgttgtccctttaattgaggaatatttcagcaatggggatgtaaaattagctgcttctgatcttaaagagttgggtcatgatggtttccactgttactttgtcaagaagcttgtttccacagcaatggataggcatgacaaggagaaagagatggcatcagtgcttctgtcgtatctttatggcaacgtggtcagttcaactcaaattaggctgggatttgtgctgctattagaggctgttgatgacttggctgttgacatacctgatgtggttgatgtgctcgcccttttcattgcacgtgcagttgttgatgacattctgccacctgctttcctcagcaatgcaaaagtgagtctgtcaggatcttcaaagggtatgcaggttgtacaaattgcagagaaaagctatctttcagcaccccaccatgcagagttaattgagcgacgatggggtggttcaacccacatcncagtagaagaggtgaagaggaggattgctgatcttctgaaggaatacatcagaaatggtgatacagctgaggcttgtaggtgcattagagaattggcagtgccgtttttccatcatgaggtggtgaagcgagctcttactcttggaatggagagtccagctgctgaagctcttattgtcaagcttctgaaggaagcatctgaagaatgtttagtaagctctagtcagatgatgaaaggattccaccgtgttgctgagagtcttgatgatctcattcttgacataccatctgcaaagtctgaatttcagttgttggtatcaaaagccatttctgagggatggttagattcttcctatgtgaactcaggtgtcaacggaagcgttgaagacgatgaacatgagaagctggctaggtacaagagggaggctgtatccataatacacgaatactttttctctgatgatacaacagaggtcatccgtagtgtcaaagagcttggttatccggaatacaatccgatcttcgtcaagaagctcataacaattgctatggaccgcaagaacagggagaaagaaatggcatcggttcttctcccttcattaagcatggagctgttctcgtctgaagacatcgccaagggatttgtaatgctccttgaatctgcagaagacaccgcgctggacatattggatgcctcagatgagctgggactgttcctagccagggctgtgattgatgacgttctcgcacctctaaacttggatgagattagcagcaagcttccaccaaactgcagtggggctgaaacattgaacatggcacgctcccttgcgtcggcccgtcatgccggtgagaggcttctgaggtgctggggcggtggaaccggatgggctgtggaggatgccaaggacaagataacaaagctcctggaggagtatgagagtggaggcgatgtaggggaggcatgcaactgcatccgtgagctgggtatgtctttcttcaaccatgaagttgtcaagaaggcgctcgtgatggcaatggagaagaagaacgagaggaccctgaacctgctgcaggagtgctttggtgaagggatcataaccatcaaccagatgaccaaggggttctcaagggtcagggatgggctcgacgatctggctctcgacattcctgatgccagggagaagttcctttcctatgtgcagcgcgcgaagaagagtggatggctcctgcctgggttcggtgtggcatcttcggcttgaacagctgggcagaagagaagtacgaagctgaagcggctcagcaaacccagtttggatgtgtgttttcgtcgttcgtggttgcccttgcgcctaggttagcggagcgagcccttcctggttgcggtggtggtggcttgtgtaggtctcgcatctgacatgttcatgctgttcttgtttcatttcatttaactctccatagaccctttttttttacatcaagctaaaacagagaagagaaaaaaaagaccatgttgtaaaagttctcccatgctccgcctgcattgcggccggttttttcatcctcatttagctgcaatcgtgcgttcctgccctctcatggccgccgtagctgtttttctatgccattggatgcttggattgtgattgctagtttgttactcttttattctttgtggaaatggtgtggcctggtgaatgcctggattgct

SEQ ID NO: 37943 - protein, 618 aa, Zea mays subsp. mays
  misc_feature (199)..(199): Xaa can be any naturally occurring amino acid
KLIETDAEACLDRNDPNYDSGEEPYELVEAPVSTPLEDYKKSVVPLIEEYFSNGDVKLAASDLKELGHDGFHCYFVKKLVSTAMDRHDKEKEMASVLLSYLYGNVVSSTQIRLGFVLLLEAVDDLAVDIPDVVDVLALFIARAVVDDILPPAFLSNAKVSLSGSSKGMQVVQIAEKSYLSAPHHAELIERRWGGSTHIXVEEVKRRIADLLKEYIRNGDTAEACRCIRELAVPFFHHEVVKRALTLGMESPAAEALIVKLLKEASEECLVSSSQMMKGFHRVAESLDDLILDIPSAKSEFQLLVSKAISEGWLDSSYVNSGVNGSVEDDEHEKLARYKREAVSIIHEYFFSDDTTEVIRSVKELGYPEYNPIFVKKLITIAMDRKNREKEMASVLLPSLSMELFSSEDIAKGFVMLLESAEDTALDILDASDELGLFLARAVIDDVLAPLNLDEISSKLPPNCSGAETLNMARSLASARHAGERLLRCWGGGTGWAVEDAKDKITKLLEEYESGGDVGEACNCIRELGMSFFNHEVVKKALVMAMEKKNERTLNLLQECFGEGIITINQMTKGFSRVRDGLDDLALDIPDAREKFLSYVQRAKKSGWLLPGFGVASSA

SEQ ID NO: 37944 - protein, 535 aa, Zea mays subsp. mays
  misc_feature (116)..(116): Xaa can be any naturally occurring amino acid
MDRHDKEKEMASVLLSYLYGNVVSSTQIRLGFVLLLEAVDDLAVDIPDVVDVLALFIARAVVDDILPPAFLSNAKVSLSGSSKGMQVVQIAEKSYLSAPHHAELIERRWGGSTHIXVEEVKRRIADLLKEYIRNGDTAEACRCIRELAVPFFHHEVVKRALTLGMESPAAEALIVKLLKEASEECLVSSSQMMKGFHRVAESLDDLILDIPSAKSEFQLLVSKAISEGWLDSSYVNSGVNGSVEDDEHEKLARYKREAVSIIHEYFFSDDTTEVIRSVKELGYPEYNPIFVKKLITIAMDRKNREKEMASVLLPSLSMELFSSEDIAKGFVMLLESAEDTALDILDASDELGLFLARAVIDDVLAPLNLDEISSKLPPNCSGAETLNMARSLASARHAGERLLRCWGGGTGWAVEDAKDKITKLLEEYESGGDVGEACNCIRELGMSFFNHEVVKKALVMAMEKKNERTLNLLQECFGEGIITINQMTKGFSRVRDGLDDLALDIPDAREKFLSYVQRAKKSGWLLPGFGVASSA

SEQ ID NO: 37945 - protein, 526 aa, Zea mays subsp. mays
  misc_feature (107)..(107): Xaa can be any naturally occurring amino acid
MASVLLSYLYGNVVSSTQIRLGFVLLLEAVDDLAVDIPDVVDVLALFIARAVVDDILPPAFLSNAKVSLSGSSKGMQVVQIAEKSYLSAPHHAELIERRWGGSTHIXVEEVKRRIADLLKEYIRNGDTAEACRCIRELAVPFFHHEVVKRALTLGMESPAAEALIVKLLKEASEECLVSSSQMMKGFHRVAESLDDLILDIPSAKSEFQLLVSKAISEGWLDSSYVNSGVNGSVEDDEHEKLARYKREAVSIIHEYFFSDDTTEVIRSVKELGYPEYNPIFVKKLITIAMDRKNREKEMASVLLPSLSMELFSSEDIAKGFVMLLESAEDTALDILDASDELGLFLARAVIDDVLAPLNLDEISSKLPPNCSGAETLNMARSLASARHAGERLLRCWGGGTGWAVEDAKDKITKLLEEYESGGDVGEACNCIRELGMSFFNHEVVKKALVMAMEKKNERTLNLLQECFGEGIITINQMTKGFSRVRDGLDDLALDIPDAREKFLSYVQRAKKSGWLLPGFGVASSA

SEQ ID NO: 37946 - DNA, 592 bp, Zea mays subsp. mays
gagggagactcgcactcttcttcttcttctttgtacccagaaagaaagtgagctccaacaatggctgcttgcgctactcactcctctctcatgctagcatacgccgccgcatccactcgttcccaggaccttacccctactccatctcttttctcttttgccagctccagacccaaccacttgagcgtcccgcttcttctccttgggggttccagggaccggagatgtgctgctattgacagagcttccaaccacaagtttattgtctccgccgtggccgctgaggctgacctcgacacggaggaggacctggagcagaccgccaccgccgtccttgatccgcccaagcctaagaaaggaaaagccgctttggttctcaagagagatagaacaaggtctaagaggtttttggaaatccaaaagctaagggaaaccaaaaaggagtatgatgtcaacactgctatctctttgcttaaacaaactgccaacacaaggtttgttgagtctgttgaagcccatttccgtctcaacatcgatcctaagtacaatgaccagcagctgcgtgcaacggtgagcctgcctaagggaactg

SEQ ID NO: 37947 - protein, 177 aa, Zea mays subsp. mays
MAACATHSSLMLAYAAASTRSQDLTPTPSLFSFASSRPNHLSVPLLLLGGSRDRRCAAIDRASNHKFIVSAVAAEADLDTEEDLEQTATAVLDPPKPKKGKAALVLKRDRTRSKRFLEIQKLRETKKEYDVNTAISLLKQTANTRFVESVEAHFRLNIDPKYNDQQLRATVSLPKGT

SEQ ID NO: 37948 - protein, 167 aa, Zea mays subsp. mays
MLAYAAASTRSQDLTPTPSLFSFASSRPNHLSVPLLLLGGSRDRRCAAIDRASNHKFIVSAVAAEADLDTEEDLEQTATAVLDPPKPKKGKAALVLKRDRTRSKRFLEIQKLRETKKEYDVNTAISLLKQTANTRFVESVEAHFRLNIDPKYNDQQLRATVSLPKGT

SEQ ID NO: 37949 - DNA, 1838 bp, Zea mays subsp. mays
cccccccccccccccatgtgtcttctttctatacatctggtgtgctgcagcaaacccagcagatcccggggtcttcaaatcaaagaagtatctgagcttgtacggaagcggcaaacacaggcatctgaaggaatgcagaaagggttcttcagatgttcggttacaacttgagggaactggagaaaagcaagagcatgaggtcgcagcatctagcgagatgtcaatgactcaatacaaggacaatattccatcttgcatgagttcaactttctctgcatttctccttctattctaccctctgtcttttgttctctcctgctgtcagtcacatgaatggtcctctgaacagcaagccactgaggaagggatgtttttctgcagtctatgtgaagttcaagtgttgaagtatagtaagcattgcagagtttgtgacaaatgtgttgatggttttgatcatcactgcaggtggctcaacaattgtattggaagaagaaattatgggaggttttttattctaatgtcaaccgcccttatcttggtctgcatggtttgtgcaatttgggccagcttatcttacaatcagcaactggagtattggtgctagtgctatgctttgttgagcgaaaggaattctgtctgcaaattgtttcaaagcttggaagcagcttctctgtagtgccttttgttattgtggtggcatcatgtaccatcctagccatggtcgcttcactacctattgcccaacttctttttttccacattcttctgataaagaagggaatcagtacctatgactacatcattgcgctgagagagcaagaacaagatgatttgagtgggcagcagagtccacagatgtctcgtgtaagctcgtacactggactcagcagtactagttcctttggtccacttcgtcgtggttcatggtgcactccaccaaggctgttttgaggatcagttcgatgttattccatcggaggctgcttcttcgcataattctgctatgaagagaaaagaagacgagggaaagaggaagaagggctcaggggctgtgaaaataagcccatgggcattagctcgtcttaatgctgaagaagtctcgagggttgctgcagaggcacggaagaagtccaaagttttattaccaatcagaaaagaagactattcgcgaggccatgaaacagatagtagctacggaggcatgagcaatggcaggattgatctaggcactgatagcaagaggagaacgaacagaagaggaagacagcccagtgatctttctctcaaacctgttgcaaagatatctacagatgttattgattctaccagcagggacatggccccagaagcactgtccaacttagcaccattgcaacttgaggcactgagcgccttccatcccagtagggctgcatcctgtgtgaatgctggaagcactccacagcaagggatccaactgtcgaggtcgaccagcgatgggtacgaagcgtcagggggtgaagacagcgaccgcattccgtcacggatagtgcaccgctcgtcgaactgggcaagcatcatcctcaactctgaccagagtgagtcctcatctggcattcttgtgccaaagaacagactgtcctgacttcatgtgaatgaagattgtaaatgatcagccaagaaccggagattccagtatctggccttctctgttgtcaatatcagattttttcgcagggatggttggatactgcgcaaatcattatttttttagtctcggaatcgctaggtaggcagtgtctgaatttcttcctagggggttccgggttcaggtgcttgcaattttgctgccagacgac

SEQ ID NO: 37950 - protein, 206 aa, Zea mays subsp. mays
MKRKEDEGKRKKGSGAVKISPWALARLNAEEVSRVAAEARKKSKVLLPIRKEDYSRGHETDSSYGGMSNGRIDLGTDSKRRTNRRGRQPSDLSLKPVAKISTDVIDSTSRDMAPEALSNLAPLQLEALSAFHPSRAASCVNAGSTPQQGIQLSRSTSDGYEASGGEDSDRIPSRIVHRSSNWASIILNSDQSESSSGILVPKNRLS

SEQ ID NO: 37951 - protein, 200 aa, Zea mays subsp. mays
PPPPPCVFFLYIWCAAANPADPGVFKSKKYLSLYGSGKHRHLKECRKGSSDVRLQLEGTGEKQEHEVAASSEMSMTQYKDNIPSCMSSTFSAFLLLFYPLSFVLSCCQSHEWSSEQQATEEGMFFCSLCEVQVLKYSKHCRVCDKCVDGFDHHCRWLNNCIGRRNYGRFFILMSTALILVCMVCAIWASLSYNQQLEYWC

SEQ ID NO: 37952 - protein, 140 aa, Zea mays subsp. mays
MSNGRIDLGTDSKRRTNRRGRQPSDLSLKPVAKISTDVIDSTSRDMAPEALSNLAPLQLEALSAFHPSRAASCVNAGSTPQQGIQLSRSTSDGYEASGGEDSDRIPSRIVHRSSNWASIILNSDQSESSSGILVPKNRLS

SEQ ID NO: 37953 - DNA, 614 bp, Zea mays subsp. mays
gcgcctgccgccggccaagttttgtccctctccctcgtccggttcggatcgtcgtcgccagccaggtgctggatccgtagcggcggcggcggccatggacaagagcatgctcggcgacctggatggcctccccgaggaggacaagatgtggatggccgccatgatcgaccagctccagatccacgacaggttcatgctataccaacgcatctcgtgggtggagcagggccgctgcttcgtggtgtggaagcccgtggagctggcgcgcgacctcctcccgctccacttcaagcactacaacttctcctttgtccgccagctcaacacctacgtgagtacatcaaaaacacactcgtccatctatacatcatatgttctgttggtgactgagattgttgttgcaaaacaaaggtctgctttggttcgatcagtgtgtcttttgtttatgtccaatgaaactgatggaagaaaaaagcctctcgatcggcggtgtcagagttgcctgtgacgatgtaaaaaacatgctagatgtagcaatgactaaacctgtgatgatggcatagttgtgcagaaagatttgacagggttgtgggatgttaatcttaatggaaagg

SEQ ID NO: 37954 - protein, 168 aa, Zea mays subsp. mays
RLPPAKFCPSPSSGSDRRRQPGAGSVAAAAAMDKSMLGDLDGLPEEDKMWMAAMIDQLQIHDRFMLYQRISWVEQGRCFVVWKPVELARDLLPLHFKHYNFSFVRQLNTYVSTSKTHSSIYTSYVLLVTEIVVAKQRSALVRSVCLLFMSNETDGRKKPLDRRCQSCL

SEQ ID NO: 37955 - protein, 137 aa, Zea mays subsp. mays
MDKSMLGDLDGLPEEDKMWMAAMIDQLQIHDRFMLYQRISWVEQGRCFVVWKPVELARDLLPLHFKHYNFSFVRQLNTYVSTSKTHSSIYTSYVLLVTEIVVAKQRSALVRSVCLLFMSNETDGRKKPLDRRCQSCL

SEQ ID NO: 37956 - protein, 133 aa, Zea mays subsp. mays
MLGDLDGLPEEDKMWMAAMIDQLQIHDRFMLYQRISWVEQGRCFVVWKPVELARDLLPLHFKHYNFSFVRQLNTYVSTSKTHSSIYTSYVLLVTEIVVAKQRSALVRSVCLLFMSNETDGRKKPLDRRCQSCL

SEQ ID NO: 37957 - DNA, 858 bp, Zea mays subsp. mays
ttcgtttgctaccgggtgaggaacacaaaacagcatttcagacacatattggtcatttcgagtttcgggtgatggcgttcgggctcactggtgcacctaacacatttttggaggccatgaacgacactttagccccagtcttaaggaagtgcgccttggttttctttgacgatattttaatctacagttcgtcttttgaagcacacctgacccatctgactacagttctcgaactcttacacaaagataattggaaagtgaaattatccaagtgtgcctttgcccagtccagcattgcctatttgggccatatcatcagtgctagtggtgtctccacagatccggctaaaatcatggtagtacagcagtggcctaccccttcctctgccaaggagttgcgcagcttcttaggtctggcgggtttttacagaaaatttgttcgccatttcggtatgatcagtcggcctttaatggatctgctcaagaagaatactctatttgtttggacaacggagcaccaacaagcatttgaattattgaaaacagcactaagctcagctccggtgttagcactcccagacttctctcttcctttttgcatttacactgatgcatgcaaaactggagttggtgctgttcttatgcaacgaggacatcccctggcatttttaagcaaggcattgggaccgaagaatcaaggattgtcgacctatgaaaaggaatacttggctatactcattgctgttaaccagtggaggtcgtacttacagttagcagagttccacatttatacggatcatcaaagcttagtgccattgaatgaacaacgcttgaatacagtctggcaacagaaactgt

SEQ ID NO: 37958 - protein, 285 aa, Zea mays subsp. mays
RLLPGEEHKTAFQTHIGHFEFRVMAFGLTGAPNTFLEAMNDTLAPVLRKCALVFFDDILIYSSSFEAHLTHLTTVLELLHKDNWKVKLSKCAFAQSSIAYLGHIISASGVSTDPAKIMVVQQWPTPSSAKELRSFLGLAGFYRKFVRHFGMISRPLMDLLKKNTLFVWTTEHQQAFELLKTALSSAPVLALPDFSLPFCIYTDACKTGVGAVLMQRGHPLAFLSKALGPKNQGLSTYEKEYLAILIAVNQWRSYLQLAEFHIYTDHQSLVPLNEQRLNTVWQQKL

SEQ ID NO: 37959 - protein, 262 aa, Zea mays subsp. mays
MAFGLTGAPNTFLEAMNDTLAPVLRKCALVFFDDILIYSSSFEAHLTHLTTVLELLHKDNWKVKLSKCAFAQSSIAYLGHIISASGVSTDPAKIMVVQQWPTPSSAKELRSFLGLAGFYRKFVRHFGMISRPLMDLLKKNTLFVWTTEHQQAFELLKTALSSAPVLALPDFSLPFCIYTDACKTGVGAVLMQRGHPLAFLSKALGPKNQGLSTYEKEYLAILIAVNQWRSYLQLAEFHIYTDHQSLVPLNEQRLNTVWQQKL

SEQ ID NO: 37960 - protein, 247 aa, Zea mays subsp. mays
MNDTLAPVLRKCALVFFDDILIYSSSFEAHLTHLTTVLELLHKDNWKVKLSKCAFAQSSIAYLGHIISASGVSTDPAKIMVVQQWPTPSSAKELRSFLGLAGFYRKFVRHFGMISRPLMDLLKKNTLFVWTTEHQQAFELLKTALSSAPVLALPDFSLPFCIYTDACKTGVGAVLMQRGHPLAFLSKALGPKNQGLSTYEKEYLAILIAVNQWRSYLQLAEFHIYTDHQSLVPLNEQRLNTVWQQKL

SEQ ID NO: 37961 - DNA, 505 bp, Zea mays subsp. mays
agacgaccggccgccagcgccgccgcgttgatggccgccgcaccggaggagcgcctcgacgtcctcaacgccgctggggacaagatcggcgtctccaagcccaggtcggaggtgcacagggacggcgactatcaccgggcggtgcacgtgtggatctacagcgagagcaccggggagctgctgctgcagcgccgcgctgactgcaaggactcgtggcctggacagtgggacatctccagcgccggtcacatctccgccggcgaatcctcgctcttctcggcacagagggagcttgaggaagaactaggcatcaaccttccagtcgatgctttcgagcttatatttgtatttcttcaggaatgcgttatcaacaatgggacatacagaaacaatgagtacaatgatgtttaccttgtgactactttaactccaattcccacttgaggcattcactctccaagaaagtgaagtatctgcagttaggtatatgcgttgtgatgggtac

SEQ ID NO: 37962 - protein, 147 aa, Zea mays subsp. mays
RRPAASAAALMAAAPEERLDVLNAAGDKIGVSKPRSEVHRDGDYHRAVHVWIYSESTGELLLQRRADCKDSWPGQWDISSAGHISAGESSLFSAQRELEEELGINLPVDAFELIFVFLQECVINNGTYRNNEYNDVYLVTTLTPIPT

SEQ ID NO: 37963 - protein, 137 aa, Zea mays subsp. mays
MAAAPEERLDVLNAAGDKIGVSKPRSEVHRDGDYHRAVHVWIYSESTGELLLQRRADCKDSWPGQWDISSAGHISAGESSLFSAQRELEEELGINLPVDAFELIFVFLQECVINNGTYRNNEYNDVYLVTTLTPIPT

SEQ ID NO: 37964 - DNA, 2061 bp, Zea mays subsp. mays
tgatagctagggcctcttttcctgcttcggcttctcatgtttcttgccggtcgtagtggaatccctacatgacagttagtaataacaacatatatctgtaaggtactctgtttttttggttgatgaggtaaactcaaccctttgctttgatgataataataagagtcatattttgcaggattttttttatttagggattatctccgattcctctttacaccactttttttcatttcagtgcaatatcaggtagtggaagtgctgggaggagaaaaaatcttgtcttgcatctgattcggtcttgtagagaaacagaaatgaaatttcttgtcagaacactggttcgtaacttgcgtattggggctatgatgaagacgattttacctgcgcttgcacatgctgttgtttttgatagaaactgtgcagcagatcctgcggtgtcattggaaggcataaaatcacaactacagagtctttcaactgaagttgccgaggcatacaatgtcactcctaatctagatttgctcattccttctcttctgagagaaggcactgcattttcagcttcatccttggcaatggtgcctggcacacctattccacctatgcttgcaagaattactaacgggttgactcagtcgttgaaagctttccatggcagatcatttacttgtgagtacaagtatgatggtcagcgtgcccagattcacaaagcacttgatggatccgtgcgaatattttcaaggcaaatgaaagaatcaacttccagatttcctgatcttgtgaatatgattaaggagttgtgcaagcccgaagtgtcaagctttatactggatgccgaggtggtaggaattaacaggaagaaaggaaatgagttgatgtcgttccaagagctatcttcaagagaaagagggaataagcattcctcaatttcaatagagaacataaaggttgacatttgtgtgtttgtttttgacatcatgttccatgatggagagagactactggattgccctcttcggcaaagaagaaagtacattcatgacttgttccatgagaagccaggatattttgagttagctcagcagctaaatatagaagcctgcgaagcttcaccagacaattctagcactttggctaggatggacacgtttttcagaaatgcatgccagtcttcttgtgagggtataatgttaaagactttggatgtcgatgctggatactctgcttccaaacgctgtgattcatggttaaaggtcaagcgtgactatgtgcaaggcttaggtgatagccttgacttggttccgattggtgcatggtatggaaacggacgtaaagctgggtggtacagcccttttctcatggcatgctacaaccctgaaactgaagagttccaaagtgtatgtcgtgttatgtctggtttctcggatgagttctataaagagatgaaggagttctattcgggggaaaggatactgcccaagaagcctgtttactacaaaacagacgagcaaccagagctgtggttcaccgcagaacaaatctgggagatccgaggtgcagacctgacgttgtcccctgtccaccatgcggccattgggcttgtccatccatcgcgcggcatctcggtgaggatgccccggtacatccgttcagttccagaccggagcccagaggactgcggcacggccgccgatattgctagcatgttcaaagcccagacccggaagatggatgtcagcagcgagggccaggagtagtaggcaatgcaaagctcagcccatttcctcgtcctagctttgcttatgttcaccagttctgtatatacacagaacgaaccagggtgaagtgaaccaccctactgatcaaatggtgaaaactgaagcgtaggacaggcagcactgatcccactggctttcaatttttctttgtacagaaactgaatgcagttggaacgcggaaggaagcccacgagttgcacgttcggggggaaaaaaacgatgcataagtacatcaggcaaaaaaaaaaaaaaaaaaaactcgagggggggcccggtaccc

SEQ ID NO: 37965 - protein, 480 aa, Zea mays subsp. mays
MKFLVRTLVRNLRIGAMMKTILPALAHAVVFDRNCAADPAVSLEGIKSQLQSLSTEVAEAYNVTPNLDLLIPSLLREGTAFSASSLAMVPGTPIPPMLARITNGLTQSLKAFHGRSFTCEYKYDGQRAQIHKALDGSVRIFSRQMKESTSRFPDLVNMIKELCKPEVSSFILDAEVVGINRKKGNELMSFQELSSRERGNKHSSISIENIKVDICVFVFDIMFHDGERLLDCPLRQRRKYIHDLFHEKPGYFELAQQLNIEACEASPDNSSTLARMDTFFRNACQSSCEGIMLKTLDVDAGYSASKRCDSWLKVKRDYVQGLGDSLDLVPIGAWYGNGRKAGWYSPFLMACYNPETEEFQSVCRVMSGFSDEFYKEMKEFYSGERILPKKPVYYKTDEQPELWFTAEQIWEIRGADLTLSPVHHAAIGLVHPSRGISVRMPRYIRSVPDRSPEDCGTAADIASMFKAQTRKMDVSSEGQE

SEQ ID NO: 37966 - protein, 464 aa, Zea mays subsp. mays
MMKTILPALAHAVVFDRNCAADPAVSLEGIKSQLQSLSTEVAEAYNVTPNLDLLIPSLLREGTAFSASSLAMVPGTPIPPMLARITNGLTQSLKAFHGRSFTCEYKYDGQRAQIHKALDGSVRIFSRQMKESTSRFPDLVNMIKELCKPEVSSFILDAEVVGINRKKGNELMSFQELSSRERGNKHSSISIENIKVDICVFVFDIMFHDGERLLDCPLRQRRKYIHDLFHEKPGYFELAQQLNIEACEASPDNSSTLARMDTFFRNACQSSCEGIMLKTLDVDAGYSASKRCDSWLKVKRDYVQGLGDSLDLVPIGAWYGNGRKAGWYSPFLMACYNPETEEFQSVCRVMSGFSDEFYKEMKEFYSGERILPKKPVYYKTDEQPELWFTAEQIWEIRGADLTLSPVHHAAIGLVHPSRGISVRMPRYIRSVPDRSPEDCGTAADIASMFKAQTRKMDVSSEGQE

SEQ ID NO: 37967 - protein, 463 aa, Zea mays subsp. mays
MKTILPALAHAVVFDRNCAADPAVSLEGIKSQLQSLSTEVAEAYNVTPNLDLLIPSLLREGTAFSASSLAMVPGTPIPPMLARITNGLTQSLKAFHGRSFTCEYKYDGQRAQIHKALDGSVRIFSRQMKESTSRFPDLVNMIKELCKPEVSSFILDAEVVGINRKKGNELMSFQELSSRERGNKHSSISIENIKVDICVFVFDIMFHDGERLLDCPLRQRRKYIHDLFHEKPGYFELAQQLNIEACEASPDNSSTLARMDTFFRNACQSSCEGIMLKTLDVDAGYSASKRCDSWLKVKRDYVQGLGDSLDLVPIGAWYGNGRKAGWYSPFLMACYNPETEEFQSVCRVMSGFSDEFYKEMKEFYSGERILPKKPVYYKTDEQPELWFTAEQIWEIRGADLTLSPVHHAAIGLVHPSRGISVRMPRYIRSVPDRSPEDCGTAADIASMFKAQTRKMDVSSEGQE

SEQ ID NO: 37968 - DNA, 1744 bp, Zea mays subsp. mays
atcgagagccacctgcatggtccggtcctgtatcgtctgaagcgcaacggagtgaattccaatcaaaggatgctcggcgcggttctagacgagtgggctatactcaataggcaaacggtatgtcccgtctaatctgtccctacaagccgattgatggaaactcaccatctcagatcctccttcgatcaacctttagctatttcgatcggacctatctgcttcgccaactacacacttccatcaacgacatgatgatcagccaatttaggagaacgatttttccctcgaccaaggagcagcagcaagactccccgggtgagatgctcctcctgggactgtgcgagctggtcgatttcgaccgcaaaggagatagccgcaaagacgcagaattgaccaagcgatcggttgcactgctctacatcctgagcgtctacactaagcttttcgagcccctctttttggtgaaaacaagggagttcctcaaggacttcgcgggtacccgtagtgcctccagcctcaaggaatacatcaaagcctgtgagaaactcattcaagatgagcgagtcaggttcttgcagtacaacctggagagcacgacccagaagcagatgatggagattgtccaccaggttttgattcacgattacaccgacaagctgttgaacgagggttcgttgacagaacttttgcgagagcacgatgtagcgtcactcaaagcattgtacgatcttctgcatctcgctggcatagaaagcaagctccgcgtgccgtgggcgtcgtacgtcatgtcaaccgcaaagggcatcattggcgacaaagagagaggtgatcaaatgacggtcaggctcttgaccctgcgccgaggcctagatgtcatcatccgagacgccttcctgaaaagtaacgaactcaaggaggggatgcgtggcgcatttggaagtgcgatgaacgacaaagcaactgcatcttgctggagcactggcacctccaaggttgctgagatgattgccaaacactttgatttgctcctccgaggtggcctgaaggcgatcccgaaagagctcctctctgatatccaagatcgagcagtcgccgagaaagaaggcctagcaagcagcgcagatgaggatgctgaactcgacagacaacttaatcaaacgctggagctttgccgtcatgttcatggcaaggacactttcgaagcattctacaagaaagatctggcacgccggctcctgatgggtcgcagtgccagctctgatgccgagaggaacatgatcaccaagctaagagatgaagctgggtcgtctttgactcagaacattgagaccatgttcaaagaccaagagctcgctaaagaggagatggatgcgtttagggagtgggacaggaacacattaggcaaaccgagcgaccttctccatgtcatggtactgtcctctggcgcatggccgacgtatcccgacgtcaacctcaatcttccagataatgtcgcgagtcagcacgagaggtttgataagttctaccagcacaagcacagcggcagggtgcttacttggaagcattgcctcggccatgttacactcaccgccaacttccccaaaggtcgcaaagagctcttcgtctccgcgtttcaggcctcagtccttctcttattcaacaccgttcctaacgatggctttctcagctacgacgagatcaaaactgggaccaatctccaggacgctgatctcgaccggacatt

SEQ ID NO: 37969 - protein, 541 aa, Zea mays subsp. mays
MSRLICPYKPIDGNSPSQILLRSTFSYFDRTYLLRQLHTSINDMMISQFRRTIFPSTKEQQQDSPGEMLLLGLCELVDFDRKGDSRKDAELTKRSVALLYILSVYTKLFEPLFLVKTREFLKDFAGTRSASSLKEYIKACEKLIQDERVRFLQYNLESTTQKQMMEIVHQVLIHDYTDKLLNEGSLTELLREHDVASLKALYDLLHLAGIESKLRVPWASYVMSTAKGIIGDKERGDQMTVRLLTLRRGLDVIIRDAFLKSNELKEGMRGAFGSAMNDKATASCWSTGTSKVAEMIAKHFDLLLRGGLKAIPKELLSDIQDRAVAEKEGLASSADEDAELDRQLNQTLELCRHVHGKDTFEAFYKKDLARRLLMGRSASSDAERNMITKLRDEAGSSLTQNIETMFKDQELAKEEMDAFREWDRNTLGKPSDLLHVMVLSSGAWPTYPDVNLNLPDNVASQHERFDKFYQHKHSGRVLTWKHCLGHVTLTANFPKGRKELFVSAFQASVLLLFNTVPNDGFLSYDEIKTGTNLQDADLDRT

SEQ ID NO: 37970 - protein, 498 aa, Zea mays subsp. mays
MMISQFRRTIFPSTKEQQQDSPGEMLLLGLCELVDFDRKGDSRKDAELTKRSVALLYILSVYTKLFEPLFLVKTREFLKDFAGTRSASSLKEYIKACEKLIQDERVRFLQYNLESTTQKQMMEIVHQVLIHDYTDKLLNEGSLTELLREHDVASLKALYDLLHLAGIESKLRVPWASYVMSTAKGIIGDKERGDQMTVRLLTLRRGLDVIIRDAFLKSNELKEGMRGAFGSAMNDKATASCWSTGTSKVAEMIAKHFDLLLRGGLKAIPKELLSDIQDRAVAEKEGLASSADEDAELDRQLNQTLELCRHVHGKDTFEAFYKKDLARRLLMGRSASSDAERNMITKLRDEAGSSLTQNIETMFKDQELAKEEMDAFREWDRNTLGKPSDLLHVMVLSSGAWPTYPDVNLNLPDNVASQHERFDKFYQHKHSGRVLTWKHCLGHVTLTANFPKGRKELFVSAFQASVLLLFNTVPNDGFLSYDEIKTGTNLQDADLDRT

SEQ ID NO: 37971 - protein, 497 aa, Zea mays subsp. mays
MISQFRRTIFPSTKEQQQDSPGEMLLLGLCELVDFDRKGDSRKDAELTKRSVALLYILSVYTKLFEPLFLVKTREFLKDFAGTRSASSLKEYIKACEKLIQDERVRFLQYNLESTTQKQMMEIVHQVLIHDYTDKLLNEGSLTELLREHDVASLKALYDLLHLAGIESKLRVPWASYVMSTAKGIIGDKERGDQMTVRLLTLRRGLDVIIRDAFLKSNELKEGMRGAFGSAMNDKATASCWSTGTSKVAEMIAKHFDLLLRGGLKAIPKELLSDIQDRAVAEKEGLASSADEDAELDRQLNQTLELCRHVHGKDTFEAFYKKDLARRLLMGRSASSDAERNMITKLRDEAGSSLTQNIETMFKDQELAKEEMDAFREWDRNTLGKPSDLLHVMVLSSGAWPTYPDVNLNLPDNVASQHERFDKFYQHKHSGRVLTWKHCLGHVTLTANFPKGRKELFVSAFQASVLLLFNTVPNDGFLSYDEIKTGTNLQDADLDRT

SEQ ID NO: 37972 - DNA, 1869 bp, Zea mays subsp. mays
aatttgctgaagaaggtgaagaggtgagggctcttcacagccattcaatctcataagacatattgccggagaaactctctcggggggtcgcttcttctgcattttctgcttcccaatggcttccagaattgctgattctctcttcgccttcacgggcccacagcaatgtcttcctagggttcctaagcttgctgcttcttctgctcgtgtttctcctggtgtatatgctgtgaagccgattgatcttctgttaaaaggacgaactcatcgaagtagaagatgtgtagctcctgtgaaaaggagaattggatgtatcaaagcggtggctgctccagttgcaccgccttcagctgacagtgcagaagacagggaacagttagcagaaagctatggattcagacaaattggagaagatcttcctgagaatgtcacctcgatgtcaccgatagcgtccattgccacggttctgcgaccctcatcgcccaggaaatccgccagacaatcttcaacgagctgcaactgacggcgtctgcgggcgtggcaccagtaaagtttctcgccaaaatcgcctccgacatgaataaacccaacggccagtttgtgattacgccggcagaagttccggcatttttacaaaccttaccgctggcaaaaatccccggcgtcggcaaagtctcagcggcaaaactggaagcgatggggctgcggacctgcggtgatgtacaaaagtgtgatctggtgatgctgcttaaacgctttggcaaatttggccgcattttgtgggagcgtagtcaggggattgacgaacgcgatgttaacagcgaacggttgcgaaaatccgtcggcgtggaacgcacgatggcggaagatattcatcactggtctgaatgtgaagcgattatcgagcggctgtatccggaacttgaacgccgtctggcaaaggtaaaacctgatttactgattgctcgccagggggtgaaattaaagttcgacgattttcagcaaaccacccaggagcacgtctggccgcggctgaataaagctgatctaatcgccaccgcgcgtaaaacctgggatgaacgccgcggcgggcgcggtgtgcgtctggtggggctgcatgtgacgttgcttgacccgcaaatggaaagacaactggtgctgggattatgatgtatactattatgtatattctggtgtgcattattatgagggtatcactgtatgcatcgaattctcgctgaaaaatcggtcaatatcactgagttacgtaaaaacccagctaaatactttattgatcaaccggttgcggttctttctaataatcgccccgcaggatatctcttaagtgccagcgcattcgaagcgttaatggacatgcttgctgaacaagaggagaaaaagcccataaaggcgcgcttccgtccaagtgctgcaagattagaggaaattacacgccgcgctgaacaatatcttaatgatatgacggatgatgatttcaatgactttaaggaataaggatgcgggtattcaaaacaaaacttattcgcctgcaacttacagcagaggaacttgatgcgttaacggcggattttatttcctataagcgtgacggtgttttgccagatatatttggtcgcgatgcactctacgacgactcctttacctggccattaatcaaatttgagcgagttgctcatattcatctggcaaatgagaataatccatttccgccacagttgcgccaattcagcagaacgaatgacgaagcgcatttggtatattgtcagggggcgtttgatgagcaagcatggttgctcattgccattctgaaacctgaacctcataaactggctcgagggggggcccggt

SEQ ID NO: 37973 - protein, 197 aa, Zea mays subsp. mays
MNKPNGQFVITPAEVPAFLQTLPLAKIPGVGKVSAAKLEAMGLRTCGDVQKCDLVMLLKRFGKFGRILWERSQGIDERDVNSERLRKSVGVERTMAEDIHHWSECEAIIERLYPELERRLAKVKPDLLIARQGVKLKFDDFQQTTQEHVWPRLNKADLIATARKTWDERRGGRGVRLVGLHVTLLDPQMERQLVLGL

SEQ ID NO: 37974 - protein, 157 aa, Zea mays subsp. mays
MGLRTCGDVQKCDLVMLLKRFGKFGRILWERSQGIDERDVNSERLRKSVGVERTMAEDIHHWSECEAIIERLYPELERRLAKVKPDLLIARQGVKLKFDDFQQTTQEHVWPRLNKADLIATARKTWDERRGGRGVRLVGLHVTLLDPQMERQLVLGL

SEQ ID NO: 37975 - protein, 142 aa, Zea mays subsp. mays
MLLKRFGKFGRILWERSQGIDERDVNSERLRKSVGVERTMAEDIHHWSECEAIIERLYPELERRLAKVKPDLLIARQGVKLKFDDFQQTTQEHVWPRLNKADLIATARKTWDERRGGRGVRLVGLHVTLLDPQMERQLVLGL

SEQ ID NO: 37976 - DNA, 600 bp, Zea mays subsp. mays
attttaccagggggcgtagaacaacacatgttgcagctgcttgcctttacattgcctgcaggcaaagtaagaaggcttatcttcttatcgatttctctgaccatctccaaataagtgtctacgtcctaggtgctgtttttcttcagctctgccaagttttgcaacttgcagaacatccagttgttcagaaacttgtagatcccagtcttttcatccatcgttttacaaaacttttgctgggaagaagaaataatgatgtctcggacacagctttacgcattgtagctagcatgaagagagattggatgcagactgggaggaagccaagcggattatgtggtgcagcattatacattgctgcactctctcatgggtgtaattacaccaaggcagatattgtctctgttgtgcatgtgtgtgaggccactctaacgaagcgattgatagagttcgaaaatacagattctggcagcttaacaattgaagaatttctggcaacagctgatgaatctaatgaagagcctgtttcaaaacattcgcccaagtctggagaaattctctgcaacacaaggataaaggttttgagcattttgctcatgg

SEQ ID NO: 37977 - protein, 199 aa, Zea mays subsp. mays
FTRGRRTTHVAAACLYIACRQSKKAYLLIDFSDHLQISVYVLGAVFLQLCQVLQLAEHPVVQKLVDPSLFIHRFTKLLLGRRNNDVSDTALRIVASMKRDWMQTGRKPSGLCGAALYIAALSHGCNYTKADIVSVVHVCEATLTKRLIEFENTDSGSLTIEEFLATADESNEEPVSKHSPKSGEILCNTRIKVLSILLM

SEQ ID NO: 37978 - protein, 103 aa, Zea mays subsp. mays
MKRDWMQTGRKPSGLCGAALYIAALSHGCNYTKADIVSVVHVCEATLTKRLIEFENTDSGSLTIEEFLATADESNEEPVSKHSPKSGEILCNTRIKVLSILLM

SEQ ID NO: 37979 - DNA, 1001 bp, Zea mays subsp. mays
aaaaactcatctctcaccaccgtctcaaaacaagttcgatctaaaagcctttacctttagattctctccaataacagatctctctgaatcactctgtcatgtcggttttacttcctctctgtctgattatctccatgttcacctattcaaacgcagcgtattgtctttgcaaagaggggaacgagcaagtgcttcagaaggcaatagactacgcttgtggaaatggagctgactgtactcagatccagcccaccggagcttgttaccaacctaacaccgtcaaaaaccactgtgacgtcgccgtcaacagttactaccagaaaaaagcttcttccggtgccacctgtgactttaacggcgccgcctccccctctaccacccctccgtcaactgcttcaagctgtttaactggttcaagctctagtggcactcctaccacaggaacaccaactagtgggacaccaaccagtgggaccccgactaccggaactccgaccaccggaacccccaccactggaactccaaccagtgggactccaactagtggcttcccaaataccgggactccgaacacagggactaacactgggatgccaaattccaacgggatgccaacttcatcgtcatcttcggtgttcccggggactactcttggaccgactggtagcgggggactaggcgatccaaatgctggagagaagctgtctgttcgaactaacacattggtcttcttattaaccggtgtagcagcaatgcttgtcatatgagggcttagatgtcacacgcggttatggttgtaattgggtttgctgagagatcagatcttgcctacggctcatggttgatagagccatctttttttcactcgtctttctaggatttggacttaggttggccgagagacataatgctggtagtagctagtattttgggttatgtacaactttaactaagagctttacttttgtaaatccggaggatgagatgctcttttgtttctt

SEQ ID NO: 37980 - protein, 222 aa, Zea mays subsp. mays
MSVLLPLCLIISMFTYSNAAYCLCKEGNEQVLQKAIDYACGNGADCTQIQPTGACYQPNTVKNHCDVAVNSYYQKKASSGATCDFNGAASPSTTPPSTASSCLTGSSSSGTPTTGTPTSGTPTSGTPTTGTPTTGTPTTGTPTSGTPTSGFPNTGTPNTGTNTGMPNSNGMPTSSSSSVFPGTTLGPTGSGGLGDPNAGEKLSVRTNTLVFLLTGVAAMLVI

SEQ ID NO: 37981 - protein, 210 aa, Zea mays subsp. mays
MFTYSNAAYCLCKEGNEQVLQKAIDYACGNGADCTQIQPTGACYQPNTVKNHCDVAVNSYYQKKASSGATCDFNGAASPSTTPPSTASSCLTGSSSSGTPTTGTPTSGTPTSGTPTTGTPTTGTPTTGTPTSGTPTSGFPNTGTPNTGTNTGMPNSNGMPTSSSSSVFPGTTLGPTGSGGLGDPNAGEKLSVRTNTLVFLLTGVAAMLVI

SEQ ID NO: 37982 - DNA, 517 bp, Zea mays subsp. mays
attcacaaccttttcatggatcagccacggcaaagctcgacggcgtctcagccaccggaaacacctcctcagccgtcggattcgaaaccatcgactttaacacagattcaaccaacgccttccacaaatccgagtccctcctccgttgtttcctctattccctcttccccagctccacaatcaccatcgctcaatccaaaccctaatcctcctcaatacacgcgtccggtgacatctccggcgacgcaacagcagcaacatctctcccagcctttagtacggccgcctccgcaggcgtactctagaccatggcaacaacactcctcttacactcacttctcctccgcttcgtcgccattgttatcttcctcatcagcgccagcctcttcgtcttcgtctttacctattagtgggcaacaaagaggtggtatggcgattggcgttccggcttccccaattccgagtccttctcctaccccttctcaaaattcgccttctgcttttcccggttcttttg

SEQ ID NO: 37983 - protein, 172 aa, Zea mays subsp. mays
IHNLFMDQPRQSSTASQPPETPPQPSDSKPSTLTQIQPTPSTNPSPSSVVSSIPSSPAPQSPSLNPNPNPPQYTRPVTSPATQQQQHLSQPLVRPPPQAYSRPWQQHSSYTHFSSASSPLLSSSSAPASSSSSLPISGQQRGGMAIGVPASPIPSPSPTPSQNSPSAFPGSF

SEQ ID NO: 37984 - protein, 167 aa, Zea mays subsp. mays
MDQPRQSSTASQPPETPPQPSDSKPSTLTQIQPTPSTNPSPSSVVSSIPSSPAPQSPSLNPNPNPPQYTRPVTSPATQQQQHLSQPLVRPPPQAYSRPWQQHSSYTHFSSASSPLLSSSSAPASSSSSLPISGQQRGGMAIGVPASPIPSPSPTPSQNSPSAFPGSF

SEQ ID NO: 37985 - DNA, 928 bp, Zea mays subsp. mays
ggaagcttgtataagatccttcaccgccctaattgcctaattgatgaaaagcggaggatcaagatggcccttgatgtggccaaaggtatgaattgcctgcacactagcatgcctacaattgttcatcgagatctgaaatctccaaacttgctggttgacaataattggaatgttaaggtttgtgactttggactttcgcggttgaagcacagtacatttttgtcatccaaatctacagctggaacacctgagtggatggcacctgaggttctgcggaatgaacaatcgaatgaaaagtgtgatgtttatagctttggtgtcatcttatgggaactggcaacacttagaatgccatggagtgggatgaatccaatgcaagttgtgggggagttggtttccaggatagacggcttgatattcccaaggaagttgatcctctggtcgcaaggataatatttgaatgctggcagaaggatccaaatttgcgcccgtcatttgcacagttaacaagtgccctgaagactgttcaaagactagtgaccctttgtcaccaggagaaccagagcccccatgttcaacaagaaatctcagtgcatttgactccttagtggggctttccactttgcgttgtgcatagttttttgttctgctgctgtttgtgtttgtcaaaaagtcggcaaatgcaccttgtagattgagcgtccgaggtggtagacactttgctgccgcgacaaggaccccaaaggtagggtatgtatagagtcgcccatcaaacagcaatcggatcagtgtgtagcaactcattgttatgccctcgtcaatacctggccaaccgggtgcgagccctctggaaaagcagtgagagctctgtgttcattgtgaatttgcctggctatgctaagtggatttctgtcttgctgcgcaacag

SEQ ID NO: 37986 - protein, 150 aa, Zea mays subsp. mays
GSLYKILHRPNCLIDEKRRIKMALDVAKGMNCLHTSMPTIVHRDLKSPNLLVDNNWNVKVCDFGLSRLKHSTFLSSKSTAGTPEWMAPEVLRNEQSNEKCDVYSFGVILWELATLRMPWSGMNPMQVVGELVSRIDGLIFPRKLILWSQG

SEQ ID NO: 37987 - protein, 129 aa, Zea mays subsp. mays
MALDVAKGMNCLHTSMPTIVHRDLKSPNLLVDNNWNVKVCDFGLSRLKHSTFLSSKSTAGTPEWMAPEVLRNEQSNEKCDVYSFGVILWELATLRMPWSGMNPMQVVGELVSRIDGLIFPRKLILWSQG

SEQ ID NO: 37988 - protein, 121 aa, Zea mays subsp. mays
MNCLHTSMPTIVHRDLKSPNLLVDNNWNVKVCDFGLSRLKHSTFLSSKSTAGTPEWMAPEVLRNEQSNEKCDVYSFGVILWELATLRMPWSGMNPMQVVGELVSRIDGLIFPRKLILWSQG

SEQ ID NO: 37989 - DNA, 893 bp, Zea mays subsp. mays
gctgactcaaaatggcgttcccttaaggtgagatgggatgaagcttcttctgttcctcgtcctgaaagagtttctccttggcaaatagaacctgctgttagcccatctcctgtgaaccctcttccagtcagattcaagaggtctcgttcaagtgttaatgcctcaccatctgatgtgtctactgtaaacagagaagttgcttctaaagtcatggtagagtcgcaacaaaataatctcccaagggccttgcacaatcaaggaaggacacaattgacaggtcgataccgtgatagcactgatgtgaagactgctcaggatcttaccatgtggtcttcaggaactgagcaacagagaaacaatattgctgcccagacaaaacgatgtctggagggttggacgcaatctagaactcccgaaggttacaatcaactgttctcggcatttcaaccactgaaggatgcacataatccacttcgtccttttcctaataaaatatctgggactcgctcaagtacctgggtcacagccgatgcccgttatccagctcaacaagccaatcacaacatgttacatggcacattgtcttttatgcctcatagcagtggttttaggatgattcaacagaataatctagtgatgcctgaagctgcaaattttactgggaaatcagctttcacttcagttcagggccatgtcactgatcagtgctccactggttggtttggacctattgagtcaaattcccacacagaccatgcatcgtcaagtttgatcaggtcccagcctttggttattggaaatgatgttcagaaaaccaaaggcacttcattcaaactatttgggattcctcttggcagtccagaaaaatctgaacctctggtatccccaccaag

SEQ ID NO: 37990 - protein, 297 aa, Zea mays subsp. mays
ADSKWRSLKVRWDEASSVPRPERVSPWQIEPAVSPSPVNPLPVRFKRSRSSVNASPSDVSTVNREVASKVMVESQQNNLPRALHNQGRTQLTGRYRDSTDVKTAQDLTMWSSGTEQQRNNIAAQTKRCLEGWTQSRTPEGYNQLFSAFQPLKDAHNPLRPFPNKISGTRSSTWVTADARYPAQQANHNMLHGTLSFMPHSSGFRMIQQNNLVMPEAANFTGKSAFTSVQGHVTDQCSTGWFGPIESNSHTDHASSSLIRSQPLVIGNDVQKTKGTSFKLFGIPLGSPEKSEPLVSPP

SEQ ID NO: 37991 - protein, 227 aa, Zea mays subsp. mays
MVESQQNNLPRALHNQGRTQLTGRYRDSTDVKTAQDLTMWSSGTEQQRNNIAAQTKRCLEGWTQSRTPEGYNQLFSAFQPLKDAHNPLRPFPNKISGTRSSTWVTADARYPAQQANHNMLHGTLSFMPHSSGFRMIQQNNLVMPEAANFTGKSAFTSVQGHVTDQCSTGWFGPIESNSHTDHASSSLIRSQPLVIGNDVQKTKGTSFKLFGIPLGSPEKSEPLVSPP

SEQ ID NO: 37992 - protein, 189 aa, Zea mays subsp. mays
MWSSGTEQQRNNIAAQTKRCLEGWTQSRTPEGYNQLFSAFQPLKDAHNPLRPFPNKISGTRSSTWVTADARYPAQQANHNMLHGTLSFMPHSSGFRMIQQNNLVMPEAANFTGKSAFTSVQGHVTDQCSTGWFGPIESNSHTDHASSSLIRSQPLVIGNDVQKTKGTSFKLFGIPLGSPEKSEPLVSPP

SEQ ID NO: 37993 - DNA, 595 bp, Zea mays subsp. mays
tttcaagttgtcgcactgttgagttatgaagaaaaagaagagttattcaaacagcaggtttctgatttaagagataggtttcagcattcaattgcccctggtggacttgctggggatcgtcgtggtgttgtcccagcttcaggtttctcatttagttcccagcaattttggaaagtcatcaaggagaacaaagatcttgatttgcctgctcataaagttatggtggctactgtacgttgtgaggaaattggtaatgagaaagttaccagctttatagctgatgaggaatggcaacaatttgaggaggctgtccaacatgactttgttactgggtttgggaagaagctcagcagccttctggatagatgtttatcagagtatgacatggaggctatttattttgatgaaggtgtcagaagctcgaaaagacaacaacttgagtctaaactgttacagcttgtcaatcctgcctatcaatctcttctaggtcacttacacactagaactttagaagcatttaaggagtactttggcaaggccctagaaaaggagggatttgctgtttaaacacaataaagttggaacgggagggggg

SEQ ID NO: 37994 - protein, 188 aa, Zea mays subsp. mays
FQVVALLSYEEKEELFKQQVSDLRDRFQHSIAPGGLAGDRRGVVPASGFSFSSQQFWKVIKENKDLDLPAHKVMVATVRCEEIGNEKVTSFIADEEWQQFEEAVQHDFVTGFGKKLSSLLDRCLSEYDMEAIYFDEGVRSSKRQQLESKLLQLVNPAYQSLLGHLHTRTLEAFKEYFGKALEKEGFAV

SEQ ID NO: 37995 - protein, 115 aa, Zea mays subsp. mays
MVATVRCEEIGNEKVTSFIADEEWQQFEEAVQHDFVTGFGKKLSSLLDRCLSEYDMEAIYFDEGVRSSKRQQLESKLLQLVNPAYQSLLGHLHTRTLEAFKEYFGKALEKEGFAV

SEQ ID NO: 37996 - DNA, 2040 bp, Zea mays subsp. mays
gtcattcaaaagtatgatcatcaatgatgtttggtctatgtaggcctcatcattcttctttcttgctctgttactgtaagctgttctatgaattgtggcattcttttataattttactttatgatttttgcaaattcgattctggttattactgattagttgtacatgtaacagaagtgtaacagaagtgtatttttcaccttcacttgttgtacatgtaacttaggttgcatcatcgtgctgggagtaatccacttgagctgcatgggagtgtatatgaggtaatttgtttagaatgtctgaatgtggtacatccatcagtcaagaatcattccaggaggaatgtggtaaataacattgacccttgttggaagcttgagatatatcgttcgcacgtcagatgttgggtgcagtcactgatgcagatatacctacaagttcgaaaagaaaccgacagaagatgttgtcgatctgacccccaaaaattcgtattgggaagtctcacaaatttcataaacctcttgtcatagcggtcacaggttgtgttgacaatagccacacaaccttcggtccagttacccgggttcctcgtcgcataacctggtgggcacaaacatgctgtacagacgaagattgacatcagggtcaagagttagccttctcttgatgcctggccctacgtcggaggccacaagcgcctgatcatcagcgaagtcgctcgagtcaagcaccccgctatcagtaagcattcctaacctcgtacggttatactggttccgaccatcctggtagatgttctggtcagggtctggccagtatatgtctgagacttgaggcaagtcgctgaagcagaagatgtagttaccaggactacgcgattgggttgtggggactaatctggtcgcagcagtgatgagctgcgtcggcaggaaagtgttcgttggggaatcaaaactctgccatacagtgttacctcctgagtcctcgatgacgagttcccagtgttcaggagccgagcacgctggacaccggtgaagttgttgccatcagctcgccacacggctgcgccgtcgtagtcggtgagcaccatgttgtcatccttttgcagggttagagccgacctcctggcatggacagggcggtcaaggtttgcgctccacacgatggtcttgttggccgccgcctttgagtaccatactgagaatgtgaaggcatgggtgtagacttcatagaagccagaggagaatgtcccgtctgatgattgtaaggcgctggattcctaggactcgactttgagagaggaacccagtggtaggatgtctcaggatgatgcagctcttggaaatagagcgatgaaggagaggatggcagcagtggaaaggagagctgcaagaggacgagacatcattgctgagatggggttttggtcgatgaacgcgcaggcgcagctacttgtatccgtggtatgccgagtttctgtcttagtcctgatagcgaaacgccattacctggtcaaattcagagtgccatggagttcaagttgtttaagtttactttatgcgcattgatggtgaagtgtacagcagccattctagcgatgtgaaggccatatttgctcagctacttaccactcaggtccactcacatttatgttccttgttttccaattgatctttttttggtgaagccttgaaaaaacatcgatgtcatgtttagtgttcgtatcaatagataagtttgtagttgattataaaaaaaaaaaaaaaaaaaaaaaaaaaaaaaaaaaaaaaaaaaaaaaaaaaaaaaaaaaaaaaaaaaaaaaaaaaaaaaaaaaaaaaaaaaaaaaaaaaaaaaaaaaaaaaaaaaaaaaaaaaaaaaaaaaaaaaaaaaaaaaaaaaaaaaaaaacccccggggggggggcccccccccccctcccccccaaagggggggttttaaaatttttgggggggcgtttttaaacccccggggggggaaaacccccgggggccccccaaaaaaacccccgggaaaaccccccc

SEQ ID NO: 37997 - protein, 112 aa, Zea mays subsp. mays
MSCLVFVSIDKFVVDYKKKKKKKKKKKKKKKKKKKKKKKKKKKKKKKKKKKKKKKKKKKKKKKKKKKNPRGGGPPPPPPQRGGFKIFGGAFLNPRGGKTPGGPPKKPPGKPP

SEQ ID NO: 37998 - protein, 83 aa, Zea mays subsp. mays
MSQDDAALGNRAMKERMAAVERRAARGRDIIAEMGFWSMNAQAQLLVSVVCRVSVLVLIAKRHYLVKFRVPWSSSCLSLLYAH

SEQ ID NO: 37999 - protein, 71 aa, Zea mays subsp. mays
MKERMAAVERRAARGRDIIAEMGFWSMNAQAQLLVSVVCRVSVLVLIAKRHYLVKFRVPWSSSCLSLLYAH

SEQ ID NO: 38000 - DNA, 461 bp, Zea mays subsp. mays
  misc_feature (382)..(382): n is a, c, g, or t
gaaaaactacaacgctctttctccgtaggaaaggggaagcaaataaattatcgaagcccactggtttcggagctgatcggtctctatttctctcttcatacatatctcaagcagataaagttgatcggatactagaatgggaggaggatttagagttttgcatttggtgaggccattcttggcttttctgcctgaggttcagagtgctgataggaaggttccattcagagagaaggttatctacactgtcatctctctcttcatctttcttgtctgcagtcagcttcctctttatggaatccattccaccaccggtgcggatccattctattggatgcgtgtcattcttgcgtccaaccgtggaactgtcatggagctcggntattactcctattgttacatctggacttgtgatgcaactcttggctggttccaagattattgagggtgacaacaatgtt

SEQ ID NO: 38001 - protein, 102 aa, Zea mays subsp. mays
  misc_feature (82)..(82): Xaa can be any naturally occurring amino acid
MGGGFRVLHLVRPFLAFLPEVQSADRKVPFREKVIYTVISLFIFLVCSQLPLYGIHSTTGADPFYWMRVILASNRGTVMELXYYSYCYIWTCDATLGWFQDY

SEQ ID NO: 38002 - protein, 56 aa, Zea mays subsp. mays
  misc_feature (30)..(30): Xaa can be any naturally occurring amino acid
MESIPPPVRIHSIGCVSFLRPTVELSWSSXITPIVTSGLVMQLLAGSKIIEGDNNV

SEQ ID NO: 38003 - protein, 55 aa, Zea mays subsp. mays
KTTTLFLRRKGEANKLSKPTGFGADRSLFLSSYISQADKVDRILEWEEDLEFCIW

SEQ ID NO: 38004 - DNA, 1316 bp, Zea mays subsp. mays
accttaagctgagagagtcacagtctcgtctctatctctcctctttgcctttttccactcactacacgccaaacccgacgacatggcagctacctctctcactgcccctccttctttctccggtctccgccgcatttctcccaagctcgacgctgccgccgtctcctcccaccaatccttcttccaccgcgtcaattcctctacccgtctcgtttcttcctcttcttcttctcatcgctctcccagaggtgttgttgccatggctggatccggaaagtttttcgttggaggaaactggaagtgtaacgggactaaggactccatcgccaagcttatctccgatctcaacagtgcaaccttggaagcagatgtagatgttgttgtgtcacctccatttgtctacatcgaccaggtcaaatcctcgttgacagaccgtattgacatatcaggtcagaactcttgggttgggaaaggtggagccttcactggtgaaatcagcgtggaacagctcaaagaccttggctgcaagtgggtcattcttgggcattccgaacggagacatgtcatcggagaaaaagatgagtttatcgggaagaaagctgcatatgcattgagtgagggtcttggagtgatagcttgtattggggaaaagctagaagagagggaagcaggcaagacgtttgatgtttgcttcgcgcaactgaaggcgtttgctgatgctgtgcctagctgggacaatatggttgttgcatacgagcctgtatgggcaattggaactggtaaagttgcatctcctcagcaagcacaagaagtccatgtagctgtccgcggttggctaaagaagaatgtctctgaggaagttgcttccaaaacgagaatcatatatggaggttctgtcaatggaggcaacagtgcagagcttgccaaagaagaagacattgatggatttcttgttggtggtgcctccttgaagggtcctgagtttgcaaccattgtgaactcagtcacgtcgaagaaagttgctgcttgattgagaactatcagtaacggaaatcgctagtctccatggaacagatgagatgagaaataaaagggaggttagcgaccttgttgttgttgttgtgttcttacatcttcttcttgaactaataatggaaaacagaaagaaaaaaaatgattcgtgagctctggtttgacagagagagataaaagggtctttgattaaagatctttgtaactaagctgtgattctttttttcaatttgagtaagcttgactcaaaaaaaaaaaaaaaaaaaactcgagggggggcccgg

SEQ ID NO: 38005 - protein, 315 aa, Zea mays subsp. mays
MAATSLTAPPSFSGLRRISPKLDAAAVSSHQSFFHRVNSSTRLVSSSSSSHRSPRGVVAMAGSGKFFVGGNWKCNGTKDSIAKLISDLNSATLEADVDVVVSPPFVYIDQVKSSLTDRIDISGQNSWVGKGGAFTGEISVEQLKDLGCKWVILGHSERRHVIGEKDEFIGKKAAYALSEGLGVIACIGEKLEEREAGKTFDVCFAQLKAFADAVPSWDNMVVAYEPVWAIGTGKVASPQQAQEVHVAVRGWLKKNVSEEVASKTRIIYGGSVNGGNSAELAKEEDIDGFLVGGASLKGPEFATIVNSVTSKKVAA

SEQ ID NO: 38006 - protein, 256 aa, Zea mays subsp. mays
MAGSGKFFVGGNWKCNGTKDSIAKLISDLNSATLEADVDVVVSPPFVYIDQVKSSLTDRIDISGQNSWVGKGGAFTGEISVEQLKDLGCKWVILGHSERRHVIGEKDEFIGKKAAYALSEGLGVIACIGEKLEEREAGKTFDVCFAQLKAFADAVPSWDNMVVAYEPVWAIGTGKVASPQQAQEVHVAVRGWLKKNVSEEVASKTRIIYGGSVNGGNSAELAKEEDIDGFLVGGASLKGPEFATIVNSVTSKKVAA

SEQ ID NO: 38007 - DNA, 1222 bp, Zea mays subsp. mays
actaccgctgcgagtggccgctcccgcaggttctgctctccgccttctccatccacaacgagaccctcaacgtctggacgcatcttataggatttttcatctttctcgctctgaccatatacacagcaacacaagttccaaatgcagtagatatccggagcttgcagcatttgccagatgtactgagaaaggctgatattcataagattcaggcagagcttgtgtcatgtcttccgtcgttacctcacctttcagatctacaaaagctgaaggatgagctgaagacctcttggaattctatggaggttcttccatctctgtcccgttggcatctcttggagttactcgcaaattgtctgccacacagatttacccatcccaatgaaacaagtttgtctgttcttcaaagcatgaaggaggatctagcaagcctgattgcaccgcaactgatcagaccaattgcgcggtggccattctatgccttcttgggaggagccatgttctgcctccttgccagcagcacttgccaccttctctcctgccattctcgccgcctagcatacattatgcttcggcttgattacgcaggcatcgcagctctaatcgccacgtccttctaccctccagtatactattctttcatgtgctaccccttcttttgcaacctgtacctcagtttcataaccatcctaggagtggcaactatcgcgttctctctacttccggtcttccagaatccggagttcagaaccatcagagcatgcctcttctttggcatgggtgcatctggcgtgatacctgttcttcacaagctggtcctcttctggcaccaaccggaggcattgcacacgaccggatacgaaattctgatggggctcttctacgggctgggagcattggtatatgcggcacgggtacctgagcgctggatgcctgggaagtttgacatcgccgggcacagccaccagctgttccacgtcttggttgttgccggagcctacacacactaccacgcagggcttgtgtacctcaagtggagagacctgcaaggctgctgaaaggtgctgcatcgttgaggatgtggatagattgtagattccgtgaattcaggctgaaggtcatggtctgttgtaaattgtaacagtaatcatgaaacaattgctacaagtctaccaggtagtcgggcttccattaataatcaattgaagactagtatttatgc

SEQ ID NO: 38008 - protein, 351 aa, Zea mays subsp. mays
YRCEWPLPQVLLSAFSIHNETLNVWTHLIGFFIFLALTIYTATQVPNAVDIRSLQHLPDVLRKADIHKIQAELVSCLPSLPHLSDLQKLKDELKTSWNSMEVLPSLSRWHLLELLANCLPHRFTHPNETSLSVLQSMKEDLASLIAPQLIRPIARWPFYAFLGGAMFCLLASSTCHLLSCHSRRLAYIMLRLDYAGIAALIATSFYPPVYYSFMCYPFFCNLYLSFITILGVATIAFSLLPVFQNPEFRTIRACLFFGMGASGVIPVLHKLVLFWHQPEALHTTGYEILMGLFYGLGALVYAARVPERWMPGKFDIAGHSHQLFHVLVVAGAYTHYHAGLVYLKWRDLQGC

SEQ ID NO: 38009 - protein, 252 aa, Zea mays subsp. mays
MEVLPSLSRWHLLELLANCLPHRFTHPNETSLSVLQSMKEDLASLIAPQLIRPIARWPFYAFLGGAMFCLLASSTCHLLSCHSRRLAYIMLRLDYAGIAALIATSFYPPVYYSFMCYPFFCNLYLSFITILGVATIAFSLLPVFQNPEFRTIRACLFFGMGASGVIPVLHKLVLFWHQPEALHTTGYEILMGLFYGLGALVYAARVPERWMPGKFDIAGHSHQLFHVLVVAGAYTHYHAGLVYLKWRDLQGC

SEQ ID NO: 38010 - protein, 215 aa, Zea mays subsp. mays
MKEDLASLIAPQLIRPIARWPFYAFLGGAMFCLLASSTCHLLSCHSRRLAYIMLRLDYAGIAALIATSFYPPVYYSFMCYPFFCNLYLSFITILGVATIAFSLLPVFQNPEFRTIRACLFFGMGASGVIPVLHKLVLFWHQPEALHTTGYEILMGLFYGLGALVYAARVPERWMPGKFDIAGHSHQLFHVLVVAGAYTHYHAGLVYLKWRDLQGC

SEQ ID NO: 38011 - DNA, 749 bp, Zea mays subsp. mays
aattcctaccatgacttagttgctgattctattagtttatggaaaatagttgacatgaaagttctcgaggaacttttggaggaagtgattaagcttcagtgcagctcagccagctatgtttacgattgttttattagatgtttgagcaaagtcgacagattggaggaagcaaaaagttttctcgtagggatgcagagtgctaacttaaccccaagtgaggatgtatatacttgtatgatagaatgttgctacagaatgaaattgctaaaagaagctttaaggtttcttgattcaatggtgaaaagaaactatttaccacgtttagaatcttataggtttattatttgtgctctttgtgaggaaggaagctttcatactgctaaaagcatttttggtgacatactatcaaaggaatacaaccgtgatgagattgcttggaagattttgattgatggcttattacaaaaaggaaacactgctgactgctcccgtctgctatcattcatggaggaacagaattgccgtcctggttctgcaatatattctaggcttacaggcgaaataacagttacaagtgaagctcaggaaattgctacatgaatacggacaaaccaaccaaccttagtgttggtgttgatggttccatgaatcagtacaagatgggcaaattgaaagctaaaaagactttggctgtttgacattagcagtgcccctgtaattgtgaggaaggatgtggcaacacaaataat

SEQ ID NO: 38012 - protein, 199 aa, Zea mays subsp. mays
NSYHDLVADSISLWKIVDMKVLEELLEEVIKLQCSSASYVYDCFIRCLSKVDRLEEAKSFLVGMQSANLTPSEDVYTCMIECCYRMKLLKEALRFLDSMVKRNYLPRLESYRFIICALCEEGSFHTAKSIFGDILSKEYNRDEIAWKILIDGLLQKGNTADCSRLLSFMEEQNCRPGSAIYSRLTGEITVTSEAQEIAT

SEQ ID NO: 38013 - protein, 181 aa, Zea mays subsp. mays
MKVLEELLEEVIKLQCSSASYVYDCFIRCLSKVDRLEEAKSFLVGMQSANLTPSEDVYTCMIECCYRMKLLKEALRFLDSMVKRNYLPRLESYRFIICALCEEGSFHTAKSIFGDILSKEYNRDEIAWKILIDGLLQKGNTADCSRLLSFMEEQNCRPGSAIYSRLTGEITVTSEAQEIAT

SEQ ID NO: 38014 - protein, 136 aa, Zea mays subsp. mays
MQSANLTPSEDVYTCMIECCYRMKLLKEALRFLDSMVKRNYLPRLESYRFIICALCEEGSFHTAKSIFGDILSKEYNRDEIAWKILIDGLLQKGNTADCSRLLSFMEEQNCRPGSAIYSRLTGEITVTSEAQEIAT

SEQ ID NO: 38015 - DNA, 610 bp, Zea mays subsp. mays
ggcggttcccaaccatggcggcctcccccacttcctccctcgccccgccggtggtgcctatggagcttcacgccggcaaccgctaccgcctcgtcgccgcgctccgcggccacatctccgcctccgcgcgcccgctccacggcctcgtcctccttcagggcggggaggagaagacacggtactgcaccgatcacctcgagctcttcaggcaggagagctacttcgcctatctctttggagtgcaggaaccagggttctacggcgcaattgacatcgcctctggacagtcaattttgttcgctccaagattgccagctgactatgctgtttggatgggtgaaataaaacctttgtcgtacttcagggatacatacaaggttgatatggtcttctatgttgatgagattgcaagggttgtgcaagatcatttcgggaaccatggaaagcctcttctgtttctgctacatgggaggaatactgactctggaaatttctcaaagcctgctagttttgaggggatggagaagtttgatactgatttaattacacttcatccaattttaaccgaatgtcgtgtgattaaatctgatctggagcttgctctcatccg

SEQ ID NO: 38016 - protein, 202 aa, Zea mays subsp. mays
RFPTMAASPTSSLAPPVVPMELHAGNRYRLVAALRGHISASARPLHGLVLLQGGEEKTRYCTDHLELFRQESYFAYLFGVQEPGFYGAIDIASGQSILFAPRLPADYAVWMGEIKPLSYFRDTYKVDMVFYVDEIARVVQDHFGNHGKPLLFLLHGRNTDSGNFSKPASFEGMEKFDTDLITLHPILTECRVIKSDLELALI

SEQ ID NO: 38017 - protein, 198 aa, Zea mays subsp. mays
MAASPTSSLAPPVVPMELHAGNRYRLVAALRGHISASARPLHGLVLLQGGEEKTRYCTDHLELFRQESYFAYLFGVQEPGFYGAIDIASGQSILFAPRLPADYAVWMGEIKPLSYFRDTYKVDMVFYVDEIARVVQDHFGNHGKPLLFLLHGRNTDSGNFSKPASFEGMEKFDTDLITLHPILTECRVIKSDLELALI

SEQ ID NO: 38018 - protein, 183 aa, Zea mays subsp. mays
MELHAGNRYRLVAALRGHISASARPLHGLVLLQGGEEKTRYCTDHLELFRQESYFAYLFGVQEPGFYGAIDIASGQSILFAPRLPADYAVWMGEIKPLSYFRDTYKVDMVFYVDEIARVVQDHFGNHGKPLLFLLHGRNTDSGNFSKPASFEGMEKFDTDLITLHPILTECRVIKSDLELALI

SEQ ID NO: 38019 - DNA, 706 bp, Zea mays subsp. mays
aacaagcccctttccaggtcactgctgaccttgttcatatcgatttctttgttttgtagtcagttttgctgtgcagagttactctttcagtttgcctaatttaaaaggaaaaaaaactttacatgcaagaaataatggatgctgttaacaatagtggaaaatttgacacgaagtttggaggctttactggtactgacggtccattggggaagataatggagaattcaaaaactcgggctgagatcggttgggaaccaaagtatccaagcttcaccgaattccttggtatcagcagttaacatccttgcatagtgttcagttagtctgactcagctgagttgcaaccgtgattagattgtacatcgttaggggatggtacacagattcagttctgggaagataaatgggttggggtctgtcctttgaaagaccaatttccagatctgtacaacattgtgagaaagaaaaaggcaacagtagctaatgttcttcaacataatcaacttaatgtggcttttcgtcggtcacttaatgtaaataatctagctgctttgaataaggtagtagctagagtatttactattagtctatttgatcgaagagacacgtttgtttgggatcttctcccgcaaggtcagtttacggtcagctctatgtatagggctttagtcgccccgaacattgtttcgagaaaccaccccatctg

SEQ ID NO: 38020 - protein, 58 aa, Zea mays subsp. mays
MQEIMDAVNNSGKFDTKFGGFTGTDGPLGKIMENSKTRAEIGWEPKYPSFTEFLGISS

SEQ ID NO: 38021 - protein, 54 aa, Zea mays subsp. mays
MDAVNNSGKFDTKFGGFTGTDGPLGKIMENSKTRAEIGWEPKYPSFTEFLGISS

SEQ ID NO: 38022 - protein, 32 aa, Zea mays subsp. mays
NKPLSRSLLTLFISISLFCSQFCCAELLFQFA

SEQ ID NO: 38023 - DNA, 407 bp, Zea mays subsp. mays
ggtccgagccaatgccttcaagggagtgtcaatctggtggagagctattcagctgaagtgaaccgtttaaatagtattcatccatgcttaaagaggaacttcccatgtgttgcttcgaatggacaatatcactcttcactgcatatcaattgcggcgacaaagaagcaactattaacggaactaaatatgaagccgacacaacacccaaaggggcatcattgttgtatgtgtccccaggcttgaactgggcattcagcagcaccgggaacttcatggacgacaacataaatgacgacaactacatagcaacaagtgcatcaaaattggccgtgcccaattcagatctgtacaacaaagcccgtctttctcctctttcgctcacatattatgggctttgcatgttaag

SEQ ID NO: 38024 - protein, 135 aa, Zea mays subsp. mays
GPSQCLQGSVNLVESYSAEVNRLNSIHPCLKRNFPCVASNGQYHSSLHINCGDKEATINGTKYEADTTPKGASLLYVSPGLNWAFSSTGNFMDDNINDDNYIATSASKLAVPNSDLYNKARLSPLSLTYYGLCML

SEQ ID NO: 38025 - protein, 44 aa, Zea mays subsp. mays
MDDNINDDNYIATSASKLAVPNSDLYNKARLSPLSLTYYGLCML

SEQ ID NO: 38026 - DNA, 656 bp, Zea mays subsp. mays
gtgtgacggagaggcattcaatgtatcgggttttccacgctctgaagagcatcggagagggctgcgatgtcacggagcagtttgatgagttcccattggcctataacaaggatgattcagacgctatttagctgatgatgctgattgccaattcgattgtggaaatgtttggtcaggcttattgatgatatatatatttagccttgctatggacagaccggaagcataaatgagtgataagagaacaatatcgaggcaccaaatctagcgccggatgccgggtggtcaattacatcgttgcatcgacaggggatgtgataaccataagtaatattgctcgaaaatgtagagctgactcttgaagcctttgactaaatgcagctgccattcacgctgaaagcgcattctaacacggcatgatacactagcaactggaatgttgtcaacatcagcggcaacgacgacaacgccacatcgagaaacaacaactgtgggctagggagcacaatcccgtggtgcggtgacttgcccacgtttgccatgctgccttgatgcatggcacatcaacaagaagagcaccagtttggaaggctaattccgaaggaattgagatgtgcagagggagatgaagaatgtggagaaagacatcagggtag

SEQ ID NO: 38027 - protein, 42 aa, Zea mays subsp. mays
VTERHSMYRVFHALKSIGEGCDVTEQFDEFPLAYNKDDSDAI

SEQ ID NO: 38028 - protein, 36 aa, Zea mays subsp. mays
MYRVFHALKSIGEGCDVTEQFDEFPLAYNKDDSDAI

SEQ ID NO: 38029 - protein, 33 aa, Zea mays subsp. mays
MAHQQEEHQFGRLIPKELRCAEGDEECGERHQG

SEQ ID NO: 38030 - DNA, 572 bp, Zea mays subsp. mays
tggtgatgctgccactcctagttcacctggaagatctcatcgtggaatgtcatctggtggtgatgtgcctatgactgatcagactgatgatgacccatatgaggatgaatttgatgaagaagatgagatgaacatgtaccgtgtccaaggtacattgagggagtgggtcacaagagatgaagtccgtcgctttattgcaaagaaatttaaagaatttcttctgacatatgttcatccgaagaacgatcaaggagagtttgagtatgttcggcttattaatgagatggttttagctaacaagtgtagcctggaaatagactacaagcagtttatttatatacatccaaacattgccatctggttggctgatgcgcctcaatcagtgcttgaagttatggaagaagttgccaaaaatgttgtttttgatcttcacaagaattataggaacatccaccaaaagatctatgttcgaatatcgaaccttcctgtctatgatcaaatacgcaatatcaggcaaatccatctgaacacaatgattcgaattggtggtgttgttacccgacgatctggtg

SEQ ID NO: 38031 - protein, 190 aa, Zea mays subsp. mays
GDAATPSSPGRSHRGMSSGGDVPMTDQTDDDPYEDEFDEEDEMNMYRVQGTLREWVTRDEVRRFIAKKFKEFLLTYVHPKNDQGEFEYVRLINEMVLANKCSLEIDYKQFIYIHPNIAIWLADAPQSVLEVMEEVAKNVVFDLHKNYRNIHQKIYVRISNLPVYDQIRNIRQIHLNTMIRIGGVVTRRSG

SEQ ID NO: 38032 - protein, 175 aa, Zea mays subsp. mays
MSSGGDVPMTDQTDDDPYEDEFDEEDEMNMYRVQGTLREWVTRDEVRRFIAKKFKEFLLTYVHPKNDQGEFEYVRLINEMVLANKCSLEIDYKQFIYIHPNIAIWLADAPQSVLEVMEEVAKNVVFDLHKNYRNIHQKIYVRISNLPVYDQIRNIRQIHLNTMIRIGGVVTRRSG

SEQ ID NO: 38033 - protein, 167 aa, Zea mays subsp. mays
MTDQTDDDPYEDEFDEEDEMNMYRVQGTLREWVTRDEVRRFIAKKFKEFLLTYVHPKNDQGEFEYVRLINEMVLANKCSLEIDYKQFIYIHPNIAIWLADAPQSVLEVMEEVAKNVVFDLHKNYRNIHQKIYVRISNLPVYDQIRNIRQIHLNTMIRIGGVVTRRSG

SEQ ID NO: 38034 - DNA, 1547 bp, Zea mays subsp. mays
atataaatttggttaaatttgaattacttttgactcctcaaggaatgacttataataatttaggatggagggagtatttccatattactagagctcagactgacaaatttagactacagagttatcctaagaaattgagaaaccatatcaaaacataataactgaacaggtgcatactcaggcacttcctgacttaacactgacgctgcaacatgtctgacaccatgaacaactaaaaactcgacaccagatagataacaaaatcaagattcacctaccatgcttgagtaggtcatacaacatttgctggtaatcgatcatcagtgcacttaaataccataaaatagaattcttagatgatactcagctcagtccactgcatcactcagccaggtccatgagcgtcctggtcacttccttggtcaggtcgtggcgacgaagatgtaggttcatcagtgcacgcctctgcttcttgatcctctcgtccagtgtacgggccttgctgtcttcgatcatcccaaactcccgcttgaacaagcctgggtgtgccctctgaagcgccctcacctcctccgcaaggtatgggtacagctcacacatctcgtcaggctccctcccagcaccaccgttagccgacgccttggtaaccgccttggtaacaggcttggcattgctaacagaaggccagacgttcttgcagaggtcgaagagacggcgatcctgatccttgctcggtggcgcgcctttcttgaccgctttggcgtaccggctctgcaaactcctcaccttcctcttgagatcggagaggctgcagccactattgtcgagcttgccagcgagggcgtcggccagcacgtccgtttgaggcagcgcgccgtgctccaggcgttgagcagcgagggcctgcaggatgcggaagtggtcgtcaatcgaccaggtgcgctggaacggcgcgctcggccgctttgcacctttagcctacacctcttgatttggagcggggttcgtctgcggcatctcgtcgtgcgcctccctatccttttcttcgtcggaagcctcagaatcctcgccagtctgcggcggcggaggcgggttcttggtggcggaagaagggaccacgtggttggccttctcgtcctcttcgatatcctcctcttcgtcgtcttcatcctcatcggacgcttcgggttcctggaccttctgcggctcgtcatcttcatcgtcatactcatcctcgtcggacgcttcgggttcctggaccttctgcggcagcggagcaacgctcttgggagcgacgggaggcggtgagtgggcggtctccaaatcatcctcctcctcctcctcctcctcctcctcctcctcctcggagcccgaaccagaggcggtctcctcggaggaggcagccgggggcggaggcggcggaggtggagccgagcgcttgggggccatctccgccgctgcacctagggttagagatttggcaagctggtgaggcggcaccaagctagggttttcgcggcgtcgcggttttgttcatttttttatat

SEQ ID NO: 38035 - protein, 52 aa, Zea mays subsp. mays
MSVLVTSLVRSWRRRCRFISARLCFLILSSSVRALLSSIIPNSRLNKPGCAL

SEQ ID NO: 38036 - protein, 51 aa, Zea mays subsp. mays
INLVKFELLLTPQGMTYNNLGWREYFHITRAQTDKFRLQSYPKKLRNHIKT

SEQ ID NO: 38037 - protein, 37 aa, Zea mays subsp. mays
MTYNNLGWREYFHITRAQTDKFRLQSYPKKLRNHIKT

SEQ ID NO: 38038 - DNA, 609 bp, Zea mays subsp. mays
tttctgtgtacattgcaattggattcatcacagtgttcttcttgctgtttagatcgatagcacttgttgttcttgggatccaagcatcaagatctttattttcccagttactcaactcattgttccgtgcgccaatgtccttttttgattctacccctcttggaaggatacttagccgggtatcttcagatttgagcattgttgatcttgatgttccatttggattgatgcttgctcttggtgccagcataaatgcatatagcaatctgggggtgttggctgttgttacatggcaagttctgttcgtctctgtgccgatgatggttttggcactcaggttgcagaagtactatttagcctcagctaaggaactgatgaggatcaatggcactaccaaatcagctctggctaatcacttgggagagtcggttgcagggtctataacaataagggctttcgaggaagaagatcgtttctttgagaaaaattcggaacttgttgacaagaatgctgcttcatatttctataattttgcagcgactgaatggctgattcaacgcctggaaacaatgagtgctgcagttcttttctttactgccttcatcatgg

SEQ ID NO: 38039 - protein, 202 aa, Zea mays subsp. mays
SVYIAIGFITVFFLLFRSIALVVLGIQASRSLFSQLLNSLFRAPMSFFDSTPLGRILSRVSSDLSIVDLDVPFGLMLALGASINAYSNLGVLAVVTWQVLFVSVPMMVLALRLQKYYLASAKELMRINGTTKSALANHLGESVAGSITIRAFEEEDRFFEKNSELVDKNAASYFYNFAATEWLIQRLETMSAAVLFFTAFIM

SEQ ID NO: 38040 - protein, 158 aa, Zea mays subsp. mays
MSFFDSTPLGRILSRVSSDLSIVDLDVPFGLMLALGASINAYSNLGVLAVVTWQVLFVSVPMMVLALRLQKYYLASAKELMRINGTTKSALANHLGESVAGSITIRAFEEEDRFFEKNSELVDKNAASYFYNFAATEWLIQRLETMSAAVLFFTAFIM

SEQ ID NO: 38041 - protein, 127 aa, Zea mays subsp. mays
MLALGASINAYSNLGVLAVVTWQVLFVSVPMMVLALRLQKYYLASAKELMRINGTTKSALANHLGESVAGSITIRAFEEEDRFFEKNSELVDKNAASYFYNFAATEWLIQRLETMSAAVLFFTAFIM

SEQ ID NO: 38042 - DNA, 672 bp, Zea mays subsp. mays
acctttctcaccgtttctctcctagtctcctctcgtttcccgtcctcctcccgttgggagtataaaatttcctaatccgcaaacgaagcttccagaaggcttcttcttgcgtaccttccacttccacccaacgcgactcgctctttcccgcatctggaagtcgccggctcagatccagccgggctgcggcgctggccggatggccgagcagggcggcgcagccggggaggccgctggcagcgacccccctgcgcctgcgcctgcgactgccccggcgccagccccagcgcttgctgcggacgcggccgggcagaggtccctgccgacgccgttcctgaccaagacgtaccagctggtggacgacccggcggtggacgacgtgatctcgtggaacgaggacggctcgacgttcgtggtgtggcggccggcggagtttgcgcgcgacctcctccccaagtatttcaagcacaataacttctccagctttgtgcggcagctcaacacctacgaagatggtgcccgaccggtgggagttcgccaacgacttcttccgccgtggggagaagcgcctgctttgcgacatacaccgacggaaggtagcaccggctccggcggcggggctggccactgcggccgccgctgccgcgtccggggccgtaacggtggccgcgg

SEQ ID NO: 38043 - protein, 157 aa, Zea mays subsp. mays
MAEQGGAAGEAAGSDPPAPAPATAPAPAPALAADAAGQRSLPTPFLTKTYQLVDDPAVDDVISWNEDGSTFVVWRPAEFARDLLPKYFKHNNFSSFVRQLNTYEDGARPVGVRQRLLPPWGEAPALRHTPTEGSTGSGGGAGHCGRRCRVRGRNGGR

SEQ ID NO: 38044 - DNA, 696 bp, Zea mays subsp. mays
taatccaaaactgatcccctctgtttctgctgacccaccaaaaccctaatggcttcccgcctcctccacctgcgccgcctcctcccggccgcgcgcccgtcatgcgccgccgcgttctccaccgccgtcaccccgaccccgcaggtctccggtctcgtcgacgagatctgcggcctcaacctcatcgaggcctcctccctcgccgatgcgctgcgcggccgcctcggcgtcgaccagctccctcccctagccatcctcatgggcggcgcagccccgctggccggagatgctgccggggccggcgaggaggcgaaacccaaggaggaaaaaatggcgttcgacgtgaagctggaggggttcgacgccgcggcgaagctcaagattatcaaggagctgagggcgatcacgagtttgggcctgaaggaggccaaggagctcgtggagaaggcgccggccgtgctcaaggccggggttcccaaggaggaggcggagagcatcgccgagaagatgcgggcactgggcgccaagattgttctcgagtgagaggacgagatctctgtatgcctttgcttcttgatttcttcctgtttattgtacgaaggaattagagaaattttggtactaaggagtcaataattgacgagactgactctagatatcctctcgttgatagtggaaatggcagttgagcttttg

SEQ ID NO: 38045 - protein, 168 aa, Zea mays subsp. mays
MRRRVLHRRHPDPAGLRSRRRDLRPQPHRGLLPRRCAARPPRRRPAPSPSHPHGRRSPAGRRCCRGRRGGETQGGKNGVRREAGGVRRRGEAQDYQGAEGDHEFGPEGGQGARGEGAGRAQGRGSQGGGGEHRREDAGTGRQDCSRVRGRDLCMPLLLDFFLFIVRRN

SEQ ID NO: 38046 - protein, 164 aa, Zea mays subsp. mays
MASRLLHLRRLLPAARPSCAAAFSTAVTPTPQVSGLVDEICGLNLIEASSLADALRGRLGVDQLPPLAILMGGAAPLAGDAAGAGEEAKPKEEKMAFDVKLEGFDAAAKLKIIKELRAITSLGLKEAKELVEKAPAVLKAGVPKEEAESIAEKMRALGAKIVLE

SEQ ID NO: 38047 - protein, 94 aa, Zea mays subsp. mays
MGGAAPLAGDAAGAGEEAKPKEEKMAFDVKLEGFDAAAKLKIIKELRAITSLGLKEAKELVEKAPAVLKAGVPKEEAESIAEKMRALGAKIVLE

SEQ ID NO: 38048 - DNA, 560 bp, Zea mays subsp. mays
tctatcatctcatttctcacctgcctccgccgtcatggcttccgagaaagaagctgctctcgccgccactccttccgattctcccaccatatttgacaagatcatcagcaaagagattccatccaccgtggtttttgaggatgacaaggtcttagcttttagggacataacgccccaggagagagagagagagagagagctcactagtccccccccccccccccccgaaggttgttgtatcaacaaagagcccaaaatctgacaaacaatatgtttgggaaggacaagcagattctggttcttataccattagagaggaaaaagacccggagcagctcattcctaggggaactcgccttactctctatctcaagtgtgatgataagggttttgctcaccctgagaggattcaaaaacttctaaagacttactctcagtttgtttcctttcccatttacacatgggaagagaaaggcttcacaaaagaggtcgaggttgatgaagatccagcggaagcccaaaaaaaaggtgatgattcagcggaaaccaaaactgagcct

SEQ ID NO: 38049 - protein, 86 aa, Zea mays subsp. mays
LSSHFSPASAVMASEKEAALAATPSDSPTIFDKIISKEIPSTVVFEDDKVLAFRDITPQERERERELTSPPPPPPEGCCINKEPKI

SEQ ID NO: 38050 - protein, 75 aa, Zea mays subsp. mays
MASEKEAALAATPSDSPTIFDKIISKEIPSTVVFEDDKVLAFRDITPQERERERELTSPPPPPPEGCCINKEPKI

SEQ ID NO: 38051 - protein, 50 aa, Zea mays subsp. mays
MFGKDKQILVLIPLERKKTRSSSFLGELALLSISSVMIRVLLTLRGFKNF

SEQ ID NO: 38052 - DNA, 1290 bp, Zea mays subsp. mays
acctagaacatcctaatcgaaaacagacctacttactcatccaccaatcatcagttcatcacagcacgaacgacatggctgctgctccggtggttgtgccgcgcatgaagctgggctcgcaggggctggaggtctcggcgcagggcctcggctgcatgggcatgtccgcggcctacggcgagcgcaagcccgaccaggacatgatcgcgctcctccgccacgccgtcgccgccggcgtcaccttcctcgacacctccgacatctacggcccccacaccaacgagctcttactcggcaaggcgctgcagggaggggtgagggagcaggtccaattggccacgaaatttggcatcacggccacctgggaggtccacggcgacccggcctacgtgcgggcggcgtgcgagggcagcctcgcccggctcggcgtcgactgcatcgacctctactaccagcaccgcatcgacaagaatgtccccgtggagatcacgatgggtgagatcaagaagttagtccaagaaggaaaagtgaaatacgtcgggttgtcggaggcctcggcgtcgacaataagaagggcacacgcagttcatcccatcaccgccgttcagctggagtggtctttgtggtcaagagatgtcgaagaagatataatcccaacttgcagagaacttggcattggaattgtagcttacagtccactaggcagaggttttctatccactggacctaaactagtggacacattaccagaagacgatttccgcaagaatctcccaagatttcaacccgagaacatgaagaagaatgcagagatattcgagcgcgtgagcgagatggctgcgaggaagggttgcacgtcgtctcagctcgtgctggcttgggttcaccaccagggaagcgatgtgtgccccatacccggcacgacgaaagttgagaatttcaaccagaacctgagagcattgtctgttgagctcacggctgaggagatggctgagctcgagtcctacgctgccatggatgcggtccaaggtgatcggtaccacaacacgttcctcaacacctggaaggactccgagaccccttccctgtcatcctggaaagccacttagttgggtatcatgggaatcaatcactatgctgatgcttcgtatcactggtttgaaatagttgcaaatcaaataatttcacgagcactccgtgcatggatggaatcatggaaccaccaattgtttactaatgtagcacaattcctgcccatgagtgttgaactttttattatgcctgcaaggt

SEQ ID NO: 38053 - protein, 368 aa, Zea mays subsp. mays
LEHPNRKQTYLLIHQSSVHHSTNDMAAAPVVVPRMKLGSQGLEVSAQGLGCMGMSAAYGERKPDQDMIALLRHAVAAGVTFLDTSDIYGPHTNELLLGKALQGGVREQVQLATKFGITATWEVHGDPAYVRAACEGSLARLGVDCIDLYYQHRIDKNVPVEITMGEIKKLVQEGKVKYVGLSEASASTIRRAHAVHPITAVQLEWSLWSRDVEEDIIPTCRELGIGIVAYSPLGRGFLSTGPKLVDTLPEDDFRKNLPRFQPENMKKNAEIFERVSEMAARKGCTSSQLVLAWVHHQGSDVCPIPGTTKVENFNQNLRALSVELTAEEMAELESYAAMDAVQGDRYHNTFLNTWKDSETPSLSSWKAT

SEQ ID NO: 38054 - protein, 344 aa, Zea mays subsp. mays
MAAAPVVVPRMKLGSQGLEVSAQGLGCMGMSAAYGERKPDQDMIALLRHAVAAGVTFLDTSDIYGPHTNELLLGKALQGGVREQVQLATKFGITATWEVHGDPAYVRAACEGSLARLGVDCIDLYYQHRIDKNVPVEITMGEIKKLVQEGKVKYVGLSEASASTIRRAHAVHPITAVQLEWSLWSRDVEEDIIPTCRELGIGIVAYSPLGRGFLSTGPKLVDTLPEDDFRKNLPRFQPENMKKNAEIFERVSEMAARKGCTSSQLVLAWVHHQGSDVCPIPGTTKVENFNQNLRALSVELTAEEMAELESYAAMDAVQGDRYHNTFLNTWKDSETPSLSSWKAT

SEQ ID NO: 38055 - protein, 334 aa, Zea mays subsp. mays
MKLGSQGLEVSAQGLGCMGMSAAYGERKPDQDMIALLRHAVAAGVTFLDTSDIYGPHTNELLLGKALQGGVREQVQLATKFGITATWEVHGDPAYVRAACEGSLARLGVDCIDLYYQHRIDKNVPVEITMGEIKKLVQEGKVKYVGLSEASASTIRRAHAVHPITAVQLEWSLWSRDVEEDIIPTCRELGIGIVAYSPLGRGFLSTGPKLVDTLPEDDFRKNLPRFQPENMKKNAEIFERVSEMAARKGCTSSQLVLAWVHHQGSDVCPIPGTTKVENFNQNLRALSVELTAEEMAELESYAAMDAVQGDRYHNTFLNTWKDSETPSLSSWKAT

SEQ ID NO: 38056 - DNA, 875 bp, Zea mays subsp. mays
taggagtcccgtcactcgacatgtcttatgggctgtttgaagaataccctgtttaccactcgttgtatgatgattatgtttgggtggagaggtttggagaccccttgttccacaggcatgttgcagtggccagcgtttggggtctgattgcactgaaacttgctgacgacgagatcatacccttcaattacgtctcttatgcctccgaactggaggagtgcacaaaagatatcgtagataaatgtaaaggatttcctgtcagtttctctcctttgcagaactccatcaagcagctcgagagtgctgccaccaaaatttacaaagagaagaagttgctgcaagcagaaaactggagcctaaagacaagtaagtatacgctgaaagtcagggagataaacgacctgttgatgatggccgagcgagcgttcaccaaccgagaaggactggtcgggagaccatggtacaagcatatgatatatgcatcatcggatcaagacgactgggggaccaaagccttccctggtatagtctcggccatggacaaggctaagaagtccaacacaaccgagacgtggcgactgctgcagcacgagatttacagggttgccagggctgtgtccaaggcttctgcagtcctggatggtaaactaacatgatgtgcacgtgcactgcagattttcattctattctacatagatcgaagtacccgatggattcagtttccatttcgtttcttgaaagctgaagtgcgtggaatacctgtcaggcatcattggataattgtgtaaataatgaagaaatatgctcaagttagtgtcctatgaataaagaatagtggaatcatctctcacgatgattcccttgagagtatcgcc

SEQ ID NO: 38057 - protein, 217 aa, Zea mays subsp. mays
GVPSLDMSYGLFEEYPVYHSLYDDYVWVERFGDPLFHRHVAVASVWGLIALKLADDEIIPFNYVSYASELEECTKDIVDKCKGFPVSFSPLQNSIKQLESAATKIYKEKKLLQAENWSLKTSKYTLKVREINDLLMMAERAFTNREGLVGRPWYKHMIYASSDQDDWGTKAFPGIVSAMDKAKKSNTTETWRLLQHEIYRVARAVSKASAVLDGKLT

SEQ ID NO: 38058 - protein, 211 aa, Zea mays subsp. mays
MSYGLFEEYPVYHSLYDDYVWVERFGDPLFHRHVAVASVWGLIALKLADDEIIPFNYVSYASELEECTKDIVDKCKGFPVSFSPLQNSIKQLESAATKIYKEKKLLQAENWSLKTSKYTLKVREINDLLMMAERAFTNREGLVGRPWYKHMIYASSDQDDWGTKAFPGIVSAMDKAKKSNTTETWRLLQHEIYRVARAVSKASAVLDGKLT

SEQ ID NO: 38059 - DNA, 808 bp, Zea mays subsp. mays
aaaaaaaaaaaaggatacatcaaaccctcaaaagtgaaaagcccgtgtctactaaaacccaagacacttgggcggttcacggcggcccagactgcggcgcctcaccaaccaacgagaccacgaagcagaccatgtcatcctacggtcccgccggcgccgcggcggacgcgatggaagctgccggcggcggcagctaccgtgtgtgcgacacggtggtgctcgtctgcctcgcctgcgcctccgccctcatcgtctctacgatggccgtctgcttccgccgcgccttcgccaacgggtacacggccagcgcgggggccaccgctgcgaacggcagaagccagtgtgggctggcgccgtccgcgctgtcggcgatccccaagctcgcctaccggaggggcgctggcgctggcgctgggtgggcgcagtgcgcgatctgcctcgccttggtgcgggacggcgagacggtgcggttgctgccggcgtgtggccacctattccacgttgagtgcatcgacctgtggctgcgctctcacgctacgtgcccgctttgccggcgtgacgtcggggaggagccacatgaaaaagtttgagctcgccgctggtggaccaggatgacacacgccggctactggttcaaccgccggcctctagagtctagactctagttcaacttttgtttcctgccatgatgttgggcattcatccaaagaattgtacatcctagggtttaggcgtagtttcattttttttcggtggaatggaacctttattctgccatccaaaaaaaaaaaaaaaaaagcttatcgat

SEQ ID NO: 38060 - protein, 204 aa, Zea mays subsp. mays
KKKKGYIKPSKVKSPCLLKPKTLGRFTAAQTAAPHQPTRPRSRPCHPTVPPAPRRTRWKLPAAAATVCATRWCSSASPAPPPSSSLRWPSASAAPSPTGTRPARGPPLRTAEASVGWRRPRCRRSPSSPTGGALALALGGRSARSASPWCGTARRCGCCRRVATYSTLSASTCGCALTLRARFAGVTSGRSHMKKFELAAGGPG

SEQ ID NO: 38061 - protein, 195 aa, Zea mays subsp. mays
KKKRIHQTLKSEKPVSTKTQDTWAVHGGPDCGASPTNETTKQTMSSYGPAGAAADAMEAAGGGSYRVCDTVVLVCLACASALIVSTMAVCFRRAFANGYTASAGATAANGRSQCGLAPSALSAIPKLAYRRGAGAGAGWAQCAICLALVRDGETVRLLPACGHLFHVECIDLWLRSHATCPLCRRDVGEEPHEKV

SEQ ID NO: 38062 - protein, 152 aa, Zea mays subsp. mays
MSSYGPAGAAADAMEAAGGGSYRVCDTVVLVCLACASALIVSTMAVCFRRAFANGYTASAGATAANGRSQCGLAPSALSAIPKLAYRRGAGAGAGWAQCAICLALVRDGETVRLLPACGHLFHVECIDLWLRSHATCPLCRRDVGEEPHEKV

SEQ ID NO: 38063 - DNA, 842 bp, Zea mays subsp. mays
  misc_feature (186)..(186): n is a, c, g, or t
  misc_feature (232)..(232): n is a, c, g, or t
  misc_feature (267)..(267): n is a, c, g, or t
  misc_feature (419)..(419): n is a, c, g, or t
  misc_feature (452)..(452): n is a, c, g, or t
  misc_feature (454)..(454): n is a, c, g, or t
  misc_feature (482)..(482): n is a, c, g, or t
  misc_feature (489)..(489): n is a, c, g, or t
atcccctccgacggcagaccgcatcacgcagctttagtcccatctctcaaaccatccgaccccacctcgccgctcactcccaagccagtccctgccggcagcgatggcccgcacgaagcagacggcgcgcaagtcgacgggcggcaaggcgccgcggaagcagctggcgacgaaggcggcgcgcangtcggcgccggccacggggggcgtgaagaagccgcaccgcttccgnccgggcaccgtggcgctgcgggagatccgcaagtnccagaagagcacggagctgctgatccggaagctgccgttccagcggctggtgcgggagatcgcgcaggacttcaagacggacctccggttccagtcctccgccgtggccgcgctgcaagaggccgccgaggcctacctcgtgggcctcttcnaggacaccaacctttgcgccatccacgccaagngngtcaccatcatgcccaaggacatccagntcgcccnccgcatccggggcgagagggcctgagcaccccccgtctctgctgtgttcccttcgctttctgatttctgtagcgcgaagaactactgtagtaggggaagaactacctcgtgttatattggggttgtgggtaggaaactaggaatgttctgttggtttcgatgcagtgcccccgtgatactgacatccgtgctgcttgttctgttcttcctactacaaatgcgattgttactattatcttagcgtttgtttatgcggttatgcttctggaactgaacagtgctacttgttaacgctttgcgttccaacttccaacagaaataaatccgctacactgctgcgtccgtagaattgt

SEQ ID NO: 38064 - protein, 183 aa, Zea mays subsp. mays
  misc_feature (62)..(62): Xaa can be any naturally occurring amino acid
  misc_feature (78)..(78): Xaa can be any naturally occurring amino acid
  misc_feature (89)..(89): Xaa can be any naturally occurring amino acid
  misc_feature (140)..(140): Xaa can be any naturally occurring amino acid
  misc_feature (151)..(152): Xaa can be any naturally occurring amino acid
  misc_feature (161)..(161): Xaa can be any naturally occurring amino acid
  misc_feature (163)..(163): Xaa can be any naturally occurring amino acid
IPSDGRPHHAALVPSLKPSDPTSPLTPKPVPAGSDGPHEADGAQVDGRQGAAEAAGDEGGAXVGAGHGGREEAAPLPXGHRGAAGDPQXPEEHGAADPEAAVPAAGAGDRAGLQDGPPVPVLRRGRAARGRRGLPRGPLXGHQPLRHPRQXXHHHAQGHPXRXPHPGREGLSTPRLCCVPFAF

SEQ ID NO: 38065 - protein, 136 aa, Zea mays subsp. mays
  misc_feature (28)..(28): Xaa can be any naturally occurring amino acid
  misc_feature (43)..(43): Xaa can be any naturally occurring amino acid
  misc_feature (55)..(55): Xaa can be any naturally occurring amino acid
  misc_feature (106)..(106): Xaa can be any naturally occurring amino acid
  misc_feature (117)..(117): Xaa can be any naturally occurring amino acid
  misc_feature (127)..(127): Xaa can be any naturally occurring amino acid
  misc_feature (129)..(129): Xaa can be any naturally occurring amino acid
MARTKQTARKSTGGKAPRKQLATKAARXSAPATGGVKKPHRFXPGTVALREIRKXQKSTELLIRKLPFQRLVREIAQDFKTDLRFQSSAVAALQEAAEAYLVGLFXDTNLCAIHAKXVTIMPKDIQXAXRIRGERA

SEQ ID NO: 38066 - DNA, 657 bp, Zea mays subsp. mays
aggtttctcaacagtcgcacccttccccagctagccatggcgaccgcgccgcggaggctgctccccgcgctcctcaaggccctagctccagccggcgcgcgcggcctctccaccgagaaggctgtcggcgccgccgccgtcgccgtcgtcggcagccataccgctaagtggatgcaggacacgagcaagaagtcaccaatggaactgatcaacgaggtacctccgatcaaggttgatggccgcattgccgtttgtgaaggggctgctgaaggtgttgggcttggccagggccggtcctgacattttgggggccctaagcgaaagtctatatagaggccctatacgaaagtttgattctgctattttttcaactttaaatgatatctggaaaataagttgatgatttacattgtttccaaaatgatactccctccgtttctttttagttgtcgctggatagttcaattttgcactatccagcgacaactaaaacgaaacggaggaagtatgactgaagactgttacaatatttcatattttgtaatataactctgcatttgctttgagagcaaaaaaaaaaaaaaaaaaaaaaaaaaccaaaaaaaaaaaaaaaaaagctcatcgataccgtcgacctcgagggggggcccggtaccc

SEQ ID NO: 38067 - protein, 99 aa, Zea mays subsp. mays
RFLNSRTLPQLAMATAPRRLLPALLKALAPAGARGLSTEKAVGAAAVAVVGSHTAKWMQDTSKKSPMELINEVPPIKVDGRIAVCEGAAEGVGLGQGRS

SEQ ID NO: 38068 - protein, 87 aa, Zea mays subsp. mays
MATAPRRLLPALLKALAPAGARGLSTEKAVGAAAVAVVGSHTAKWMQDTSKKSPMELINEVPPIKVDGRIAVCEGAAEGVGLGQGRS

SEQ ID NO: 38069 - protein, 54 aa, Zea mays subsp. mays
VSQQSHPSPASHGDRAAEAAPRAPQGPSSSRRARPLHREGCRRRRRRRRRQPYR

SEQ ID NO: 38070 - DNA, 1452 bp, Zea mays subsp. mays
atccaatatccactgcaccacttctgctaatcccttgttcttgtgcctccgatccggagctctcaccattgtcatcgtcaatcgatcaatataaagcgagccaattaccccaaggagctaccgcttgcgacggtatggcgatcccggtgattgacttctccaagctggacggccctgagagggccgagaccatggcggccctcgctgccgggttcgagcacgtggggttcttccagctggtgaacaccggcatctccgacgacctgctggagcgggtgaagaaggtgtgcagcgactcctacaagctgcgggacgaggcgttcaaggactccaaccccgcggtgaaggcgctcacagagctcgtggacaaggagatcgaggacggcctccccgcgaggaagataaaggacatggactgggaggacgtcttcaccctccatgacgacctgccatggccttccaaccctcccgccttcaaggagacgatgatggagtaccgcagggagctgaagaagctggcggagaagatgctgggcgtgatggaggagctgctggggttggaggagggccacatcaggaaggccttcagcaacgacggcgagttcgagcccttctacggcaccaaggtcagccactacccgccgtgcccgcggccggacctcatcgacggcctgcgcgcgcacaccgacgccggcggcctcatccttctgttccaggatgaccgcttcggcggcctgcaggcgcagcttccggacggcagctgggtcgacgtccagcccctcgagaacgccatcgtcatcaacaccggcgaccagatcgaggtgctgagcaatggccggtacaagagcgcatggcaccgcatcctggcgacccgcgacggcaaccggcgctccatcgcctccttctacaacccagcgcgcctggccaccatcgctccggcgatccccgccgcaggggtcggcgacgacgactacccgagcttcgtgttcggcaactacatggaggtgtacgtcaagcagaagttccagcctaaggcgcccagatttgaagccatggccacgacgacgaccaagtgatgacctagcagcgactcagcgagagcctaaataaatattaattcacagtcgtcaagttaatcttgtggttatacggtacgggcggggcttgtacttatgtaggttgctaagtcttaagtgtgtagtttaattaacgtgtgtgtggaatgtacgcgtcatacaaatgtgttggtgtgtgccctgccgcaagattgcggtgagcggtggatctatggtcaacgggtgcctaaatgatttgtgcttttgtagcataaaatggcacatctcctctgcttttgttacatctccaccttttctttttgcacttttcacctcaagtaaaacatgtggcggctttcactaagtacaaagaagctctacagagctatttctattg

SEQ ID NO: 38071 - protein, 357 aa, Zea mays subsp. mays
PISTAPLLLIPCSCASDPELSPLSSSIDQYKASQLPQGATACDGMAIPVIDFSKLDGPERAETMAALAAGFEHVGFFQLVNTGISDDLLERVKKVCSDSYKLRDEAFKDSNPAVKALTELVDKEIEDGLPARKIKDMDWEDVFTLHDDLPWPSNPPAFKETMMEYRRELKKLAEKMLGVMEELLGLEEGHIRKAFSNDGEFEPFYGTKVSHYPPCPRPDLIDGLRAHTDAGGLILLFQDDRFGGLQAQLPDGSWVDVQPLENAIVINTGDQIEVLSNGRYKSAWHRILATRDGNRRSIASFYNPARLATIAPAIPAAGVGDDDYPSFVFGNYMEVYVKQKFQPKAPRFEAMATTTTK

SEQ ID NO: 38072 - protein, 313 aa, Zea mays subsp. mays
MAIPVIDFSKLDGPERAETMAALAAGFEHVGFFQLVNTGISDDLLERVKKVCSDSYKLRDEAFKDSNPAVKALTELVDKEIEDGLPARKIKDMDWEDVFTLHDDLPWPSNPPAFKETMMEYRRELKKLAEKMLGVMEELLGLEEGHIRKAFSNDGEFEPFYGTKVSHYPPCPRPDLIDGLRAHTDAGGLILLFQDDRFGGLQAQLPDGSWVDVQPLENAIVINTGDQIEVLSNGRYKSAWHRILATRDGNRRSIASFYNPARLATIAPAIPAAGVGDDDYPSFVFGNYMEVYVKQKFQPKAPRFEAMATTTTK

SEQ ID NO: 38073 - protein, 294 aa, Zea mays subsp. mays
MAALAAGFEHVGFFQLVNTGISDDLLERVKKVCSDSYKLRDEAFKDSNPAVKALTELVDKEIEDGLPARKIKDMDWEDVFTLHDDLPWPSNPPAFKETMMEYRRELKKLAEKMLGVMEELLGLEEGHIRKAFSNDGEFEPFYGTKVSHYPPCPRPDLIDGLRAHTDAGGLILLFQDDRFGGLQAQLPDGSWVDVQPLENAIVINTGDQIEVLSNGRYKSAWHRILATRDGNRRSIASFYNPARLATIAPAIPAAGVGDDDYPSFVFGNYMEVYVKQKFQPKAPRFEAMATTTTK

SEQ ID NO: 38074 - DNA, 1135 bp, Zea mays subsp. mays
  misc_feature (927)..(927): n is a, c, g, or t
attcatccgcccgggcccctccgcacgcctgcacacattccgcgcacaccccggcagccgcaaacgccttcgccgtcgcgtcccgctcctccgcccgcccgacgcgacccctaggacctggagagagaggtcggcatggctgccgcagtggtcgacgacgctggtatggacgccgtccagaagcgcctcatgttcgaagacgaatgcattttggtggacgagcaggacaatgttgttggccatgagtcaaagtacaactgccatttgatggaaaagattgattctgagaatctgctacatagggcattcagtgtgttccttttcaactcaaaatatgagctgctacttcagcaaaggtccgcgacaaaggttacctttcctttagtttggaccaatacctgctgcagccaccctctgtaccgtgagtctgagcttatccaggagaactaccttggtgtgagaaatgcagcacagaggaagctactggatgagctgggcatcccagcagaagatgccccagttgaccaattcacccctctgggccgaatgctttacaaggcaccatctgacgggaaatggggggagcatgagcttgactacctgctgttcatcgtccgggacgtgaaggtgcagccgaacccagatgaagtcgctgacgtgaagtacgtgaaccgcgacgagctcaaggagctcatccggaaggctgacgctggcgaggacggggtgaagatctccccctggttcaggctggtggtggacaacttcctcatgggctggtgggaccatgtcgagaaaggcaccctcggcgaggccgtggacatggagaccatccataagctgaaggagtgaggggccgccggccggccggctccgatgacctcaccacctgttgatgttgctgctgctgctgcactgcatgtttatcanaagttatcgctcctgctcgcggaaagtgagcttgactgttgccggggtggaagtgtcgttttggactgaagatgagtgccgcggaggggtttgttgtttgtttgtttgtttgttcggtgaccgaatcgcgagttggacgcctgtttaatccgtgcttatacatcgtctgagtaaacagcaataagagggacatccgtaagctctttcc

SEQ ID NO: 38075 - protein, 237 aa, Zea mays subsp. mays
MAAAVVDDAGMDAVQKRLMFEDECILVDEQDNVVGHESKYNCHLMEKIDSENLLHRAFSVFLFNSKYELLLQQRSATKVTFPLVWTNTCCSHPLYRESELIQENYLGVRNAAQRKLLDELGIPAEDAPVDQFTPLGRMLYKAPSDGKWGEHELDYLLFIVRDVKVQPNPDEVADVKYVNRDELKELIRKADAGEDGVKISPWFRLVVDNFLMGWWDHVEKGTLGEAVDMETIHKLKE

SEQ ID NO: 38076 - protein, 227 aa, Zea mays subsp. mays
MDAVQKRLMFEDECILVDEQDNVVGHESKYNCHLMEKIDSENLLHRAFSVFLFNSKYELLLQQRSATKVTFPLVWTNTCCSHPLYRESELIQENYLGVRNAAQRKLLDELGIPAEDAPVDQFTPLGRMLYKAPSDGKWGEHELDYLLFIVRDVKVQPNPDEVADVKYVNRDELKELIRKADAGEDGVKISPWFRLVVDNFLMGWWDHVEKGTLGEAVDMETIHKLKE

SEQ ID NO: 38077 - protein, 219 aa, Zea mays subsp. mays
MFEDECILVDEQDNVVGHESKYNCHLMEKIDSENLLHRAFSVFLFNSKYELLLQQRSATKVTFPLVWTNTCCSHPLYRESELIQENYLGVRNAAQRKLLDELGIPAEDAPVDQFTPLGRMLYKAPSDGKWGEHELDYLLFIVRDVKVQPNPDEVADVKYVNRDELKELIRKADAGEDGVKISPWFRLVVDNFLMGWWDHVEKGTLGEAVDMETIHKLKE

SEQ ID NO: 38078 - DNA, 1486 bp, Zea mays subsp. mays
ccccccccccccctctcgcgcagcgctactgccggctgtccggagtcccgaccaccgtcctcggctccccgccgtgaatccatcatcccgtaatggagacctgcccctcggtgaagaacatcctcttgctggactcggagggaaagcgcgtcgccgtaaagtactacagcgatgactggcctactctatccgcgaagctggccttcgagaagtcggtatttaccaaaacccagaaagcgaatgctggaacggaaggtaatttacatatgctttctcttatgcggaagtagttgtgtgagccacggcgagcgttgctgtgctcgattgaggtagtacagagtagttgattagcattatcatctcataatgaactcacgtgtgtcagtgtgtgatgtattgttataatccgttctatatatgctgatgttgggcaagaatgcttctttatagggtagaatcacttcttcgatattaaattacaccattcttgttttgattcttttgctgtgctacatgttaatttattggtgcctatgccattttattcattgcttatttgacatggcttatatacaaattatctactctactccctccattccaaattgcaagatgttttagcttttctagacatcttttgctatgtacttagatatacattatatttaaatacattatatttatatacattatatgtttttcatgtccagctgtttatcatctattaacctcagtcataacactgtttgtacgagctcccactcatgccacaaatctgtaaatgagccagggctagttttccatctgactgaccttgatttctccttaaacatgcagatatgactgtttgagtttttgttcttctcttcaagtatttcatatttttctttgtttctctttaacagttgagattgtaatgtttgacggtcaaattgtggtatacaagttcatccaagacctgcacttttttgttactggaggagaagaagagaatgagcttattttagcatcagttcttcagggattctctgatgctgtcgaacgacttctcaaaaacatggttgacaaaaggacagcactcgagaatttggatatgatcctattgtgccttgatgaaattgttgatggagggattgtacttgaaacagaaggaagagagatagctgaaaaggtgtctggacatggattggagggtgcttcatcagctgagcagactttagtcaacgccctaacgcaagcaagagagcattttgcgaagtctcttctcatgtgatgctatgctttatatattagggcgacgatggagtatctattactgtgtctggataacacagttttttttttttggttagcagtggaccaaaaaaaaaaaggtctgaaatctttgaatgtgtagaatggcatgttgtgtccaaaattttcatttgtaagccttcaagttgtgtagcatggttttttcttctaattttgactggtttcgttatcg

SEQ ID NO: 38079 - protein, 118 aa, Zea mays subsp. mays
MFDGQIVVYKFIQDLHFFVTGGEEENELILASVLQGFSDAVERLLKNMVDKRTALENLDMILLCLDEIVDGGIVLETEGREIAEKVSGHGLEGASSAEQTLVNALTQAREHFAKSLLM

SEQ ID NO: 38080 - protein, 71 aa, Zea mays subsp. mays
MVDKRTALENLDMILLCLDEIVDGGIVLETEGREIAEKVSGHGLEGASSAEQTLVNALTQAREHFAKSLLM

SEQ ID NO: 38081 - protein, 65 aa, Zea mays subsp. mays
METCPSVKNILLLDSEGKRVAVKYYSDDWPTLSAKLAFEKSVFTKTQKANAGTEGNLHMLSLMRK

SEQ ID NO: 38082 - DNA, 511 bp, Zea mays subsp. mays
acccacttccgctctgctcacgtgccgtgcccgtgtgcatcggggaaaaaacagcagcaggggccgaatcggagctccgccgccggcagatctgcgccggccggtctgctccgcccagcggacatggaccgcgacggccgcccggggtggctaccgtcgctgggcttcgccttcctcagcttcaactgcgggatggccgtctaccgctcctgggacgacccctacgccgtcgccttcgtcctcgccgcgtacgccgccctcgtcctcctcttccgctgcctccaccttctggagcgccgccgggaccagcgcctcaagctcgccgtctggggcctctccacgctcctcacactcatgttctcgtacaagatcgccgccgtgatgccgccctgggcccagctgctcgtctggggcatggggatcctcaccgtcgttgcgggattctacgccttcttcgtcgcccgcccggaggagccctgacccttcgttcgtctccatgccgccccccccc

SEQ ID NO: 38083 - protein, 169 aa, Zea mays subsp. mays
PLPLCSRAVPVCIGEKTAAGAESELRRRQICAGRSAPPSGHGPRRPPGVATVAGLRLPQLQLRDGRLPLLGRPLRRRLRPRRVRRPRPPLPLPPPSGAPPGPAPQARRLGPLHAPHTHVLVQDRRRDAALGPAARLGHGDPHRRCGILRLLRRPPGGALTLRSSPCRPP

SEQ ID NO: 38084 - protein, 159 aa, Zea mays subsp. mays
THFRSAHVPCPCASGKKQQQGPNRSSAAGRSAPAGLLRPADMDRDGRPGWLPSLGFAFLSFNCGMAVYRSWDDPYAVAFVLAAYAALVLLFRCLHLLERRRDQRLKLAVWGLSTLLTLMFSYKIAAVMPPWAQLLVWGMGILTVVAGFYAFFVARPEEP

SEQ ID NO: 38085 - protein, 126 aa, Zea mays subsp. mays
PTSALLTCRARVHRGKNSSRGRIGAPPPADLRRPVCSAQRTWTATAARGGYRRWASPSSASTAGWPSTAPGTTPTPSPSSSPRTPPSSSSSAASTFWSAAGTSASSSPSGASPRSSHSCSRTRSPP

SEQ ID NO: 38086 - protein, 118 aa, Zea mays subsp. mays; identical to SEQ ID NO: 36513

SEQ ID NO: 38087 - DNA, 1430 bp, Zea mays subsp. mays
tgtcagatgaaacaaatggttgagatctacattaagttagcagaactggagaccaagaaggaggacactaacaaaaaaattccgctgcccagggaggcccgcagcattggtcagcttgaactagttccagttgtgactgctaccgttcctattgatcctagctgtcgttatgaggaaggctcctttccacatttcactgggttggctgactccattatgatcatgaatggaattaatgctcccaaagttatagaatgttttggctcggatggtaacaaataccgtcaacttgcaaaatctggaaatgatgacctgcgacaggatgctgtgatggagcaattttttagtttggtaaatacattcttgcaaaatcaccgagatacttctaaaaggagattgaaaatccgtacatataaggttgttcctttcaccccaagtgctggtgttgttgaatggtactagaagtggtggagcacatggacgatatggaattggggactggacatatcttcaatgcagagagtacctgatgagtgaaaaggacaaaaggagggcatttcttaaaatctgcagcaactttaggcctgtgatgcaccacttctttcttgaaagattcttgctgcctgctgattggttccaaagtagacttgcttacacaaggagtgtagcagcaagctcgatggtaggatatatagtcggtcttggggatcgccattccatgaatattctcatcgaccaagacacagctgaggttgtacacattgatcttggtgttgcatttgaacagggtctcatgcttaaaacacctgaacgggttccatttcggttgacaagggatattatagatggcatgggtgttactggtgttgaaggtgtgttcagaagatgttgtgagaaaactctctgtgtcatgagggcgaataaagaagcattgctcactattattgaagtcttcgttcatgatcctctatataaatgggcactctcaccactgaaagccttacagcgtcaaaaggaaacagttgatactgattcatgtttggatgactcccaagaaccttacgatggcaacaaggatgcagctcgagctatacttcgtgttaaacagaagttggatggatatgaagatggcgagatgagaagtgtgcagggccaggtccaacaactcatacaggacgcggtggatgttgatcggttgtgccaaatgtttccaggttggggaccttggttgtaagctccattgaaagggatgtaaattttgatcgaaggcaagagcaacttttttcactgcttatgaggttttattctttggtgtgtttttttccctcaccaccctgtcaacattcctacaaagtacagcaaacggcttttggtaccctgtaaattgatgggaaggcaaggacgacatttgagtgcaggtgggttgtacc

SEQ ID NO: 38088 - protein, 234 aa, Zea mays subsp. mays
MSEKDKRRAFLKICSNFRPVMHHFFLERFLLPADWFQSRLAYTRSVAASSMVGYIVGLGDRHSMNILIDQDTAEVVHIDLGVAFEQGLMLKTPERVPFRLTRDIIDGMGVTGVEGVFRRCCEKTLCVMRANKEALLTIIEVFVHDPLYKWALSPLKALQRQKETVDTDSCLDDSQEPYDGNKDAARAILRVKQKLDGYEDGEMRSVQGQVQQLIQDAVDVDRLCQMFPGWGPWL

SEQ ID NO: 38089 - protein, 214 aa, Zea mays subsp. mays
MHHFFLERFLLPADWFQSRLAYTRSVAASSMVGYIVGLGDRHSMNILIDQDTAEVVHIDLGVAFEQGLMLKTPERVPFRLTRDIIDGMGVTGVEGVFRRCCEKTLCVMRANKEALLTIIEVFVHDPLYKWALSPLKALQRQKETVDTDSCLDDSQEPYDGNKDAARAILRVKQKLDGYEDGEMRSVQGQVQQLIQDAVDVDRLCQMFPGWGPWL

SEQ ID NO: 38090 - protein, 184 aa, Zea mays subsp. mays
MVGYIVGLGDRHSMNILIDQDTAEVVHIDLGVAFEQGLMLKTPERVPFRLTRDIIDGMGVTGVEGVFRRCCEKTLCVMRANKEALLTIIEVFVHDPLYKWALSPLKALQRQKETVDTDSCLDDSQEPYDGNKDAARAILRVKQKLDGYEDGEMRSVQGQVQQLIQDAVDVDRLCQMFPGWGPWL

SEQ ID NO: 38091 - DNA, 672 bp, Zea mays subsp. mays
ccccccccccccccggtatgatctctagtggaaaagtattatcctgcagatttctcaaatcaagaaagaatgcaattagagtgccaattgccacattttcaacttgatgtttgcaaccatccagaactaaagggtttatcatctttggctgatttaacaagtggattagttaaattggataaagattcttcttatccgatggtagataaattattgagattactcttgactctccctgtgtcaactgcgaccacagagtgagccttttcagctatgaaatttgtgaagacacgtcttcgaagcaaaatgggagatgcctatttacgggattatctggtcgtttatattgaaagggaattagcggcaatgattagttctgatgatattatcaaggcctatgatctagctaatacacgtagagctaaattcaaaataactgagatgtaattttaatttgtttgacaaaatagatgctcttttattatattgttttgtaatgaagattatatatcaatatatgcattgtggttggttcccttgccatttttatattgtgtcattgctggtttggtcgcttggaggctaagcctgccccctctgtcttcggatcctggcttcgccccctggccaccaccagtgctgctgcttcccctatggcatgcccaaggtatg

SEQ ID NO: 38092 - protein, 63 aa, Zea mays subsp. mays
MQLECQLPHFQLDVCNHPELKGLSSLADLTSGLVKLDKDSSYPMVDKLLRLLLTLPVSTATTE

SEQ ID NO: 38093 - protein, 57 aa, Zea mays subsp. mays
MKFVKTRLRSKMGDAYLRDYLVVYIERELAAMISSDDIIKAYDLANTRRAKFKITEM

SEQ ID NO: 38094 - protein, 46 aa, Zea mays subsp. mays
MGDAYLRDYLVVYIERELAAMISSDDIIKAYDLANTRRAKFKITEM

SEQ ID NO: 38095 - DNA, 922 bp, Zea mays subsp. mays
gttcatctctctcctctttggccttcctttccttgcgaagacgactgggacgagcgccccccgcgcttctgcaggcgagcaccccgccaccagtcggagatgaacgcgtccaggaaatccagccatctctccagcaaggacagtgcagagaccgcgagggatatcatcaccacgtccggccaaatccaacccctcaaaatcccggacgctgttgctgcgctcgcacaggctgctgcaaaggcaaatggtgagaccgagaaatatcttccagggtggccgttgttctcgcctcctaaggtgcagctggacaagtgtaccaagtgctccagagaattctgttctgcaatcaacttccggaggcacacacgtgttcatcgtagatccctcaagatagatagggattttccaaagaatagagaccttctcgctgcattctggaataaactcactgtggatgatgccagcaaaattttgtccttgacaggtgttgttattgagggtgtaactggttcatcaattttgacagcactgtcatcatggatgtgtaaaccagggtatgcttcgttgccagttgcatatgccagagctggcagtgagcttctggatctaattcaagcaaagccttcaatgcatctgcctgtttcatcggatgaactatttagtttgctcgatgaagcaagtgaaaaaacatttctttgcacaaatacagctgcttatatacagaagtttttatttgatggagaggtagaaaaaattgcaactgagttgaaaaatgttgtttcgtgcgctagttacatgcttgaacaaaagctgcttgaagcatggtgtgctgataagactgctgaagcattaagatgccagaagttgctggaggatgaagaggaagctgctcagaaaaggcaagccgaactgatggaaatgt

SEQ ID NO: 38096 - protein, 307 aa, Zea mays subsp. mays
VHLSPLWPSFPCEDDWDERPPRFCRRAPRHQSEMNASRKSSHLSSKDSAETARDIITTSGQIQPLKIPDAVAALAQAAAKANGETEKYLPGWPLFSPPKVQLDKCTKCSREFCSAINFRRHTRVHRRSLKIDRDFPKNRDLLAAFWNKLTVDDASKILSLTGVVIEGVTGSSILTALSSWMCKPGYASLPVAYARAGSELLDLIQAKPSMHLPVSSDELFSLLDEASEKTFLCTNTAAYIQKFLFDGEVEKIATELKNVVSCASYMLEQKLLEAWCADKTAEALRCQKLLEDEEEAAQKRQAELMEM

SEQ ID NO: 38097 - protein, 274 aa, Zea mays subsp. mays
MNASRKSSHLSSKDSAETARDIITTSGQIQPLKIPDAVAALAQAAAKANGETEKYLPGWPLFSPPKVQLDKCTKCSREFCSAINFRRHTRVHRRSLKIDRDFPKNRDLLAAFWNKLTVDDASKILSLTGVVIEGVTGSSILTALSSWMCKPGYASLPVAYARAGSELLDLIQAKPSMHLPVSSDELFSLLDEASEKTFLCTNTAAYIQKFLFDGEVEKIATELKNVVSCASYMLEQKLLEAWCADKTAEALRCQKLLEDEEEAAQKRQAELMEM

SEQ ID NO: 38098 - DNA, 608 bp, Zea mays subsp. mays
tgtgcacacagcgccgtcttctggagcagcgtccgaaagtgtgtggagaacctgcccgattcctcccgccgcctccgacctcaccgtcggcgggctcagcttgttcctggggtctgatcagccatgttcaagaaacctgttgatgtgaaaaccatacagcgcttgtctggggcagacaaaaagaagctaagaagaactgccaagggaaggtttccacaggcttctgatgctgaccttgatgccattcttcctcccaaggctgagataacagttgctaagtacccgaaccatgttcttgtatatggcatagagggagagttcccaatgattttcaacactgacgcaagaggtcatgaactgtttcctacagtttatgcgctttggaaggtcccccatctgttgccagcttttacgcttaaaggtggtgaggtttcacgtttcgtgattggtggcgctgatctgatgtttcctggtatcagcatacctccagaagggtttccatcttttgaagctggccaaccatgggcagtaaaagttcctggtaaccctgctgcaattgcggttgggagcacaactatgagtagtactgaagctttgaaggcaggact

SEQ ID NO: 38099 - protein, 161 aa, Zea mays subsp. mays
MFKKPVDVKTIQRLSGADKKKLRRTAKGRFPQASDADLDAILPPKAEITVAKYPNHVLVYGIEGEFPMIFNTDARGHELFPTVYALWKVPHLLPAFTLKGGEVSRFVIGGADLMFPGISIPPEGFPSFEAGQPWAVKVPGNPAAIAVGSTTMSSTEALKAG

SEQ ID NO: 38100 - protein, 94 aa, Zea mays subsp. mays
MIFNTDARGHELFPTVYALWKVPHLLPAFTLKGGEVSRFVIGGADLMFPGISIPPEGFPSFEAGQPWAVKVPGNPAAIAVGSTTMSSTEALKAG

SEQ ID NO: 38101 - DNA, 730 bp, Zea mays subsp. mays
agtttatcttcttgtctctctctcatttcttgttattatccacgaacgaagaaaaacctagaaaacagttgaagaaagaaaatcacaagagaagccatggccggaattggaccgattactcaggattgggaaccagttgtgatccgcaagagagctcctaacgctgcagctaagcgcgacgagaagactgtcaacgccgctcgtcgaagcggcgccgatattgagaccgttcgaaaattcaatgctggatcgaacaaggctgcatcaagcggcacctccttgaacacaaagaagctagatgatgatactgagaacttatctcatgatcgtgtgcccactgaattgaagaaagccatcatgcaagctagaggggagaagaagctgactcagtcccaacttgcccatctgatcaatgagaagccacaagtgatccaagaatacgagtcggggaaagcaattccgaatcaacagatcctttcaaagctggagagggcacttggtgctaaactccgtggaaagaagtagaagtttagaacaaagctcttaaaggtaacaacaaaagctgatcgcagtttctctccagtccacatgctttaccatatcctaaaaactatatctatgtatggtttggtttaatggcgtagtagtttgttgcgaggaatctttcatgatgtaagaaaaacaaagctgtttggaaccttttgtcattataaataatctcttctctttc

SEQ ID NO: 38102 - protein, 142 aa, Zea mays subsp. mays; identical to SEQ ID NO: 6735

SEQ ID NO: 38103 - DNA, 798 bp, Zea mays subsp. mays
gattcatatccttcttcttctccaagaacctctctctctttctgcttctctatattttaacactttcttccgaatttgcccctcaagttttattttaattgctaaaatggctggaaccctagttaactccgccgggagattctcaccgggaaattgtattcttcctcaacagagaacagccagattctacagcggaaccgcgagatttcccaccggagctccttcgtttaaggcttcagctcagacgcttaacgccgagccagctgtaacggaatccgttcgtcggagagtttctagcctctacgaattactgaaagtgaatgaaacggcgtccttgacggagatcaagacggcgtaccggagcttagctaaagtatatcatccagatgcgtcggaatcggacggtcgagatttcatggagattcacaaagcttacgcgacacttgcggatccgactacaagagcgatttacgactcgacgcttagagtaccacggagacgggtacacgccggagcgatgggtcggtcggggcgggtttacgctacgacccggagatgggagacggatcagtgttggtgattttaggcttcctatgattttgcagcatcgaaagggcactttttgacttactttcccctttgattacgttttttttttccttgtcatatctttggaaaattaaggggaaattaagtttaatccgctctttttttttgtttttcttttaacttaagcagttaacaatgtataaagaagttatgagtagagaaatgtatatgattttagttttctccttc

SEQ ID NO: 38104 - protein, 192 aa, Zea mays subsp. mays
IHILLLLQEPLSLSASLYFNTFFRICPSSFILIAKMAGTLVNSAGRFSPGNCILPQQRTARFYSGTARFPTGAPSFKASAQTLNAEPAVTESVRRRVSSLYELLKVNETASLTEIKTAYRSLAKVYHPDASESDGRDFMEIHKAYATLADPTTRAIYDSTLRVPRRRVHAGAMGRSGRVYATTRRWETDQCW

SEQ ID NO: 38105 - protein, 157 aa, Zea mays subsp. mays
MAGTLVNSAGRFSPGNCILPQQRTARFYSGTARFPTGAPSFKASAQTLNAEPAVTESVRRRVSSLYELLKVNETASLTEIKTAYRSLAKVYHPDASESDGRDFMEIHKAYATLADPTTRAIYDSTLRVPRRRVHAGAMGRSGRVYATTRRWETDQCW

SEQ ID NO: 38106 - DNA, 502 bp, Zea mays subsp. mays
gagcctaaaaacttgcccagagcgcctgaacctgcctccgctccactcttgcccccccctggcaccacactagcctagtgagtagtgcagcagtcttgctcggttgctcctacctgtcctgcacagcacaggagcagagcccaggaccgtcggcaaaaggggagcggccatgaagtacgtgctggtgaccggaggggtggtgagcggcctcggcaagggcgtgacggccagcagcatcggcgtcgtgctcaaggcctgcggcctccgcgtcaccaccatcaagatcgatccatacctcaacactgatgctggaaccatgtctccattcgagcatggagaggtgtttgttttggacgatggtggagaggtggatttggaccttggaaattatgagcgttttctggatatcaaattgacccgtgacaataatataaccacaggaaagatctatcaggctgtcattaacaaagaaaggagaggtgactacctaggaaaaaccgtc

SEQ ID NO: 38107 - protein, 111 aa, Zea mays subsp. mays
MKYVLVTGGVVSGLGKGVTASSIGVVLKACGLRVTTIKIDPYLNTDAGTMSPFEHGEVFVLDDGGEVDLDLGNYERFLDIKLTRDNNITTGKIYQAVINKERRGDYLGKTV

SEQ ID NO: 38108 - protein, 62 aa, Zea mays subsp. mays
MSPFEHGEVFVLDDGGEVDLDLGNYERFLDIKLTRDNNITTGKIYQAVINKERRGDYLGKTV

SEQ ID NO: 38109 - DNA, 915 bp, Zea mays subsp. mays
atcgacacctacactctcctgctacaatggcgactttcctaacaaatgttgtttcaatcaaacctacaatcttctcattccagtccgaatccttcactcctttgcatacacgggtcaatgtattctcctcgaaaccctttccttctctcgctggaactttctcccggagctctagaacgagattcattccttatgctgtaacggagacggaagaaaaacccgccgctttggaccctagttcagaagctgccaggcgtgtgtatatcggtaacatacccaggacggtgaccaatgagcagctcactaaacttgttgaagaacacggtgctgttgaaaaagttcaggtgatgtatgataagtattcaggaagaagccgtcgatttgggtttgctacaatgaaatcagttgaagatgctaatgctgtggttgagaaattgaatggcaataccgttgaagggcgtgagataaaggttaacattacagagaaacctatagcatcatcacctgatttatcagttcttcagtctgaggattcagcatttgtagatagcccttacaaagtgtatgttgggaatctagcaaagactgttacaaaagagatgcttgagaatttgttttctgagaaagggaaagtagtaagtgctaaggtttcaagagtacctggaacttccaaatccaccgggtttggattcgttacgttttcttctgaagaagatgtggaagcagccattgttgctcttaacaattcgttgctggaaggacagaagattcgggtgaataaggcttagcctattggatcataaagaatgtgaaaagaatcgctttgaagagtttttgtaatgcaaatcattagagcttagtgtatcatcttgtattcattctaagttgaaaatgaaaccattcttttcaaaagcc

SEQ ID NO: 38110 - protein, 261 aa, Zea mays subsp. mays
RHLHSPATMATFLTNVVSIKPTIFSFQSESFTPLHTRVNVFSSKPFPSLAGTFSRSSRTRFIPYAVTETEEKPAALDPSSEAARRVYIGNIPRTVTNEQLTKLVEEHGAVEKVQVMYDKYSGRSRRFGFATMKSVEDANAVVEKLNGNTVEGREIKVNITEKPIASSPDLSVLQSEDSAFVDSPYKVYVGNLAKTVTKEMLENLFSEKGKVVSAKVSRVPGTSKSTGFGFVTFSSEEDVEAAIVALNNSLLEGQKIRVNKA

SEQ ID NO: 38111 - protein, 253 aa, Zea mays subsp. mays
MATFLTNVVSIKPTIFSFQSESFTPLHTRVNVFSSKPFPSLAGTFSRSSRTRFIPYAVTETEEKPAALDPSSEAARRVYIGNIPRTVTNEQLTKLVEEHGAVEKVQVMYDKYSGRSRRFGFATMKSVEDANAVVEKLNGNTVEGREIKVNITEKPIASSPDLSVLQSEDSAFVDSPYKVYVGNLAKTVTKEMLENLFSEKGKVVSAKVSRVPGTSKSTGFGFVTFSSEEDVEAAIVALNNSLLEGQKIRVNKA

SEQ ID NO: 38112 - protein, 146 aa, Zea mays subsp. mays
MYDKYSGRSRRFGFATMKSVEDANAVVEKLNGNTVEGREIKVNITEKPIASSPDLSVLQSEDSAFVDSPYKVYVGNLAKTVTKEMLENLFSEKGKVVSAKVSRVPGTSKSTGFGFVTFSSEEDVEAAIVALNNSLLEGQKIRVNKA

SEQ ID NO: 38113 - DNA, 1114 bp, Zea mays subsp. mays
atttcatggcttgaaactcaaatttccaaagtccaaaaaggtaggcgaaaacgattgatcattcctctgtagctctcagtaaggaaaaattgggatttatatagtttcgtcttcccaccttggatcgaattttgttttcaaattcaaaatctcacctccgtttttttcagagactttgctgagaaaagtaaaaaaaaaagaaatggagcaagagataagcttggatccacaactatggcatgcttctgcaggatcaatgcttcatatccccacagtgaattcaaaggttttctacttcgctcaaggccatttcgagcatgcccacgcgcctcccgatttccacgcgccgcgcgtaccaccactcatcttatgccgcgtcgttgcggtcaagttcctcgccgacgcagaaacggatgagctctacgccaaaattaggcttctgccactgccggaaaacgacctggatctcgaaaacgataccattctggatcttactcctccaaaatcgacgtttttcgccaaaacactgacgagcaccgacgtcagtaaaggcggtggatttttcgtgctgcgtaattgggccgagatgaacttcccaccgctagacttcacggctgagtatccggtccagaccctaactgctaaagacatccgcggagagacatggaatttccgacacatctacagggggacgcctcgccgtcacctgctgaccaccggctggaacacttttgtcgaccagaagaagctcatcgccggcgattcaatcgtattcctccgctctgaatccggcaacctctgcgtcggagtccgccgcgccaaagtcggtggcgacgacacggctagaagggtaacggtagaggcagtgacggaagcagtggagcgtgcagcgagtgggctagcgttcgaggtggtttattaccctctcgctaacacgccggagttctgtgtgaacgcggctgatgtgagagcagcaatgcggatagaatggtgcagaggcatgaggtttaaaatggcatttgaagcagaggattcttctagaatgtccacaggcactgtgtctgctgttcaagccgtcgatccaatccgctggcccaactccccatggcgtctc

SEQ ID NO: 38114 - protein, 304 aa, Zea mays subsp. mays
MEQEISLDPQLWHASAGSMLHIPTVNSKVFYFAQGHFEHAHAPPDFHAPRVPPLILCRVVAVKFLADAETDELYAKIRLLPLPENDLDLENDTILDLTPPKSTFFAKTLTSTDVSKGGGFFVLRNWAEMNFPPLDFTAEYPVQTLTAKDIRGETWNFRHIYRGTPRRHLLTTGWNTFVDQKKLIAGDSIVFLRSESGNLCVGVRRAKVGGDDTARRVTVEAVTEAVERAASGLAFEVVYYPLANTPEFCVNAADVRAAMRIEWCRGMRFKMAFEAEDSSRMSTGTVSAVQAVDPIRWPNSPWRL

SEQ ID NO: 38115 - protein, 286 aa, Zea mays subsp. mays
MLHIPTVNSKVFYFAQGHFEHAHAPPDFHAPRVPPLILCRVVAVKFLADAETDELYAKIRLLPLPENDLDLENDTILDLTPPKSTFFAKTLTSTDVSKGGGFFVLRNWAEMNFPPLDFTAEYPVQTLTAKDIRGETWNFRHIYRGTPRRHLLTTGWNTFVDQKKLIAGDSIVFLRSESGNLCVGVRRAKVGGDDTARRVTVEAVTEAVERAASGLAFEVVYYPLANTPEFCVNAADVRAAMRIEWCRGMRFKMAFEAEDSSRMSTGTVSAVQAVDPIRWPNSPWRL

SEQ ID NO: 38116 - protein, 176 aa, Zea mays subsp. mays
MNFPPLDFTAEYPVQTLTAKDIRGETWNFRHIYRGTPRRHLLTTGWNTFVDQKKLIAGDSIVFLRSESGNLCVGVRRAKVGGDDTARRVTVEAVTEAVERAASGLAFEVVYYPLANTPEFCVNAADVRAAMRIEWCRGMRFKMAFEAEDSSRMSTGTVSAVQAVDPIRWPNSPWRL

SEQ ID NO: 38117 - DNA, 658 bp, Zea mays subsp. mays
ctagtcccccccccccccccctagtttctatagtggtgagtcacaacaatttattgaatgctgtacttgtggtgagtatctgaagcaggctgagaggcgcctccatgaagaatcagagcgtgtgtcacagtacttggatgctaaaaccaatgagaaaattactgctgttgtggtgaaagagatgctagcaaatcacatgcagaggttgattcttatggagaactcagggcttgtgaatatgcttgtcgaggacaggtatgaagacctgaccaggatgtacactttgtttaatcatgttcctgatggtctcgcaacaattagatctgtgatggtgtctcatattaaggatactggcaaaagtttggtaacagatccagagagactaaaggacccagttgattttgttcagcggcttcttaacatgaaggacaagtatgacaatatcatcaatgtgtcatttagcaatgacaagagtttcctgaatgctctcaattcctcatttgagaactttataaacttaaacaacagatcacctgagttcatatcactgtttgttgatgacaaactgcggaagggggtgaaagaggccaatgaggaggatcttgaaactgtcctggacaaagtgatgatgctgtttaggtatttgcaagaaaagatc

SEQ ID NO: 38118 - protein, 159 aa, Zea mays subsp. mays
MLANHMQRLILMENSGLVNMLVEDRYEDLTRMYTLFNHVPDGLATIRSVMVSHIKDTGKSLVTDPERLKDPVDFVQRLLNMKDKYDNIINVSFSNDKSFLNALNSSFENFINLNNRSPEFISLFVDDKLRKGVKEANEEDLETVLDKVMMLFRYLQEKI

SEQ ID NO: 38119 - protein, 154 aa, Zea mays subsp. mays
MQRLILMENSGLVNMLVEDRYEDLTRMYTLFNHVPDGLATIRSVMVSHIKDTGKSLVTDPERLKDPVDFVQRLLNMKDKYDNIINVSFSNDKSFLNALNSSFENFINLNNRSPEFISLFVDDKLRKGVKEANEEDLETVLDKVMMLFRYLQEKI

SEQ ID NO: 38120 - protein, 148 aa, Zea mays subsp. mays
MENSGLVNMLVEDRYEDLTRMYTLFNHVPDGLATIRSVMVSHIKDTGKSLVTDPERLKDPVDFVQRLLNMKDKYDNIINVSFSNDKSFLNALNSSFENFINLNNRSPEFISLFVDDKLRKGVKEANEEDLETVLDKVMMLFRYLQEKI

SEQ ID NO: 38121 - DNA, 1014 bp, Zea mays subsp. mays
tgatcatgaaacccctcttttgtccaaggactcatcatcatcatcatctgtgattacttcatctttgaaatggatattgaaagttgtaatgtctatgatttttgtgacttgggttgtttttcttatgatgatgtaccctgaacaactcggtgatgatttcctcacatttgtctcctccaagactttcctaggcaccacaggaaccatgttcttgattttcagttgtccgattcttgtcatctctgtcttagcttctctctatctcattatctccggggaagacaaggtcttcactaagaagaagatatcgaaattcccgaggtttaggctatggacattccctgttcttgtggatggaccatttggagttgtttctgcagctgagtttcttggaattatggtcttctctgtttttttcctttggtctatctatgcttataccttgaggaatcttgaccttcttgaacgcttccacgtccttcccaagaatcgaagtattcttctgttggaggtaacgggtctgcgtttaggaatgattggattgttgtgtatggtttttttgtttcttccaatctcgagaggttccattcttctccgtcttatcgatatcccttttgaacatgctacaagatatcatgtttggcttggtcatatcaccatggctttcttctccttacatggcctctgttatgttgttggatggatcattcaaggtcaacttttagagcttatattttcatggaatgctatcggaattgctatcttacccggagttatcagtctagtggcgggtttactgatgtgggtcacatcgcttcacaccgtgagaaagaattactttgagctcttcttctacacacatcaactatacatcgtctttattgtgttcttggcacttcatgttggtgattacatgtttagtatatttgctggaggaatatttcttttcattctagaccgcttcttgaggttctgccaatcaagaaggactgttgatgtaagggggggcccggt

SEQ ID NO: 38122 - protein, 337 aa, Zea mays subsp. mays
DHETPLLSKDSSSSSSVITSSLKWILKVVMSMIFVTWVVFLMMMYPEQLGDDFLTFVSSKTFLGTTGTMFLIFSCPILVISVLASLYLIISGEDKVFTKKKISKFPRFRLWTFPVLVDGPFGVVSAAEFLGIMVFSVFFLWSIYAYTLRNLDLLERFHVLPKNRSILLLEVTGLRLGMIGLLCMVFLFLPISRGSILLRLIDIPFEHATRYHVWLGHITMAFFSLHGLCYVVGWIIQGQLLELIFSWNAIGIAILPGVISLVAGLLMWVTSLHTVRKNYFELFFYTHQLYIVFIVFLALHVGDYMFSIFAGGIFLFILDRFLRFCQSRRTVDVRGGP

SEQ ID NO: 38123 - protein, 308 aa, Zea mays subsp. mays
MSMIFVTWVVFLMMMYPEQLGDDFLTFVSSKTFLGTTGTMFLIFSCPILVISVLASLYLIISGEDKVFTKKKISKFPRFRLWTFPVLVDGPFGVVSAAEFLGIMVFSVFFLWSIYAYTLRNLDLLERFHVLPKNRSILLLEVTGLRLGMIGLLCMVFLFLPISRGSILLRLIDIPFEHATRYHVWLGHITMAFFSLHGLCYVVGWIIQGQLLELIFSWNAIGIAILPGVISLVAGLLMWVTSLHTVRKNYFELFFYTHQLYIVFIVFLALHVGDYMFSIFAGGIFLFILDRFLRFCQSRRTVDVRGGP

SEQ ID NO: 38124 - protein, 306 aa, Zea mays subsp. mays
MIFVTWVVFLMMMYPEQLGDDFLTFVSSKTFLGTTGTMFLIFSCPILVISVLASLYLIISGEDKVFTKKKISKFPRFRLWTFPVLVDGPFGVVSAAEFLGIMVFSVFFLWSIYAYTLRNLDLLERFHVLPKNRSILLLEVTGLRLGMIGLLCMVFLFLPISRGSILLRLIDIPFEHATRYHVWLGHITMAFFSLHGLCYVVGWIIQGQLLELIFSWNAIGIAILPGVISLVAGLLMWVTSLHTVRKNYFELFFYTHQLYIVFIVFLALHVGDYMFSIFAGGIFLFILDRFLRFCQSRRTVDVRGGP

SEQ ID NO: 38125 - DNA, 1302 bp, Zea mays subsp. mays
gatcttctcagacttaaaacccgtctttgccggcgacacttctctactgaatatttcagtaaataatctcttcttagatctctccggcaatggcaattccgttgcctcttacctcttgctccccaatctcaacttcttcgtctatttcccgaacctccttcgtccctcttacacttcgcaatcgtactttcttctccaaccagaattacagtaggcgtgtacttatcagctgctcttcttctttgtcctcagacaatggttcatctccagactccatgaacggaaacgggaacgggaaagggagtagcttaaacgggcaatcatctttcccacgactgccttcctttgatggaacatccaaaccaccgcttaaatggagaagggttttactcaaagtcagtggagaagctcttgctggagacgaggagcaaaatatcgacccaaaggttactatggcgattgcaagggaagttgcagcagtgactcgacttggcattgaggttgctatagttgttggaggaggaaatatctttcgtggatctacctgggctgggtgcagtggccttgatcgctcctctgctgattatatcgggatgctggcaactgtgatgaatgcaatatttcttcaagcgacaatggagagtattggcatcccaacccgtgttcaaactgctttccgcatgtcggaagtcgcagagccttacataagaagacgagcaatcagacatctagaaaaaggaagggttgtaatatttgcagctggaacaggcaatccatttttcaccaccgatactgcagcggctcttcgatgtgctgaaattaatgcagaagtagtgctgaaagcaacaaatgttgatggcgtgttcgacgatgatcctaaaagaaacccaaacgctcgtctgcttgactcactaacttaccaagaggtcacctcaaaggacctctctgtaatggatatgactgctatcactttgtgccaagaaaataacatcccagttgtggtattcaatctttcggaacctgggaacatcgccaaagcaatcaaaggagagagagttggtacattgataggaggaacttggaactccattgttacaacaacctcatgaagaagcctattctcaaaacacaaaacttattagagtatcttaggtcaggagaatcttgtaactcctgtatatattagtttgcagacaagttttacattctaggaatctgtctgaaatttttgaaaattaatctttttatacatgaagctcatttcaaaaaaaaaaaaaaaaaaaactcgagggggggcccggt

SEQ ID NO: 38126 - protein, 339 aa, Zea mays subsp. mays
MAIPLPLTSCSPISTSSSISRTSFVPLTLRNRTFFSNQNYSRRVLISCSSSLSSDNGSSPDSMNGNGNGKGSSLNGQSSFPRLPSFDGTSKPPLKWRRVLLKVSGEALAGDEEQNIDPKVTMAIAREVAAVTRLGIEVAIVVGGGNIFRGSTWAGCSGLDRSSADYIGMLATVMNAIFLQATMESIGIPTRVQTAFRMSEVAEPYIRRRAIRHLEKGRVVIFAAGTGNPFFTTDTAAALRCAEINAEVVLKATNVDGVFDDDPKRNPNARLLDSLTYQEVTSKDLSVMDMTAITLCQENNIPVVVFNLSEPGNIAKAIKGERVGTLIGGTWNSIVTTTS

SEQ ID NO: 38127 - protein, 277 aa, Zea mays subsp. mays
MNGNGNGKGSSLNGQSSFPRLPSFDGTSKPPLKWRRVLLKVSGEALAGDEEQNIDPKVTMAIAREVAAVTRLGIEVAIVVGGGNIFRGSTWAGCSGLDRSSADYIGMLATVMNAIFLQATMESIGIPTRVQTAFRMSEVAEPYIRRRAIRHLEKGRVVIFAAGTGNPFFTTDTAAALRCAEINAEVVLKATNVDGVFDDDPKRNPNARLLDSLTYQEVTSKDLSVMDMTAITLCQENNIPVVVFNLSEPGNIAKAIKGERVGTLIGGTWNSIVTTTS

SEQ ID NO: 38128 - protein, 218 aa, Zea mays subsp. mays; identical to SEQ ID NO: 199

SEQ ID NO: 38129 - DNA, 2828 bp, Zea mays subsp. mays
  misc_feature (254)..(254): n is a, c, g, or t
ctcccttttagcttttagctcgccccttgcgttcgcggaaaaagctcatcttttcaggtggaaggagcgattcgtctgtgcctgcgcctgcgcctgcgcctcgccgggctcgtgccgctgtaccctccttctccaggagacctgtacggtgaaggggcgctcccgcgccaaacgggaagcaaagctcgctcgcgcccttttttcggatcatataacgccggcgcctagctcaaacaccacagctcgctgcctanatctacgcggcagcggcgtcggcagaggagagggacccggagctgcgccatggggcctaccgccggctccggcgaggacaaggctatgttagagctccggaaaaaacatcgtgtggacctggagagactaacaattacatcacgaccgttcaagacattgtcattctttgtgttagccatcgctcagaatttggaaagaacatgttcatctgttctgaaaaaaggttaccagttaaaaaccgcaatgcttttggttgttgctacttgggttctgctcatgttcactgatggcctgaatgaaaaggtaccatcttgttttaaattaattagaacatatgtgttttgcaggattaagaacagtctgagttacataaatgctacatattagataatgacttgcaagaaagctttgcccttttttattctttttagcacgaatatttggaagtggatgataaactgcagtctgtttttactcttactctttaggccgctgtatttggggaagccctaaaactatctgccatttggcaaatttgcttgtatattgttcaagaaaatttcatatacatcgctacagcttggtcacattattaataatttgcttccaatatctcccgttgcatgcccaatatgcaccttggataaacatggtatgttgtcattgatgcagcatctgcaggagctactttggtatgtcaggtttggattgtggtggattatactaggggtcgcttcatccattggattaggttctggtttgcacactttcataatgtatttggctccccatgttgccctgttcactatcaaagcggttcagtgtggtagggttgatttgaaaagtgctccttatgacactattctccttgaaaggagaccatcctggttagagaaagactgtctgcaatttggacccccaatttatcatgaaacaattccattcagcaaaatactgcaagaagtttatcttgaagctattctttggggcattggaactgcacttggagagcttcctccatattttctctcaagaacagctagcatgtcaggccgcataattgatgagttagaagatttggatgcttccatttcagaaggctttctatcttcagctttacgtcaggccaaacgatggctcatgtctcattcacagtatttaagcttcactctaatattgctacttgcttcggtgccaaaccctctatttgatcttgccggtatcttgtgtggacaatttaacatccctttctggaagttttttctagcaactttgattggaaaggctattgttaaagtttgtatccagactacattggtgattactctctgcaataaccaacttcttgatttggtggagaaaaggcttatatgggcatttagcaatgttcctggagtggcatctgtccttccatcttttgtttccaaactgaagatggccaaaaataagtttttatcagcccatgttgctgcatcagcttctacttctgttaaggtatggattccactctactttagttacaaaaaatagaaatttaatgtatgcttcacttgcccactctttaaagtgatatgacaacagcccttagactatctccagcaacttacccatccctatactcatattcaaactcccctctgcgaacagtgcaaaactgtgtttttgggtaaactatggattgactgctgcagacggcctttgaggttgataatgttttgatatttttaccattggtcatgtaagtacatggcatggaagaacacaccatggaaaggtgtgcagtaagtggttataaaattaagttcttgatcttggggataattctggtgtttacatcgactcaaagaaaaataaaatgctccagtgatttactctgaccattttactatcttgttgtcatcttcgttgcattgtttaaaaatgctcatattgtttaatccatgtttagggaaagaagtggaatctgtcattctctttggtctggaataccctggtgtggctcatggttgcaaacttcattatccagatagttacttctacagcacagggttatctcaggacacaacaggagcgagagatcagtaaaaagttggaaaccgagctttctgcctcttaacgttcttctggcgcaccaaaatgattcgccctgggtatcgatctggtttcttcaatcttttacatacttatatcgagtttagagaggaatattaacatgaataatgtggtaactgactgggaaattcaaaccgtgttcaccaactatttgctgctactgttcttcaggaaagtccaatcatacattgtacataaccatgcatcaaccatcagctcaaggctaaaggctctcctgcagtattgtggtgcactgactattgatctatttctttcgaaagagaaagagaggaaagctattagctagtgctagaaatataatgctgccccagctacaattgtaagtttgtggccttgtacatagcatcaaatattattaggggacaaaaatatctaatgatataagttaataaaaaaaaaaaaaaaaaaaaaaaaaaaaaactcgagggggggcccggtac

SEQ ID NO: 38130 - protein, 291 aa, Zea mays subsp. mays
MLSLMQHLQELLWYVRFGLWWIILGVASSIGLGSGLHTFIMYLAPHVALFTIKAVQCGRVDLKSAPYDTILLERRPSWLEKDCLQFGPPIYHETIPFSKILQEVYLEAILWGIGTALGELPPYFLSRTASMSGRIIDELEDLDASISEGFLSSALRQAKRWLMSHSQYLSFTLILLLASVPNPLFDLAGILCGQFNIPFWKFFLATLIGKAIVKVCIQTTLVITLCNNQLLDLVEKRLIWAFSNVPGVASVLPSFVSKLKMAKNKFLSAHVAASASTSVKVWIPLYFSYKK

SEQ ID NO: 38131 - protein, 287 aa, Zea mays subsp. mays
MQHLQELLWYVRFGLWWIILGVASSIGLGSGLHTFIMYLAPHVALFTIKAVQCGRVDLKSAPYDTILLERRPSWLEKDCLQFGPPIYHETIPFSKILQEVYLEAILWGIGTALGELPPYFLSRTASMSGRIIDELEDLDASISEGFLSSALRQAKRWLMSHSQYLSFTLILLLASVPNPLFDLAGILCGQFNIPFWKFFLATLIGKAIVKVCIQTTLVITLCNNQLLDLVEKRLIWAFSNVPGVASVLPSFVSKLKMAKNKFLSAHVAASASTSVKVWIPLYFSYKK

SEQ ID NO: 38132 - protein, 251 aa, Zea mays subsp. mays
MYLAPHVALFTIKAVQCGRVDLKSAPYDTILLERRPSWLEKDCLQFGPPIYHETIPFSKILQEVYLEAILWGIGTALGELPPYFLSRTASMSGRIIDELEDLDASISEGFLSSALRQAKRWLMSHSQYLSFTLILLLASVPNPLFDLAGILCGQFNIPFWKFFLATLIGKAIVKVCIQTTLVITLCNNQLLDLVEKRLIWAFSNVPGVASVLPSFVSKLKMAKNKFLSAHVAASASTSVKVWIPLYFSYKK

SEQ ID NO: 38133 - DNA, 635 bp, Zea mays subsp. mays
tgccggctgtattactgggagaggttgagccaaagtcgaatgagcaacatgctaagggccgtgagcaatctagtgagtccacttcagaacaagagactgaactacatgacgattttcaaacttctgcaactgaacatcaactagaagttaaattagatggtggagtgaaagagagtgatgacaaagataaagagaagggaaaggatggagaaaaggaaaaatctaaggagaaggatctggataagaaaaatgacagagagaaggagaaaggaagagccatggacggtgcaagtctggataacatcttgcagaggctaccgggatgtgtcagtcgtgatctcattgatcagttgacggttgagttttgctacctaaattctaaagcaaatcgaaagaaacttgcgcgtgccttattcaatgttaataggacttcactggaactgttgccttactattctcgtttggttgcgacactatcaacttgtatgaaagatgttccaagtatgccttctgtctatgcttgaagaggagttcaactttttaataaataagaaggatcagatcaacattgaaacaaaaataaaaaatatacggtttattggggagttgtgcaagttcaagatggctcctccagc

SEQ ID NO: 38134 - protein, 173 aa, Zea mays subsp. mays
PAVLLGEVEPKSNEQHAKGREQSSESTSEQETELHDDFQTSATEHQLEVKLDGGVKESDDKDKEKGKDGEKEKSKEKDLDKKNDREKEKGRAMDGASLDNILQRLPGCVSRDLIDQLTVEFCYLNSKANRKKLARALFNVNRTSLELLPYYSRLVATLSTCMKDVPSMPSVYA

SEQ ID NO: 38135 - protein, 81 aa, Zea mays subsp. mays
MDGASLDNILQRLPGCVSRDLIDQLTVEFCYLNSKANRKKLARALFNVNRTSLELLPYYSRLVATLSTCMKDVPSMPSVYA

SEQ ID NO: 38136 - DNA, 673 bp, Zea mays subsp. mays
agagagagagctcactagtccccccccccccgagaccaacaaaaaaaaaaaaaaaggaccagctcagatgagtctggagtttccaagtttaaaacctctctacctcgatttgagcaaatcctgatttactctcatcctcatcatctctcatcatcgagattcatagtctcttttgccgcttggattcttccaaggttagtgagctgctatggcaactcatcagcaaacgcaacctccttccgattttcccgctcttgccgatgaaaattcccagattccagaggctactaagcctgctaatgaggttcagcaagctaccatagctcaggatcctccaacatctgtgtttaagaattctgaaccaatacgggaggatcaaattcagaacgctatcaaattcctttcgcacccgagggttagaggctctcctgttatacatagaagatcttttcttgagaggaaaggtctcactaaagaagagattgacgaagctttccgccgtgttcctgatccaccaccaagttcgcagacaactgttacaacaagtcaagatggacagcaagcagtgtcaactgttcagccacaagctatgcagcctgtagtagctgctcctgctccactcattgtgactccacaggcagcttttctctctcggtttcgctggtaccatgct

SEQ ID NO: 38137 - protein, 155 aa, Zea mays subsp. mays
MATHQQTQPPSDFPALADENSQIPEATKPANEVQQATIAQDPPTSVFKNSEPIREDQIQNAIKFLSHPRVRGSPVIHRRSFLERKGLTKEEIDEAFRRVPDPPPSSQTTVTTSQDGQQAVSTVQPQAMQPVVAAPAPLIVTPQAAFLSRFRWYHA

SEQ ID NO: 38138 - DNA, 859 bp, Zea mays subsp. mays
cctagacccagacccagacccaggtgcaccacacctagacctggaacaccacggaaggtacgtagagccgctggtactgctgctacaatggcatttgatctgcatacattgcatccggccttccaaatcttcctcgtctgtcctcctcccccgactagagcaatcccaggtcaatctctgcagccacatcagtatctccatcctcggccatcgagccactcgaatcaagatcgccttcgcttgattccaacaacccattggcagtggcaggcaaaaaattcgccttctatatgtgccgcggcctcccaactccagctccagctccagcgcttcaatttcagtcccaggattgcagtcggcagcagcgaggtactacccaagcaccgcccggccgagcgagcgagtccgtgcgtgcgtgcatggcagcagagaggaaggcggcctcccgcccggccgcctgcgggcgaatgcgcggcgccgagggtgccaagccgcggggccgtcaggcaaaggcagcgcgggcaccaccgggccaggggtacttcacggcggggctggcggcgctgttcctttgcctcaccacgctgctcgtgttcctgcctctcgtgctgccgccgctgccgccgccgccgttgctgctgctgctcgtgcccgtgggcctcatggctgtactgcttgcgctggcgctcgtgccgtccgacggccgggccgccgccgccgccgtcgcttcttcatcgtgcgtgtgctgaagacggacgacgcatcgcacgtgtgctagacacgccgagagactgtactgtaaaaatgtggcggtttaacatttgttttgttaatttgatataaggaatagtgatttcct

SEQ ID NO: 38139 - protein, 280 aa, Zea mays subsp. mays
PRPRPRPRCTTPRPGTPRKVRRAAGTAATMAFDLHTLHPAFQIFLVCPPPPTRAIPGQSLQPHQYLHPRPSSHSNQDRLRLIPTTHWQWQAKNSPSICAAASQLQLQLQRFNFSPRIAVGSSEVLPKHRPAERASPCVRAWQQRGRRPPARPPAGECAAPRVPSRGAVRQRQRGHHRARGTSRRGWRRCSFASPRCSCSCLSCCRRCRRRRCCCCSCPWASWLYCLRWRSCRPTAGPPPPPSLLHRACAEDGRRIARVLDTPRDCTVKMWRFNICFVNLI

SEQ ID NO: 38140 - protein, 251 aa, Zea mays subsp. mays
MAFDLHTLHPAFQIFLVCPPPPTRAIPGQSLQPHQYLHPRPSSHSNQDRLRLIPTTHWQWQAKNSPSICAAASQLQLQLQRFNFSPRIAVGSSEVLPKHRPAERASPCVRAWQQRGRRPPARPPAGECAAPRVPSRGAVRQRQRGHHRARGTSRRGWRRCSFASPRCSCSCLSCCRRCRRRRCCCCSCPWASWLYCLRWRSCRPTAGPPPPPSLLHRACAEDGRRIARVLDTPRDCTVKMWRFNICFVNLI

SEQ ID NO: 38141 - protein, 152 aa, Zea mays subsp. mays; identical to SEQ ID NO: 37465

SEQ ID NO: 38142 - DNA, 893 bp, Zea mays subsp. mays
acagcgccaagggcaccaccagcaaggaccaagacagagcacagcgcagctcgtcggcctctcgacgccggttgctgcaaccaccgcctttattgcccacgcgggccgtgcggaagaagcaagaagacacgccaatggaggtcgccgcagcatcggcagcgggctacggattcaaggccgacgacgacgttgacagcctcagggcgacggagctcaggcttggcctgccgggcacggaggaggaggaggccgaggagtcccagaacaaggcgccgccgccgccgccgtcgacgcccagaggcaagaagcgcgacgtcgtcgccagcagcgggcccgaggatgcgcccaagaagcgcgactgcgagaccgacaccgatgccgcgccgccgccggccgccaaggctcagctggtgggatggccgccggtgaggtcgtacaggaagagctgcttccagcagcaggcggcggccaagaacaagccggcggcagcgctggcggaggaggccccggccgccggcgggctgttcgtgaaggtgagcatggacggcgccccctacctcaggaaggtggacctaaagatgtacaagggctaccgcgagctgcgggaggcgctggaggccatgttcctctgcttctccggcgccggcgccgccgacgcgcccgccgtcaacccctccgacttcgccgtcacctacgaggacaaggacggcgacctcatgctcgtcggcgacgtgcccttcggcatgttcatcagcacctgcaagaggctgaggatcatgaaggggtcagaagcgagagggctcggctcggccaagaacaactgatgatgattgatgaggcgtctatcgcatgcttgtgctgtgcgtgcgtgcatgcgccagcaaagcttatcg

SEQ ID NO: 38143 - protein, 273 aa, Zea mays subsp. mays
SAKGTTSKDQDRAQRSSSASRRRLLQPPPLLPTRAVRKKQEDTPMEVAAASAAGYGFKADDDVDSLRATELRLGLPGTEEEEAEESQNKAPPPPPSTPRGKKRDVVASSGPEDAPKKRDCETDTDAAPPPAAKAQLVGWPPVRSYRKSCFQQQAAAKNKPAAALAEEAPAAGGLFVKVSMDGAPYLRKVDLKMYKGYRELREALEAMFLCFSGAGAADAPAVNPSDFAVTYEDKDGDLMLVGDVPFGMFISTCKRLRIMKGSEARGLGSAKNN

SEQ ID NO: 38144 - protein, 229 aa, Zea mays subsp. mays
MEVAAASAAGYGFKADDDVDSLRATELRLGLPGTEEEEAEESQNKAPPPPPSTPRGKKRDVVASSGPEDAPKKRDCETDTDAAPPPAAKAQLVGWPPVRSYRKSCFQQQAAAKNKPAAALAEEAPAAGGLFVKVSMDGAPYLRKVDLKMYKGYRELREALEAMFLCFSGAGAADAPAVNPSDFAVTYEDKDGDLMLVGDVPFGMFISTCKRLRIMKGSEARGLGSAKNN

SEQ ID NO: 38145 - protein, 159 aa, Zea mays subsp. mays
MAAGEVVQEELLPAAGGGQEQAGGSAGGGGPGRRRAVREGEHGRRPLPQEGGPKDVQGLPRAAGGAGGHVPLLLRRRRRRRARRQPLRLRRHLRGQGRRPHARRRRALRHVHQHLQEAEDHEGVRSERARLGQEQLMMIDEASIACLCCACVHAPAKLI

SEQ ID NO: 38146 - DNA, 445 bp, Zea mays subsp. mays
  misc_feature (349)..(349): n is a, c, g, or t
gagcaagcttcttcttctgcatactggtcattgattggttaatcagagctctctcttttcttttcctatctctagagactagagaaatggctctctatctctcttcttcacgactcatcacctttctctctttcatcttgcttctctccaatggcttctcgtcctcttcctctcgccctagcatccaccatcgtcaccacctggacaaccacaattacaaagacgctctctccaagtccattctcttcttcgaaggtcaaagatccggaaagcttcctccaaaccagagaatgacttggagaagcaactctggtctctctgatggctctgctctcaacgtggatttggngggaggatactacgatgcaggggacaatatgaagtttggattcccaatggcattcacaaccacaatgctctcatggagtttaattgagtttggtgg

SEQ ID NO: 38147 - protein, 147 aa, Zea mays subsp. mays
  misc_feature (116)..(116): Xaa can be any naturally occurring amino acid
ASFFFCILVIDWLIRALSFLFLSLETREMALYLSSSRLITFLSFILLLSNGFSSSSSRPSIHHRHHLDNHNYKDALSKSILFFEGQRSGKLPPNQRMTWRSNSGLSDGSALNVDLXGGYYDAGDNMKFGFPMAFTTTMLSWSLIEFG

SEQ ID NO: 38148 - protein, 119 aa, Zea mays subsp. mays
  misc_feature (88)..(88): Xaa can be any naturally occurring amino acid
MALYLSSSRLITFLSFILLLSNGFSSSSSRPSIHHRHHLDNHNYKDALSKSILFFEGQRSGKLPPNQRMTWRSNSGLSDGSALNVDLXGGYYDAGDNMKFGFPMAFTTTMLSWSLIEFG

SEQ ID NO: 38149 - DNA, 594 bp, Zea mays subsp. mays
agattgttcgcttttccaccaaacgagccggagagattgggaagctgtccccagagtggacgcaatgccttgtcccgcttgtcaactcgtccaaggtgaagattcaggggaagctcgtgttcccaacaatggagctgaggctgatgcaggaggtattgctctatgttagcttctacatccacaaatctgtgctagccgaaatggacaactcaccctgtgacatgctcgatcatgcaaatgttgatttcactcccagtcctctccataaattgcttagtttgctcaacctaaagccatccaacaaggatgctttctcccttgacgatctcaccactagaaagctgaagcaaattctaaggggtaacaataataatggtgatgattctactccggtgcttggccatacatttctcgagcaaggcgctgatgagcaggcgatttcagaggctgccttgaacaaacttgttggcactgctgaaacatttgacttagaggaagcagagcctcccactacccttgtctctgttctaaagccataccagaaacaagctctcttctggatgtctaaattggagaagggaattgatgctaatg

SEQ ID NO: 38150 - protein, 197 aa, Zea mays subsp. mays
IVRFSTKRAGEIGKLSPEWTQCLVPLVNSSKVKIQGKLVFPTMELRLMQEVLLYVSFYIHKSVLAEMDNSPCDMLDHANVDFTPSPLHKLLSLLNLKPSNKDAFSLDDLTTRKLKQILRGNNNNGDDSTPVLGHTFLEQGADEQAISEAALNKLVGTAETFDLEEAEPPTTLVSVLKPYQKQALFWMSKLEKGIDAN

SEQ ID NO: 38151 - protein, 155 aa, Zea mays subsp. mays
MELRLMQEVLLYVSFYIHKSVLAEMDNSPCDMLDHANVDFTPSPLHKLLSLLNLKPSNKDAFSLDDLTTRKLKQILRGNNNNGDDSTPVLGHTFLEQGADEQAISEAALNKLVGTAETFDLEEAEPPTTLVSVLKPYQKQALFWMSKLEKGIDAN

SEQ ID NO: 38152 - protein, 150 aa, Zea mays subsp. mays
MQEVLLYVSFYIHKSVLAEMDNSPCDMLDHANVDFTPSPLHKLLSLLNLKPSNKDAFSLDDLTTRKLKQILRGNNNNGDDSTPVLGHTFLEQGADEQAISEAALNKLVGTAETFDLEEAEPPTTLVSVLKPYQKQALFWMSKLEKGIDAN

SEQ ID NO: 38153 - DNA, 423 bp, Zea mays subsp. mays
aatccaccggcaccaacccagcgcggcgccaccggcgacccgtaccccctcccccggagagcgatggcgacggagctgacggcggcgcagctgcgcgcgtacgacggcaccgacccgtccaagcccatctacgtctccgtccggggcaagggtctacgacgtcacctccggccgcggcttctacggccccggcggcgcctacgccgtcttcgcggggccgcgaggccagccgcgccctcggcaagatgtccaaggacgaggccgacgtctccggggacctctccgggctcaccgacaaggagctcggcgtcctcgccgactgggagatcaagttccaggccaagtaccccgtcgtcgcccgactcgccgccgacgcctgaactcgtcagtctcggtctaaaatttactctgtcctgcctcttg

SEQ ID NO: 38154 - protein, 141 aa, Zea mays subsp. mays
NPPAPTQRGATGDPYPLPRRAMATELTAAQLRAYDGTDPSKPIYVSVRGKGLRRHLRPRLLRPRRRLRRLRGAARPAAPSARCPRTRPTSPGTSPGSPTRSSASSPTGRSSSRPSTPSSPDSPPTPELVSLGLKFTLSCLL

SEQ ID NO: 38155 - protein, 125 aa, Zea mays subsp. mays
STGTNPARRHRRPVPPPPESDGDGADGGAAARVRRHRPVQAHLRLRPGQGSTTSPPAAASTAPAAPTPSSRGREASRALGKMSKDEADVSGDLSGLTDKELGVLADWEIKFQAKYPVVARLAADA

SEQ ID NO: 38156 - protein, 120 aa, Zea mays subsp. mays
MATELTAAQLRAYDGTDPSKPIYVSVRGKGLRRHLRPRLLRPRRRLRRLRGAARPAAPSARCPRTRPTSPGTSPGSPTRSSASSPTGRSSSRPSTPSSPDSPPTPELVSLGLKFTLSCLL

SEQ ID NO: 38157 - DNA, 560 bp, Zea mays subsp. mays
aactaagctcacgcaaacacaactacacaacaacatctccccagtggtcagcagctcagaacaccccagaccaagttagcaatggcgaagcgcctcgccgtcgccctcctgctgctggtcctgctcgcgtccagcgacgccggtgctgctgcccgtgctgctattggcgtcggcgagaagaaggctctggtgcccgggctgccggtggacctccctctccctggcctccccgggctgcctgggctccctgggctccctgggctgccggggctccctgggctccctcccgttcccaaattgacggccaccaacaagtctccatgatcgtctgtggtgtacgtgctggctaacatgcaagctgaagctgaactacttgtgggtttagacttgcagctgtagcacgtaccggccggaagaaaatcaccggcgcttcgctcaagcgtctgtaccaactactatctttgtcgtgtgtatttccgttcagttaaaccatcgtgtgtatttcctttcagttaaactatcgtatgtatttcctttcagtccacgtaagtatggttggc

SEQ ID NO: 38158 - protein, 115 aa, Zea mays subsp. mays
LSSRKHNYTTTSPQWSAAQNTPDQVSNGEAPRRRPPAAGPARVQRRRCCCPCCYWRRREEGSGARAAGGPPSPWPPRAAWAPWAPWAAGAPWAPSRSQIDGHQQVSMIVCGVRAG

SEQ ID NO: 38159 - protein, 80 aa, Zea mays subsp. mays
MAKRLAVALLLLVLLASSDAGAAARAAIGVGEKKALVPGLPVDLPLPGLPGLPGLPGLPGLPGLPGLPPVPKLTATNKSP

SEQ ID NO: 38160 - DNA, 655 bp, Zea mays subsp. mays
ttcccctctccactctgctttcctctcccagcgagcagtcagcagtcagcagtcagcagcaccaccggtctcctccacaacaaaaaacagatattctatcgtcagcaatcctgcgttccctgcccgacggaggtgcttccctcgttgctgcgttgcactgcggcggcctcgagcttgttgtcgattccagctccatgcgcccatgatttactttacttgtcgcataactatatgggattgtcccgtcttgatgaagaattgccaagaacctgatggagaaagctggccaaagatttcgcacgttcgttggaagagctttctaccaatatcgatctggcttccttagagttgccactttgaaataaatgagaaggcaccttgacgtcacccctcttctcttgaagctccagaaggctcaagtcagaagccaatccgtcgttaatgctgccgtccccgcggttccctgtttttgccgcttgtattgctccgctatttcagttgctatatcattcattccttggttgtgcacaattgccaatatgtatttctctgacacaatgaagtgataactgtggctagggcttttgttttcatgtgcacaattgctgtatcattcatgtggcaattagtataaatactccaggcaatgcaattg

SEQ ID NO: 38161 - protein, 114 aa, Zea mays subsp. mays
SPLHSAFLSQRAVSSQQSAAPPVSSTTKNRYSIVSNPAFPARRRCFPRCCVALRRPRACCRFQLHAPMIYFTCRITIWDCPVLMKNCQEPDGESWPKISHVRWKSFLPISIWLP

SEQ ID NO: 38162 - protein, 90 aa, Zea mays subsp. mays
FPSPLCFPLPASSQQSAVSSTTGLLHNKKQIFYRQQSCVPCPTEVLPSLLRCTAAASSLLSIPAPCAHDLLYLSHNYMGLSRLDEELPRT

SEQ ID NO: 38163 - protein, 67 aa, Zea mays subsp. mays
PLSTLLSSPSEQSAVSSQQHHRSPPQQKTDILSSAILRSLPDGGASLVAALHCGGLELVVDSSSMRP

SEQ ID NO: 38164 - DNA, 508 bp, Zea mays subsp. mays
agtttgtgttggccgtagcggctaggcgtgcaaggggcctatatctgtgtaaatcgtacacatctaataatcaaaatggttcagaagaagcccaagaagaagatcggcaagaaggtcgccgccgctcctttggccgtgaagaagcctgaggttaacaaagttgtaaaccctcttttcgagaagagacccaagaatttcggcattggtcaggacattcagcctacccgtgatttaagccgcttcgtgaaatggcccaagtacattcgcattcagcgccagaaggctgttcttcagaagcgtctgaaggtccctcccccaatcaaccagttttcacagaccctggacaagcaaacagctgttcagctgttcaagcttttggacaagtacagacctgagacacctgaggccaagaaggcccgtctccgtgcccgtgctgagaagaaggctgccactaagaccgatgcccctaccaagagggcaaacacagtccgtgctggtgtcaacactg

SEQ ID NO: 38165 - protein, 144 aa, Zea mays subsp. mays
MVQKKPKKKIGKKVAAAPLAVKKPEVNKVVNPLFEKRPKNFGIGQDIQPTRDLSRFVKWPKYIRIQRQKAVLQKRLKVPPPINQFSQTLDKQTAVQLFKLLDKYRPETPEAKKARLRARAEKKAATKTDAPTKRANTVRAGVNT

SEQ ID NO: 38166 - DNA, 433 bp, Zea mays subsp. mays
aagtcctaagtaacaatggcaagtgaagcggcggcggcatccgtcatctccagaaacccctgcctattcgctcctcctcttatcaccaaccagcagcagccgtctcatcaagaaccgcagcaggagatgcctctccctcctcccgccaagaagaagcgcaacctcccgggcacaccagaccctgccgcggaggtgatcgcgctttcgccgcggacgctgttggcgacgaatcggttcgtgtgcgagatctgcggcaaggggttccagcgcgaccagaacctgcagctgcaccggcgcggccacaatctcccctggaagctccgacagcgcagcgcggggaaggagccccggaagcgcgtctacgtgtgccccgagaagacgtgcgtccacccacaacccgtgccgcgcgctgggcgacctcacaggcatcaag

SEQ ID NO: 38167 - protein, 139 aa, Zea mays subsp. mays
MASEAAAASVISRNPCLFAPPLITNQQQPSHQEPQQEMPLPPPAKKKRNLPGTPDPAAEVIALSPRTLLATNRFVCEICGKGFQRDQNLQLHRRGHNLPWKLRQRSAGKEPRKRVYVCPEKTCVHPQPVPRAGRPHRHQ

SEQ ID NO: 38168 - protein, 102 aa, Zea mays subsp. mays
MPLPPPAKKKRNLPGTPDPAAEVIALSPRTLLATNRFVCEICGKGFQRDQNLQLHRRGHNLPWKLRQRSAGKEPRKRVYVCPEKTCVHPQPVPRAGRPHRHQ

SEQ ID NO: 38169 - DNA, 1534 bp, Zea mays subsp. mays
aaagacacacgttcacatcaatccaccattgaccaattcctcccacactgaagccaccacaccaccacaacagcagcctttgtagcaagcacacactcgccacaatgcgcacgcccttcgtggatcctcacagcgccgccggccggctcaagcagcgcctggcaaggatcctcacgcgctccacctgcaccaccaataacgccgctgccgccagctcgggcggcacggccacggccacggccttcgtcagcctcgccaagaccaacaacgcccacaccgccgcctcctcatctcacccggagccggaagcgccgccctccccgtacttctgcacgccctgcacctacgactacgagcgccccaaggccgaccgcgggacgcgcccgcgccgcacccgcagcgcctcgctcatacacatctccgtcgactgcacgggcggggccgcctccggccgccgctccgcccactccgacgcgccgcttctgcagcacctcttgtcggaacaggtgccggcgagggacgtcgtcggcggcacgaagcagagcaagagcggcggcaggagcaagctgacgacgacgcggtcgtctccgtcggcgtcgaggcggcactgctcgtcgtcgtcctcctcctggggccgcgcccgcgcgcgccggcccagcagcacgcccacgccctacagctggtcgtcgtcgtcgtcgtcgcggtcgtccgccaccgcgacggacgacgagctcgcgccgttcagcggcagcgacgacgaggagggcggcggcggcggcgaggcggccgacatgcgggcgctcttctcgtccctcagcttctcgtccgaccccacatcatccgagttctaccgcaccaacggcggccgcagcggcaacggcaacgccagcaggaggagccacaggaacacggcgagtcgtcgtcgcggccgccgcgcgcgcgcgccacggcgtgcgctgtcgagatccagcggcggcgacccggcagcaccgcccgacgccttccggccgctggtgtccgtggagacgacgaggcgcactacggagcgcagcgagaggagcaaggaagacaagggtctcaataacgccaagaagctgacgatgacgatgctgggcgcggccgcagccgcggaggaggaggccgccggcgcgggcatggctgtggtgaagcgctcgagcaacccttacctggacttccgcagctccatggtggagatggtggtggagcggcgcatcgccagcgtggggaagatggaggagctcctgggctcgtacctctcgctcaactcgccgcgccaccacccggccatcctcgctgccttcgaggacgtctgggaggccgtcttcggcgaggagtgactcgactgggagcgtcaagcgtgatctctttcagagtactgtttcaaaacttctacgtacatgccaatgtataaattggcaccgttttgccacgccgagatgctgtggtgctcatcgtatgtaacgagcttcatatacatggtgataattgagcgcctgagtggctgagttgttct

SEQ ID NO: 38170 - protein, 417 aa, Zea mays subsp. mays
MRTPFVDPHSAAGRLKQRLARILTRSTCTTNNAAAASSGGTATATAFVSLAKTNNAHTAASSSHPEPEAPPSPYFCTPCTYDYERPKADRGTRPRRTRSASLIHISVDCTGGAASGRRSAHSDAPLLQHLLSEQVPARDVVGGTKQSKSGGRSKLTTTRSSPSASRRHCSSSSSSWGRARARRPSSTPTPYSWSSSSSSRSSATATDDELAPFSGSDDEEGGGGGEAADMRALFSSLSFSSDPTSSEFYRTNGGRSGNGNASRRSHRNTASRRRGRRARAPRRALSRSSGGDPAAPPDAFRPLVSVETTRRTTERSERSKEDKGLNNAKKLTMTMLGAAAAAEEEAAGAGMAVVKRSSNPYLDFRSSMVEMVVERRIASVGKMEELLGSYLSLNSPRHHPAILAAFEDVWEAVFGEE

SEQ ID NO: 38171 - DNA, 288 bp, Zea mays subsp. mays
  misc_feature (158)..(158): n is a, c, g, or t
  misc_feature (162)..(162): n is a, c, g, or t
  misc_feature (172)..(172): n is a, c, g, or t
  misc_feature (199)..(199): n is a, c, g, or t
  misc_feature (208)..(208): n is a, c, g, or t
  misc_feature (222)..(222): n is a, c, g, or t
  misc_feature (243)..(243): n is a, c, g, or t
aacattgcaacctgcaactgcaacattgctctttggaattccacctaacatccattgttgcaagaaggatcaaggaacaaccatggcgccgcatgtcctcgtcgtgcccttccccggtcagggacacatgaaccccatggtacagttcgccaagaggntggnatccaagggnggggccaccacgctcgtcaccacccgnttcatccanaggactgccgacgnggacgcgcacccagcgatggncgaggcatctccgacgggcacgaaggagggaggcccccccccccg

SEQ ID NO: 38172 - protein, 95 aa, Zea mays subsp. mays
  misc_feature (53)..(54): Xaa can be any naturally occurring amino acid
  misc_feature (57)..(57): Xaa can be any naturally occurring amino acid
  misc_feature (66)..(66): Xaa can be any naturally occurring amino acid
  misc_feature (69)..(69): Xaa can be any naturally occurring amino acid
  misc_feature (74)..(74): Xaa can be any naturally occurring amino acid
  misc_feature (81)..(81): Xaa can be any naturally occurring amino acid
TLQPATATLLFGIPPNIHCCKKDQGTTMAPHVLVVPFPGQGHMNPMVQFAKRXXSKXGATTLVTTXFIXRTADXDAHPAMXEASPTGTKEGGPPP

SEQ ID NO: 38173 - protein, 68 aa, Zea mays subsp. mays
  misc_feature (26)..(27): Xaa can be any naturally occurring amino acid
  misc_feature (30)..(30): Xaa can be any naturally occurring amino acid
  misc_feature (39)..(39): Xaa can be any naturally occurring amino acid
  misc_feature (42)..(42): Xaa can be any naturally occurring amino acid
  misc_feature (47)..(47): Xaa can be any naturally occurring amino acid
  misc_feature (54)..(54): Xaa can be any naturally occurring amino acid
MAPHVLVVPFPGQGHMNPMVQFAKRXXSKXGATTLVTTXFIXRTADXDAHPAMXEASPTGTKEGGPPP

SEQ ID NO: 38174 - protein, 53 aa, Zea mays subsp. mays
  misc_feature (11)..(12): Xaa can be any naturally occurring amino acid
  misc_feature (15)..(15): Xaa can be any naturally occurring amino acid
  misc_feature (24)..(24): Xaa can be any naturally occurring amino acid
  misc_feature (27)..(27): Xaa can be any naturally occurring amino acid
  misc_feature (32)..(32): Xaa can be any naturally occurring amino acid
  misc_feature (39)..(39): Xaa can be any naturally occurring amino acid
MNPMVQFAKRXXSKXGATTLVTTXFIXRTADXDAHPAMXEASPTGTKEGGPPP

SEQ ID NO: 38175 - DNA, 937 bp, Zea mays subsp. mays
cactactctctctctctctgcctgcaaagctgcttgatccatcatcgatcacatcactccaccagccgcagcgcacgaacgtacgactcatggcagatcgcgaccgcagcggcatctacggcggcggcgcctacgggcagcagcaggggggcggccgcccgatgggtgagcaggtgaagggcatgatccacgacaaggggccgacggcgtcccaggcgctgacggtggcgacgctgttccctctgggcgggctgctcctggtgctgtcgggcctggcgctggcggcctccacggtggggctggccctggccacgcccgtgttcctgctcttcagccccgtgctcgtccccgccgcgctgctcatcggcacggccgtcgcggggttcctcacgtcgggcgcgctggggctcggcggcctgtcctcgctcacgtgcctcgccaacacggcgcggcaggcgttccagcgcacccccggactacgtcgaggaggcgcgccgcaggatggcggaggccgcggcgcacgcgggccacaagaccgcgcaggccgggcacggcatccagagcaaggcgcaggaggccggtgctggcactggcgccggcggcggcaggacttcctcgtaaataagcaaatcatccatggatgcgtgcgtgtcaatgtcagcagggtcgtcgtggaatgctcttctctgtacgtgggtaaccgtcttttggtcgtcttccccgagtgcgtgataaatatcctggtgttcgtcgtgtgtggtgctgccctaggctggggcctggggtcggctgtgtaccggtatctgttcatcgccgctccgtcgcgttcggagatgtgaataagtgatgtgaaggttaagtttcagctttgctattgctattgtggcttgtgcatcagcggtttgctcgttgactgttatggaaataagcattggtg

SEQ ID NO: 38176 - protein, 278 aa, Zea mays subsp. mays
LLSLSLPAKLLDPSSITSLHQPQRTNVRLMADRDRSGIYGGGAYGQQQGGGRPMGEQVKGMIHDKGPTASQALTVATLFPLGGLLLVLSGLALAASTVGLALATPVFLLFSPVLVPAALLIGTAVAGFLTSGALGLGGLSSLTCLANTARQAFQRTPGLRRGGAPQDGGGRGARGPQDRAGRARHPEQGAGGRCWHWRRRRQDFLVNKQIIHGCVRVNVSRVVVECSSLYVGNRLLVVFPECVINILVFVVCGAALGWGLGSAVYRYLFIAAPSRSEM

SEQ ID NO: 38177 - protein, 249 aa, Zea mays subsp. mays
MADRDRSGIYGGGAYGQQQGGGRPMGEQVKGMIHDKGPTASQALTVATLFPLGGLLLVLSGLALAASTVGLALATPVFLLFSPVLVPAALLIGTAVAGFLTSGALGLGGLSSLTCLANTARQAFQRTPGLRRGGAPQDGGGRGARGPQDRAGRARHPEQGAGGRCWHWRRRRQDFLVNKQIIHGCVRVNVSRVVVECSSLYVGNRLLVVFPECVINILVFVVCGAALGWGLGSAVYRYLFIAAPSRSEM

SEQ ID NO: 38178 - protein, 225 aa, Zea mays subsp. mays
MGEQVKGMIHDKGPTASQALTVATLFPLGGLLLVLSGLALAASTVGLALATPVFLLFSPVLVPAALLIGTAVAGFLTSGALGLGGLSSLTCLANTARQAFQRTPGLRRGGAPQDGGGRGARGPQDRAGRARHPEQGAGGRCWHWRRRRQDFLVNKQIIHGCVRVNVSRVVVECSSLYVGNRLLVVFPECVINILVFVVCGAALGWGLGSAVYRYLFIAAPSRSEM

SEQ ID NO: 38179 - DNA, 455 bp, Zea mays subsp. mays
cattatccacattctttccagctagctcctgagattacttgcaaaacattcttgttgtttgctctagctagctgctgcaccatatatagaactatcgatctgagccattatattgttggcatttgtgctcgatcgacgtcgtcgtcgtcgtcccatggcgactaataagccttttgcagttaataagctgctgccagttgtggccctcctgctcctcctcgcagcatgtagctcaccggtggtggtggctcagctggtcgccggctactacagcaaaacatgcccggacgtcgaggagatcgtccgcgacgagatggagaagatcatctcggctgcacccagccttgctggcccgctcctcaggctgcatttccacgactgcttcgtcaggggctgtgacgcctctgtgctgctcaactctacggagggcaacctgggcggagagggacgcgaac

SEQ ID NO: 38180 - protein, 100 aa, Zea mays subsp. mays
MATNKPFAVNKLLPVVALLLLLAACSSPVVVAQLVAGYYSKTCPDVEEIVRDEMEKIISAAPSLAGPLLRLHFHDCFVRGCDASVLLNSTEGNLGGEGRE

SEQ ID NO: 38181 - protein, 54 aa, Zea mays subsp. mays
HYPHSFQLAPEITCKTFLLFALASCCTIYRTIDLSHYIVGICARSTSSSSSHGD

SEQ ID NO: 38182 - DNA, 1071 bp, Zea mays subsp. mays
agtcaactaccaattttctcgctcagacatacagaattacagagtcgaagtgcgctgtggcctgtggactctcccctccccaactccggcgaagggagcagaaacgttggcgtgttggttgggtggcgtcggcatggacgaggcaacgaagaagaatgtggaggctacggtgctggagatcctccggggctccgatatggagtccgtgacggagtacaaggtccgcgccgctgccagcgaccgcctcggcatcgacctctccatacccgaccgcaagctcttcgtccgcggcgtcgttgaggaatacctactttcactctcctccaaggaggaggcgaaggcggaggaggagggcgtcactggcagggagagcaagggcaaggaacacgaagaggaggacgaagaggatgacgatgaggaggaggatgaaggtaagggtggcgggaagagagagtacgatgaccaaggtgaccttatcctgtgccgcctttcgagcaagaggagggtgactttatcggagtttaagggcaggtcgttggtgtccatccgcgagttctacgtgaaggacggcaaggagatgccctccgccaaaggtatcagtatgactttggagcagtgggaagcattttgcaatgctgtacctgcaatagaggatgccatcaaaaagcttgaagattcagactgaactggttttaagagcctcttcttatgcccgtgtcaaatgaaaaagcctgggaagcatttcgcaatgctgtatctgcaatagatgatgcatgaaaaagcttgaagattcagacagaactggtttaggagcctcttattttgcctgtatcaaataaaaaagcctatttctgacccttaacgagggccatatatgtgtcttgcaagagctaagttctgtaaaagatttctacatgtaccatgtgtaggagttaggatagagtgatagacgtactgctgcatacagttcggaatatttgctagtaacaagtaatctaccattaggtggcctggagttcacatgctatgctatggatgatcggggatgtgtcctagcaatagcaagctcag

SEQ ID NO: 38183 - protein, 227 aa, Zea mays subsp. mays
VNYQFSRSDIQNYRVEVRCGLWTLPSPTPAKGAETLACWLGGVGMDEATKKNVEATVLEILRGSDMESVTEYKVRAAASDRLGIDLSIPDRKLFVRGVVEEYLLSLSSKEEAKAEEEGVTGRESKGKEHEEEDEEDDDEEEDEGKGGGKREYDDQGDLILCRLSSKRRVTLSEFKGRSLVSIREFYVKDGKEMPSAKGISMTLEQWEAFCNAVPAIEDAIKKLEDSD

SEQ ID NO: 38184 - protein, 183 aa, Zea mays subsp. mays
MDEATKKNVEATVLEILRGSDMESVTEYKVRAAASDRLGIDLSIPDRKLFVRGVVEEYLLSLSSKEEAKAEEEGVTGRESKGKEHEEEDEEDDDEEEDEGKGGGKREYDDQGDLILCRLSSKRRVTLSEFKGRSLVSIREFYVKDGKEMPSAKGISMTLEQWEAFCNAVPAIEDAIKKLEDSD

SEQ ID NO: 38185 - protein, 162 aa, Zea mays subsp. mays
MESVTEYKVRAAASDRLGIDLSIPDRKLFVRGVVEEYLLSLSSKEEAKAEEEGVTGRESKGKEHEEEDEEDDDEEEDEGKGGGKREYDDQGDLILCRLSSKRRVTLSEFKGRSLVSIREFYVKDGKEMPSAKGISMTLEQWEAFCNAVPAIEDAIKKLEDSD

SEQ ID NO: 38186 - DNA, 707 bp, Zea mays subsp. mays
ctagaacatcctaatcgaaaacttatcgatctcctcgcacctcgtggcggcacctctccccttcgatccaccaagggtttaggatcggcggcgatggcggcgaggctggcacagctgcgcgctcaggcggtgcaggcggcggagttcgcctcgaagcacggcggctcctactacaaggagctcatggagaagaacaagcagtacgtcgtgcagccccccaccatcgagaaatgccaggagctctccaagcagctcttctacacccgcctcgcaagcctaccaggtcggtatgagtcattctggaaggagcttgatggtgtcaagcaggtatggaagaacaggaaggacctcaaggttgaggaccttgggattgcgactttatttggagttgagctttatgcatggttctgcgtaggcgagattgttggcagaggtttcaccttaaccggctataaggtctagttgatttccagtgatttaagacctgctttataaatcgacactttagctgatgcttgtcgaaacgacgatgatacctgccttccttcacaattttgtttcttgtaagagtctacctagtgctgaatgccagcaaagacgggcacatggttgcaacattgcctcaataatttgcccgcgcaattcttgattttgatgcatgtaattctttgtcagttgcatgtgctgcagtccctgcgtgcagactc

SEQ ID NO: 38187 - protein, 153 aa, Zea mays subsp. mays
LEHPNRKLIDLLAPRGGTSPLRSTKGLGSAAMAARLAQLRAQAVQAAEFASKHGGSYYKELMEKNKQYVVQPPTIEKCQELSKQLFYTRLASLPGRYESFWKELDGVKQVWKNRKDLKVEDLGIATLFGVELYAWFCVGEIVGRGFTLTGYKV

SEQ ID NO: 38188 - protein, 122 aa, Zea mays subsp. mays; identical to SEQ ID NO: 36534

SEQ ID NO: 38189 - protein, 92 aa, Zea mays subsp. mays
MEKNKQYVVQPPTIEKCQELSKQLFYTRLASLPGRYESFWKELDGVKQVWKNRKDLKVEDLGIATLFGVELYAWFCVGEIVGRGFTLTGYKV

SEQ ID NO: 38190 - DNA, 1644 bp, Zea mays subsp. mays
gcatcgaacgcacactcgcactcgcacgtacaccacactagttaccacagacgacgggcgccatgaaagtcccggtgcttctcctcctggtctccctgtgcttctcgctcgcgctcgcgtggcaaacggacacggaatcgggctcaggcaggccgtaccactacggcgaggagagtttccggcactggacgcgctcccggcagggccggttcagggtgctggaacggttcacccacgagctgctggaggacgccgtcggcaactaccgcgtcgccgagctggaagccgcgccgcgcacgttcctgcagcccagccactacgacgccgacgaggtgatgttcgtgaaggaaggcgagggcgtcatcgtgctgctccgcggcgggaagagggagtcgttctgcgtcagggagggcgacgtcatggtcatccccgcgggcgccgtcgtgtactcggccaacacgcaccagtcggaatggttccgcgtcgtcatgctcctcagccccgtcgtctccacgtctggacgcttcgaggagttcttccccatcggaggcgagagccccgagtccttcctcagcgtcttcagcgacgacgttatccaggcgtcgttcaacactcgccgggaggagtgggagaaagtgttcgagaagcagagcaagggggagatcacgacggcgtccgaggaacagatccgggagctgagcaggtcctgctcacgtggtggccgcggcagccgcggcgagggtggcgactcgggttcttcttcttcttccaagtgggagatcaaaccgtccagcctcacggacaagaagccgacccattccaacagccacggcaggcactacgagatcaccggcgacgagtgcccgcacctccggctgctcgacatggacgtcggcctggcaaacatcgcccgcggttctatgatggcgccgagctacaacacccgtgccaacaagatagctatcgtcctcaagggccagggctacttcgagatggcgtgtccgcacgtctccggcggccggtcatcgccgcgccgtgagcgcgggcacggccgagaggaagaggaggagcgggaagaggagcaaggcggtggcggtgggcaaaaggcgaggagctacaggcaggtgaaatcccgcatcagagagggctccgtcatcgtgatcccggcggggcacccgaccgcgctggtcgccggcgaagacaagaacctcgccgtcctctgcttcgaagtgaacgccagcttcgacgataaggtgttcctcgcgggcacgaacagcgcgcttcagaagatggataggccggcgaagctgctggcgttcggggcggacgaggagcagcaggtggaccgtgtcatcggagcacagaaggacgccgtcttccttcgcgggccccagagccacagggtctcgtcggtgtaagtgcatgcttgagatgtagcggccgctcatcggcctcgagacctcgacggtcgcggccaccccggtggtgaggttaagaagtggaataaagtaggtgatggctcgccggcgtcgcgttacgtatgaacagtagtatgtacgtccagtggagggtgacgcccggccgtacgggagtatgtaatctacctacctacctatgcaggtgaaataacgttgttgagacttg

SEQ ID NO: 38191 - protein, 451 aa, Zea mays subsp. mays
MKVPVLLLLVSLCFSLALAWQTDTESGSGRPYHYGEESFRHWTRSRQGRFRVLERFTHELLEDAVGNYRVAELEAAPRTFLQPSHYDADEVMFVKEGEGVIVLLRGGKRESFCVREGDVMVIPAGAVVYSANTHQSEWFRVVMLLSPVVSTSGRFEEFFPIGGESPESFLSVFSDDVIQASFNTRREEWEKVFEKQSKGEITTASEEQIRELSRSCSRGGRGSRGEGGDSGSSSSSKWEIKPSSLTDKKPTHSNSHGRHYEITGDECPHLRLLDMDVGLANIARGSMMAPSYNTRANKIAIVLKGQGYFEMACPHVSGGRSSPRRERGHGREEEEEREEEQGGGGGQKARSYRQVKSRIREGSVIVIPAGHPTALVAGEDKNLAVLCFEVNASFDDKVFLAGTNSALQKMDRPAKLLAFGADEEQQVDRVIGAQKDAVFLRGPQSHRVSSV

SEQ ID NO: 38192 - protein, 360 aa, Zea mays subsp. mays
MFVKEGEGVIVLLRGGKRESFCVREGDVMVIPAGAVVYSANTHQSEWFRVVMLLSPVVSTSGRFEEFFPIGGESPESFLSVFSDDVIQASFNTRREEWEKVFEKQSKGEITTASEEQIRELSRSCSRGGRGSRGEGGDSGSSSSSKWEIKPSSLTDKKPTHSNSHGRHYEITGDECPHLRLLDMDVGLANIARGSMMAPSYNTRANKIAIVLKGQGYFEMACPHVSGGRSSPRRERGHGREEEEEREEEQGGGGGQKARSYRQVKSRIREGSVIVIPAGHPTALVAGEDKNLAVLCFEVNASFDDKVFLAGTNSALQKMDRPAKLLAFGADEEQQVDRVIGAQKDAVFLRGPQSHRVSSV

SEQ ID NO: 38193 - protein, 345 aa, Zea mays subsp. mays
HRTHTRTRTYTTLVTTDDGRHESPGASPPGLPVLLARARVANGHGIGLRQAVPLRRGEFPALDALPAGPVQGAGTVHPRAAGGRRRQLPRRRAGSRAAHVPAAQPLRRRRGDVREGRRGRHRAAPRREEGVVLRQGGRRHGHPRGRRRVLGQHAPVGMVPRRHAPQPRRLHVWTLRGVLPHRRREPRVLPQRLQRRRYPGVVQHSPGGVGESVREAEQGGDHDGVRGTDPGAEQVLLTWWPRQPRRGWRLGFFFFFQVGDQTVQPHGQEADPFQQPRQALRDHRRRVPAPPAARHGRRPGKHRPRFYDGAELQHPCQQDSYRPQGPGLLRDGVSARLRRPVIAAP

SEQ ID NO: 38194 - DNA, 913 bp, Zea mays subsp. mays
  misc_feature (245)..(245): n is a, c, g, or t
agggtttcgtcgcttccagccgccgccgcgtccgcctcgccaagcgcagcagccgccgcagcacatctctctctcgatctcagccatggcggaggtggagcagcaacaggacacgccgaagctgttcaaccgctggaccttcgatgatgtccaggtgaacgacatctcgctgaacgactacctcgctgtgaacgcgacgaagcacgcgatgtacctgccgcacaccgcggggcgttactccaaanaagcggttccgcaaggcgcagtgcccgatcgtcgagcgcctcacaaactccctcatgatgcacgggcgcaacaacggcaagaaggtcatggctgtccgcatcatcaagcataccctggagatcattcacctgctcaccgatgccaaccccatccaggtcgtcgtcgacgcgatcatcaacagtggaccccgtgaggatgccacccgtattggttccgctggtgttgtgaggaggcaggccgtggatatctcacccctgaggagggtgaaccaggccatctacctcctcaccactggtgccagggagagtgctttccggaacatcaaaaccattgccgagtgccttgcagatgagctgatcaacgctgccaagggctcatccaacagttacgccatcaagaagaaggacgagattgagcgtgttgccaaggccaaccgttgaacggagcttgtatcctggtgcactctgcgctggaaacttttatgttactggcagtcgtatcggttcctgttttaccaatgtttagagttttttgagacctatatgcggttttggttttcagtgcacaattaaaattactgagtaatgtagttgattgggaacagaaagtgcctggtttaccgaactccatttctcttgtcatttttctttattctgtagtctgtatt

SEQ ID NO: 38195 - protein, 145 aa, Zea mays subsp. mays
  misc_feature (82)..(82): Xaa can be any naturally occurring amino acid
GFRRFQPPPRPPRQAQQPPQHISLSISAMAEVEQQQDTPKLFNRWTFDDVQVNDISLNDYLAVNATKHAMYLPHTAGRYSKXAVPQGAVPDRRAPHKLPHDARAQQRQEGHGCPHHQAYPGDHSPAHRCQPHPGRRRRDHQQWTP

SEQ ID NO: 38196 - protein, 128 aa, Zea mays subsp. mays
MMHGRNNGKKVMAVRIIKHTLEIIHLLTDANPIQVVVDAIINSGPREDATRIGSAGVVRRQAVDISPLRRVNQAIYLLTTGARESAFRNIKTIAECLADELINAAKGSSNSYAIKKKDEIERVAKANR

SEQ ID NO: 38197 - protein, 127 aa, Zea mays subsp. mays
MHGRNNGKKVMAVRIIKHTLEIIHLLTDANPIQVVVDAIINSGPREDATRIGSAGVVRRQAVDISPLRRVNQAIYLLTTGARESAFRNIKTIAECLADELINAAKGSSNSYAIKKKDEIERVAKANR

SEQ ID NO: 38198 - protein, 117 aa, Zea mays subsp. mays
  misc_feature (54)..(54): Xaa can be any naturally occurring amino acid
MAEVEQQQDTPKLFNRWTFDDVQVNDISLNDYLAVNATKHAMYLPHTAGRYSKXAVPQGAVPDRRAPHKLPHDARAQQRQEGHGCPHHQAYPGDHSPAHRCQPHPGRRRRDHQQWTP

SEQ ID NO: 38199 - DNA, 1552 bp, Zea mays subsp. mays
aattgcataaagcagtgagtgttaatgataaccaagccgatgaagataggcctgagctggcagaagctgatatggttgtctttcttggtgatttcaactaccgacttgatggcatcacctatgatgaagcaagggatatggtctctcagaggagctttgactggcttagagaaagggaccaacttagagcggaaatggaggcaggaaatgtgtttcaaggaatgcgtgaaggtcgaatcaaatttcctccgacctacaaattccaaagacaccagatgggtctctcagggtacgattcaagcgagaagaagagaatacctgcttggtgcgatagaatactatatcgtgatagccgttctgtatcaatgcctggatgctcattggagtgccctgttgtcgctgcaattacagcgtacgaagcttgcatggatgtcacagatagtgatcataaaccagtgagatgtacatttagcgttgatattgcgagagtagacgagctgataagaaggcaagagtatggaaaaatagtcgaatctaacaaaagagtacactctctgcttcgggagttgcattttgttccggacactatcgtcagcacaaacaacattatattggaaaaccaagaagatgtcatcctccgaataactaataactgcgaaactagtaaggctgcatttgaaatcctgtgtgaaggccaatcgatcagaaagcaagatggaactaaatctgagccagtcataagggcatcctttggctttccactttggcttgaggtccagccatcatccggcctcatcggaccaggagaaacaacggaagtcgccgtgcaccacgaagacttcttcacgcaagaagagttcgtcgacggggtgcagcagagctggtggtgcgagaccaccagagacatagaggtcgtcctgtcggtgaacgtcacgggcagcgcctcgaccgaggccgccacgcacaggatcaccgtccggcactgctgcccggcgcctccagccccgccgtccgctaacccacgcggccccattaccgactcacctagcgacgctgtgccaggtcccaagaacagccagtcgaatcacttgctgcgttctgacttcgcaaacttcggcagctccgaggtgcgcgacctgtgcggcgtgcggaagcggaacctgtagagacgaagctcagttttgttttgcctggtgctctggtttttttgctttctgtccgagtgtttagccggtgtggagccttggagttcttgcctaagctgggtggggggaagaagaagtggctctgctcttcatcttgttctgtacatatgcgtccctgacctctcacgtctcaccgtcctttgcgtatcagatcaaaaagggaaaagaaaaggaagaaaaaggtgtgtgtgtgtgtgtgtgcagttgttgcaattacccgcagttaagattttaagttaacattttcttttttttcattcttacgttgtagatgtgtcattgaaattatgtggttagaaggtggagtacaaaaaaaaaaaaaaaaaaaactcgagggggggcccggt

SEQ ID NO: 38200 - protein, 387 aa, Zea mays subsp. mays
LHKAVSVNDNQADEDRPELAEADMVVFLGDFNYRLDGITYDEARDMVSQRSFDWLRERDQLRAEMEAGNVFQGMREGRIKFPPTYKFQRHQMGLSGYDSSEKKRIPAWCDRILYRDSRSVSMPGCSLECPVVAAITAYEACMDVTDSDHKPVRCTFSVDIARVDELIRRQEYGKIVESNKRVHSLLRELHFVPDTIVSTNNIILENQEDVILRITNNCETSKAAFEILCEGQSIRKQDGTKSEPVIRASFGFPLWLEVQPSSGLIGPGETTEVAVHHEDFFTQEEFVDGVQQSWWCETTRDIEVVLSVNVTGSASTEAATHRITVRHCCPAPPAPPSANPRGPITDSPSDAVPGPKNSQSNHLLRSDFANFGSSEVRDLCGVRKRNL

SEQ ID NO: 38201 - protein, 364 aa, Zea mays subsp. mays
MVVFLGDFNYRLDGITYDEARDMVSQRSFDWLRERDQLRAEMEAGNVFQGMREGRIKFPPTYKFQRHQMGLSGYDSSEKKRIPAWCDRILYRDSRSVSMPGCSLECPVVAAITAYEACMDVTDSDHKPVRCTFSVDIARVDELIRRQEYGKIVESNKRVHSLLRELHFVPDTIVSTNNIILENQEDVILRITNNCETSKAAFEILCEGQSIRKQDGTKSEPVIRASFGFPLWLEVQPSSGLIGPGETTEVAVHHEDFFTQEEFVDGVQQSWWCETTRDIEVVLSVNVTGSASTEAATHRITVRHCCPAPPAPPSANPRGPITDSPSDAVPGPKNSQSNHLLRSDFANFGSSEVRDLCGVRKRNL

SEQ ID NO: 38202 - protein, 342 aa, Zea mays subsp. mays
MVSQRSFDWLRERDQLRAEMEAGNVFQGMREGRIKFPPTYKFQRHQMGLSGYDSSEKKRIPAWCDRILYRDSRSVSMPGCSLECPVVAAITAYEACMDVTDSDHKPVRCTFSVDIARVDELIRRQEYGKIVESNKRVHSLLRELHFVPDTIVSTNNIILENQEDVILRITNNCETSKAAFEILCEGQSIRKQDGTKSEPVIRASFGFPLWLEVQPSSGLIGPGETTEVAVHHEDFFTQEEFVDGVQQSWWCETTRDIEVVLSVNVTGSASTEAATHRITVRHCCPAPPAPPSANPRGPITDSPSDAVPGPKNSQSNHLLRSDFANFGSSEVRDLCGVRKRNL

SEQ ID NO: 38203 - DNA, 1945 bp, Zea mays subsp. mays
gttgcacgagggacagtggacaatgtttacaggttcgagccgcttagagatgcgtaacaccctacgtcttggtgggtatgcttggtgaatgaggttacaagagagctctccgaattgagaatgcagagagttgaggtgggtggctgagtaatagggtcgatcgttctgaaggggtgccccctaggccttatatactcgaccgtggggcaatacacgtggatatgatagcaatgtgtagctaaaagatagtgaactgtttgagtttatctccctgtagttctgccaacctatcctcgcatggctccattgcatgggggctccagcgcgggaaagtcggatctctgttgtggtcgctcgctcgacgttgtgggtcgtccgggctggcatcaatccagcctcatgtcgatctcctttgctgattgtccctccccaggcccccgaaagaatgaccttacgatttattgggcccttgggcctttcgtgaggacttttactcttttagtggacctgggggatatctatcccacacaagcccccgatctttgggttgattttgaggtaatcagcccaaagatcccaggtccagcttgcaggtaatttggggaaaacgatttcttactgtctcctcctgctttgatcactcgtaaactgaagctttgtttcgtgcttgtgccttagaggtcggcatttcatcttgtagtaccctgaacttcattgggtgcaccggaggtgcacccaatgggtgtagcccccgagcttcgagtagattttggaaaataatctactcgaaggtctccatcagaaattactttcatcttactcttgtgctttggttgagggtcagccttgtctttaatcttgtcccatgccttagaagtcggcactatcttggcctgaaatagtgatccatggggtgcaccgaaggtgcacccaatgggtgtagcccccgaccttcaagtggatttttgaggataatccattcgaaggtcttcctttggtgtctttttgttgaagattatcctttctgcctgtgaaaatcggcatgatgccatccgcattatgctttggaggtcagcattatgtcatcaatattatgcttcagaggtcagcatgtattttttcttttgcagccgagttcacaatccatccatatcttgctgggtggtgtaatttatttgctctgtgactgattggacatttgatggacgctctctgtctagtcttcacgtcgcttctgttggccatattttgtacttcaccggctatatttggctttcctctgatccatactgatatttcatttttgtcttgaggtattcattgcatgccctgcacagatgtgacagttttgaaaaatatactgataattccttggcgtccccccctaatgggtgtgggcaagggatggcttggtacgctgagtgttttagccggctgcttctgagtagtaatgtgatgtgacggcgggtgtaatcatatcctccgcgctgttgactggagtcccaatgggtgttgtgttgcatgaaacggcgtcagccacctggcgtgtcttcagacgggttgaagtgcttattgaatgctttgcgactgttcagtgaccgcggttggaggtgagcggttgccttctccttcgataaataatgtcgttgtctcttcggctttttcacatctcttgttgttctctgttgcttgcttttctcctctccctttcgtttccaccatgggcaagaacaacaagcgcaagcgtgagccaactcctccatcggaggattttggtgactcggagtattcagaggaggagttctcctctgagtctgaggggtctccggctccgatccccctgcgtgagtcgtctgacgactcagacgactcccagtggctcgcggcggaggtctggacgtacatccgggtcgtcgagcgctccgggctcgagggggggcccggt

SEQ ID NO: 38204 - protein, 123 aa, Zea mays subsp. mays
MLCDCSVTAVGGERLPSPSINNVVVSSAFSHLLLFSVACFSPLPFVSTMGKNNKRKREPTPPSEDFGDSEYSEEEFSSESEGSPAPIPLRESSDDSDDSQWLAAEVWTYIRVVERSGLEGGPG

SEQ ID NO: 38205 - protein, 101 aa, Zea mays subsp. mays
MSLSLRLFHISCCSLLLAFLLSLSFPPWARTTSASVSQLLHRRILVTRSIQRRSSPLSLRGLRLRSPCVSRLTTQTTPSGSRRRSGRTSGSSSAPGSRGGP

SEQ ID NO: 38206 - protein, 99 aa, Zea mays subsp. mays
MAPLHGGSSAGKSDLCCGRSLDVVGRPGWHQSSLMSISFADCPSPGPRKNDLTIYWALGPFVRTFTLLVDLGDIYPTQAPDLWVDFEVISPKIPGPACR

SEQ ID NO: 38207 - DNA, 604 bp, Zea mays subsp. mays
acggacctgaaccgagaaccgttaccgccgccgcctctcgcctagccgccggagaagcgccgctcgctcaggaggacagccatggcgccggagccggaggatgatattatgaacgagaagaatccccgcccgctcgacgaggatgacatcgcgctcctcaaaacctatggactggggccgtattcgaccagcattaagaaggtcgagaaggagatcaaggaaatggccaagaaaatcaacgacctctgtgggataaaggagtctgatacagggctggctccacctagccagtgggatttggtttcagataagcagatgatgcaagaagaacaaccgttacaagtagcaagatgtacaaagattataagccctaatacggataatgccaaatatgttataaatgtaaaacaaattgcaaagtttgtggtcggattgggagataaggtctctccaactgatatcgaggaagggatgagggttggtgttgatcgcaacaagtaccagattcaaatccctcttccccaaaattgacccaagtgttaccatgatgactgtggaggaaagccagatgtgacgtacaatgatgtcggtggctgcaaggagc

SEQ ID NO: 38208 - protein, 149 aa, Zea mays subsp. mays
MAPEPEDDIMNEKNPRPLDEDDIALLKTYGLGPYSTSIKKVEKEIKEMAKKINDLCGIKESDTGLAPPSQWDLVSDKQMMQEEQPLQVARCTKIISPNTDNAKYVINVKQIAKFVVGLGDKVSPTDIEEGMRVGVDRNKYQIQIPLPQN

SEQ ID NO: 38209 - protein, 140 aa, Zea mays subsp. mays
MNEKNPRPLDEDDIALLKTYGLGPYSTSIKKVEKEIKEMAKKINDLCGIKESDTGLAPPSQWDLVSDKQMMQEEQPLQVARCTKIISPNTDNAKYVINVKQIAKFVVGLGDKVSPTDIEEGMRVGVDRNKYQIQIPLPQN

SEQ ID NO: 38210 - protein, 102 aa, Zea mays subsp. mays
MAKKINDLCGIKESDTGLAPPSQWDLVSDKQMMQEEQPLQVARCTKIISPNTDNAKYVINVKQIAKFVVGLGDKVSPTDIEEGMRVGVDRNKYQIQIPLPQN

SEQ ID NO: 38211 - DNA, 1876 bp, Zea mays subsp. mays
  misc_feature (1452)..(1452): n is a, c, g, or t
aacaacttgaaaacatcttaagggtagaagcgacgtagctgtttgatgttccaagcgttgccgtagatctcgccttgattgttggccagcttgtatgttccgggcttcagaactttggcgatgacgaatggcccttcccaggggggtgtgagcttgtgcctccctcgggcgtcttgccgcagccgaagcactagatcgcccacctggaggtctcgggaccggacccctcgggcgtggtagcgtcgcagggactgctggtaccgcgccgagtgtagtaaggccctgtcccgagcctcctccagctggtccagcgattcctctcggctagcttggttgctttgatcggtgtaggccctcgtcctcggggagccgtattccaggtcagtgggcaagatagcttcagccccgtaaaccaggaaaaacggcgtgaaacccgtggcacgactcggcgtcgtccttaggctccagaccaccgaggggagttccttcatccatcgcttgccgaacttgttgaggtcgttgtagatccgaggcttgagcccttgtagaatcatgccgttggcacgctctacttgcccattcgacatgggatgagccacggcggcccagtccacccggatatggtgatcctcgcaaaaaatccaaaattttttgccggtgaactgggtgccgttgtcggtgatgatggagttcgggaccccgaagcgatggatgatgttggtgaagaacgccaccgcctgctcggacctgatgctgttcagaggttgggcctcgatccacttggagaatttgtcgatggcgaccagcaggtgcgtatagcccccgggcgccttctgcaagggaccgacgaggtccagaccccatacagcgaagggccaggtgatgggtattgtctgcagagcctgagcgggaaggtgggtccgcttcgcatagaattggcacccttcgcaggtgcggacaattctagtggcgtcagccaccgccgttggccagtagaagccctgccggaaagcattcccgacaagggctcggggtgctgcgtggtggccggaagcccccgagtgtatttcttgcagcaattcccgaccttcggcgatggagatgcatcgctagaggaggcccgaggggctgcgatgttagagctcctcttcattgcccagcaagacgaatgacttggcgcgtcgcgctacccgccgagcctcgacttggtcgaggggtagctctcctcgacggagatatcgcaggtacggggcctgccaatctcgatctggcgtggccccactctgttcttcctcgacgtccagtgcctcgtcctcggggggccgagggtacctcgggccgttccgagggtgcctcgggctgagcagacctcccagcgcaagcaagagcgccgaacacatggttcatgcaccgctggtacgtcgcgcccgcattcctcaaaccgaacggcantggtgacatagcagtacatgccgaacggcgtgatgaaagaagtcgcgagctggtcggactctttcattcggatctggtgataccctgagtaggcatcgaggaaggacagggtttcgcacccagcggtggaatccacgatttggtcgatgcgaggcaaagggtagggaaccttcggacatgctttgttgagaccagtgtagtctacgcacatccgccatttcccccctttcttcctcacaagcaccagggttggcaagccattcgggatggaatacctctttgatgaaccctgctgccattagcttgtggatctcttcgccaatcactctgcgcttttcctcgtcgaatcggcgcagagactgcctgacgggccgggctccggcccgaatatccagcgagtgctcggcgacatccctcggtattg

SEQ ID NO: 38212 - protein, 193 aa, Zea mays subsp. mays
MSHGGPVHPDMVILAKNPKFFAGELGAVVGDDGVRDPEAMDDVGEERHRLLGPDAVQRLGLDPLGEFVDGDQQVRIAPGRLLQGTDEVQTPYSEGPGDGYCLQSLSGKVGPLRIELAPFAGADNSSGVSHRRWPVEALPESIPDKGSGCCVVAGSPRVYFLQQFPTFGDGDASLEEARGAAMLELLFIAQQDE

SEQ ID NO: 38213 - protein, 183 aa, Zea mays subsp. mays
MVILAKNPKFFAGELGAVVGDDGVRDPEAMDDVGEERHRLLGPDAVQRLGLDPLGEFVDGDQQVRIAPGRLLQGTDEVQTPYSEGPGDGYCLQSLSGKVGPLRIELAPFAGADNSSGVSHRRWPVEALPESIPDKGSGCCVVAGSPRVYFLQQFPTFGDGDASLEEARGAAMLELLFIAQQDE

SEQ ID NO: 38214 - protein, 154 aa, Zea mays subsp. mays
MDDVGEERHRLLGPDAVQRLGLDPLGEFVDGDQQVRIAPGRLLQGTDEVQTPYSEGPGDGYCLQSLSGKVGPLRIELAPFAGADNSSGVSHRRWPVEALPESIPDKGSGCCVVAGSPRVYFLQQFPTFGDGDASLEEARGAAMLELLFIAQQDE

SEQ ID NO: 38215 - DNA, 912 bp, Zea mays subsp. mays
cccccccccccatgataatgttttaaaaccagctgctttgaaagtatttcctctaactaggctccagttttgtaagtggcacatcatgaacgaagcacatgataagctgtcatatctcctagatgcatttccatcgttccatgacgactttattaattgcatcaatatgtctgagacaatcgacgagtttgaagaaaattggaaggcattaatttctaaggtcagctctcaaaaaagtgaatggcttgactcggtgtacaattgtcgtcatcattgggtcccggtatatctgagagatacattctttggggatgtgtcattaaagctgcagtgttctagcatgagtttgttgtttgaaggttatattagtgccaaaactgattcacagtcattcattcagcagtatgaaaaagctttagactgttgttatgagaaggaggtgaaggaagaatttgaaacaaaatattcacttcccgatattaagacatcatctcctatagaaaagcaaggagcagagttatatacgaggtcaatgtttttgaaattccaacaggaattgatatgtgccactgcttacactgctgaaatggtgaaagaggagggcaatgcttcaatttatacagtggccatatctgaaggaagtgagaagtctgtgacagttcagttctgttcttctggaagttctgcgacatgtagctgtcggatgtttgaatattttggtattgtctgcaggcacatacttactgtgtttggtgtaagaggtgtctctgcacttccttctcattattttgtaaaaagatggacaaagaatgcattggatagaagcttaggcaagaatgttgatgaagttagcagagaggagctcaaggaggagccaagaagtagtgctgaagatgatgagcaatccctgac

SEQ ID NO: 38216 - protein, 303 aa, Zea mays subsp. mays
PPPHDNVLKPAALKVFPLTRLQFCKWHIMNEAHDKLSYLLDAFPSFHDDFINCINMSETIDEFEENWKALISKVSSQKSEWLDSVYNCRHHWVPVYLRDTFFGDVSLKLQCSSMSLLFEGYISAKTDSQSFIQQYEKALDCCYEKEVKEEFETKYSLPDIKTSSPIEKQGAELYTRSMFLKFQQELICATAYTAEMVKEEGNASIYTVAISEGSEKSVTVQFCSSGSSATCSCRMFEYFGIVCRHILTVFGVRGVSALPSHYFVKRWTKNALDRSLGKNVDEVSREELKEEPRSSAEDDEQSL

SEQ ID NO: 38217 - protein, 275 aa, Zea mays subsp. mays
MNEAHDKLSYLLDAFPSFHDDFINCINMSETIDEFEENWKALISKVSSQKSEWLDSVYNCRHHWVPVYLRDTFFGDVSLKLQCSSMSLLFEGYISAKTDSQSFIQQYEKALDCCYEKEVKEEFETKYSLPDIKTSSPIEKQGAELYTRSMFLKFQQELICATAYTAEMVKEEGNASIYTVAISEGSEKSVTVQFCSSGSSATCSCRMFEYFGIVCRHILTVFGVRGVSALPSHYFVKRWTKNALDRSLGKNVDEVSREELKEEPRSSAEDDEQSL

SEQ ID NO: 38218 - protein, 248 aa, Zea mays subsp. mays
MSETIDEFEENWKALISKVSSQKSEWLDSVYNCRHHWVPVYLRDTFFGDVSLKLQCSSMSLLFEGYISAKTDSQSFIQQYEKALDCCYEKEVKEEFETKYSLPDIKTSSPIEKQGAELYTRSMFLKFQQELICATAYTAEMVKEEGNASIYTVAISEGSEKSVTVQFCSSGSSATCSCRMFEYFGIVCRHILTVFGVRGVSALPSHYFVKRWTKNALDRSLGKNVDEVSREELKEEPRSSAEDDEQSL

SEQ ID NO: 38219 - DNA, 1805 bp, Zea mays subsp. mays
ttatgagggataacgactatgacagatgtcatcgtcagggggagcgaatgcttatattgatcacaatcgtgatacaataaatgtcatattctatgccctgaaggcgtgagcttgatgatcaatatgtgaacctttatggaactttctatcaaaaatatatagatcccgtcgatcgaacaccatcaatcaaagtggcttatttatattgatacgtgcacttacctcgtatatcctagaagtgagtataggtaaagttcctgaaatagtcattgcaaggatatgcaatctgtttgctaaatctttatgtgcatatacttccagaagaagatgttttgccttattgatacgattttgcaaggatcagggggagcacatttctaaagttagcccttgtagaagatttgatagaatctagatccgagaggatcgaaatctgtcccgatgacagttgttgtactctttttcccttggtgagttttcttgaagtttctcacatgaggtttttaacgaggcaacagagtgcaaatgcaatttgtatcaccatgcactctttctccatatttttcccactgggtttttcggagttttaacgaggcatgtgttggtcgcggtattcacccaagggggagtgttaagaaaccctagttagggttatgtgggcaaatacctgctttgcccctgaggggtctcacatctctatataaggaacctgtacactccctcataatacagagaagagaaagaggccataggcccaactctatatcatgtgtctcgtgtgttactctgtcgtgcttctgggaagggaaacaggttatctacagcttctcgtgcctctactgctgacgggaggaaagggagcggatctggtgatccgtggtgacgtaattctcaacaaggcggaccaaacagacggagtcatttccacacttgtgtgcagacgtcactatggtttgggctgtagccgagaagagagagacacggcccaacaggcataacaaaccggaccatttccatacttgtttgcagccctcacatgggccaagctgcagccgaaaacattccagatttaatatgagcctactacaacagcagaagaccggcccagaaatagtgaaatactactgctaggaaaatcgggacatgatgactgtttgttttctaagctcgttcgccccctctcttctctccgtccaacgacggcgcgattcagatccaggcatacaggccatccttccgccgccgcggactgcgcttaatcttccttctccagcagccgggcgttcccgtcgtcctcgatcctcccctggactggatcgcaacggagatccagccggacctgcggtggtcccttccttttctcggtaggccgccttgagtgaattcctcgttttctgtaatgcatattctttgcttactatgaatcctcaaatccgaatcttttatgtggtggatatgatggattgtttcctttgcaagatagcataatgagctcgccagtggagaggtgattcgtcaggctggtatcaagttcctagtccatggtgcctggatgagcagtagagatgctactggccgtggaaggaggagggttcttctcgtcttcagctacaggttacagccatggcctcgccctcttgctgctcggacgcaaagctgaggagaagcccgtaaaggtctcgccgtggaaccagtaccggctagtcgaccgggagaccgagcaggtgtaccacctgccctccgccaaggaccaggctcctgggaaatgtgctccctttgtctgcttcggatgcacggctaatggc

SEQ ID NO: 38220 - protein, 80 aa, Zea mays subsp. mays
MLLAVEGGGFFSSSATGYSHGLALLLLGRKAEEKPVKVSPWNQYRLVDRETEQVYHLPSAKDQAPGKCAPFVCFGCTANG

SEQ ID NO: 38221 - protein, 76 aa, Zea mays subsp. mays
MCLVCYSVVLLGRETGYLQLLVPLLLTGGKGADLVIRGDVILNKADQTDGVISTLVCRRHYGLGCSREERDTAQQA

SEQ ID NO: 38222 - protein, 74 aa, Zea mays subsp. mays
MMTVCFLSSFAPSLLSVQRRRDSDPGIQAILPPPRTALNLPSPAAGRSRRPRSSPGLDRNGDPAGPAVVPSFSR

SEQ ID NO: 38223 - DNA, 574 bp, Zea mays subsp. mays
gcttcgtctctccggttgttaccaccacacaacgccatggaagctgctcttgctgcatgcgctcttccatcgctccgaattctcaatacgaaacctcgtttcagatgttccttctccaatccaagcctacccatttctcctaattcccttatcacccgcaaatcaagtcgattcacaaccgcagtatcatcaccaccatcatcatcagccgctacgtcaacgaattctccaccggaacctgaagccctattcgaacccgggtcggataagttcgattggtacgctaattggtacccagtgatgccaatttgcgatcttgacaagaaggttcctcatgggaagaaagttatggggattgatttggttgtttggtgggataggaacgagaagcaatggaaagtgatggatgacacgtgtcctcatcgtcttgctcctttgtctgatggaaggattgatcaatgggggaggttgcaatgtgtttatcatggatggtgctttaatggttccggtgactgtaaactcattcctcaagctcctcctgatggtcctcccggtcacactttcaagcaagctt

SEQ ID NO: 38224 - protein, 191 aa, Zea mays subsp. mays
ASSLRLLPPHNAMEAALAACALPSLRILNTKPRFRCSFSNPSLPISPNSLITRKSSRFTTAVSSPPSSSAATSTNSPPEPEALFEPGSDKFDWYANWYPVMPICDLDKKVPHGKKVMGIDLVVWWDRNEKQWKVMDDTCPHRLAPLSDGRIDQWGRLQCVYHGWCFNGSGDCKLIPQAPPDGPPGHTFKQA

SEQ ID NO: 38225 - protein, 179 aa, Zea mays subsp. mays
MEAALAACALPSLRILNTKPRFRCSFSNPSLPISPNSLITRKSSRFTTAVSSPPSSSAATSTNSPPEPEALFEPGSDKFDWYANWYPVMPICDLDKKVPHGKKVMGIDLVVWWDRNEKQWKVMDDTCPHRLAPLSDGRIDQWGRLQCVYHGWCFNGSGDCKLIPQAPPDGPPGHTFKQA

SEQ ID NO: 38226 - protein, 99 aa, Zea mays subsp. mays
LRLSGCYHHTTPWKLLLLHALFHRSEFSIRNLVSDVPSPIQAYPFLLIPLSPANQVDSQPQYHHHHHHQPLRQRILHRNLKPYSNPGRISSIGTLIGTQ

SEQ ID NO: 38227 - DNA, 663 bp, Zea mays subsp. mays
aatcggtgatgcttatctcaagaagcaagagttcaatagggaacccctatatgtgaaatttcggcttcgtgaaccttttcacaagccgatactaagttcagaaccatcaatcaatgtgcaaccactacaaccacacgaccagtttctcatatttgcatctgatggactttgggagcacttaaccaaccaagaagctgttgatattgttcacagtagcccccgcagtggctgtgctaggaggctgataagagcggcgctgcaagtggcagccaagaaaagggagatgaggtactcagacctcaagaagatcgaccgcggtgttcgccgccacttccacgacgacataacagtcatagtagtgttccttgattccagcctcgtgagcaaggcgagcgcgcaccgaggccccactctttccctgcgaggcggcggtgccagcgctggtctgcgcagcaacacgcttgcaccaacatcaatgtgactatgaggaggctacaaccctgactggaagacgttttctttcctcgtgtcgaatgtgttatatacgtacttgtaccggccaaggtcatccatctcccctcaatggtgtaaagaactaggagaggcgtggaagctcctctccagcgtctttgaatgccctcaatggtgtcaaggtgtggactc

SEQ ID NO: 38228 - protein, 159 aa, Zea mays subsp. mays
IGDAYLKKQEFNREPLYVKFRLREPFHKPILSSEPSINVQPLQPHDQFLIFASDGLWEHLTNQEAVDIVHSSPRSGCARRLIRAALQVAAKKREMRYSDLKKIDRGVRRHFHDDITVIVVFLDSSLVSKASAHRGPTLSLRGGGASAGLRSNTLAPTSM

SEQ ID NO: 38229 - protein, 65 aa, Zea mays subsp. mays
MRYSDLKKIDRGVRRHFHDDITVIVVFLDSSLVSKASAHRGPTLSLRGGGASAGLRSNTLAPTSM

SEQ ID NO: 38230 - DNA, 558 bp, Zea mays subsp. mays
tttgatcttggaggaggaacttttgatatctctattctggagatctcaaatggagtttttgaggtcaaagcaacaaatggtgatactttcttgggtggtgaagattttgataatacactattggagttcttggtgagtgatttcaagaaaactgagggcatagatctgtcgaaagatagattggccctgcaaaggcttcgtgaagctgctgagaaggcaaaggttgaactttcgtcgacttctcagacagaaatcaatctgccattcataacagctgatgcttcaggggcaaaacatttgaacatcacactgacaaggtcaaaatttgaatctcttgtacacgatctgattgagagaactagagatccatgcaagaactgtttgaaggatgccggaatatctactaaagaggtggatgaagtacttcttgttggtggaatgactagggttccaaaggtgcaggaggtagtctctgaaatctttgggaagaaccaagcaaaggagtcaatccagatgaagctgtgggcatgggtgctgcacttcagggtggcattctcc

SEQ ID NO: 38231 - protein, 186 aa, Zea mays subsp. mays
FDLGGGTFDISILEISNGVFEVKATNGDTFLGGEDFDNTLLEFLVSDFKKTEGIDLSKDRLALQRLREAAEKAKVELSSTSQTEINLPFITADASGAKHLNITLTRSKFESLVHDLIERTRDPCKNCLKDAGISTKEVDEVLLVGGMTRVPKVQEVVSEIFGKNQAKESIQMKLWAWVLHFRVAFS

SEQ ID NO: 38232 - DNA, 905 bp, Zea mays subsp. mays
attttggtattgctgcttacgtcgtcagatctgctcgttttttcgctccatttttgggttaccattactcagcttccgttttaaatatcacattagatggacgaaagcggaggtgatagtggttcagtggccacacctgttcaacagcgagcacatgaggcatggaggatttaccaacactatcttgacaagactacacctcatgcaaattacagatggattggaactcttgtcgtcgctcttatctactgtttgagggtttactatattcagggtttctacatcatcgcctatggtcttggaatctaccttctcaatctgcttatcgggttcttgtcccctcttgttgatcctgaagctggtggggtctctgatgggccttctctgcctactagaggttctgatgagttcaagcctttcattcgccgtctccccgagttcaaattctggtactccatgacaaaggctttctgcatagctttcctcatgacattcttctcggtgtttgacgttcctgtgttttggccaattctgctgtgctattggatcgttctctttgttctcaccatgagacgccagatcgcccacatgatcaagtacaaatacatccctttcagcttcggcaaacagaaatatggtggacggagcagcagcggctcacgtgcggattgatctgaccaatttgctgaccattagctactttttttgtctttgcaaaagagaaagaaaaaattgttaagaatatcattttggaccatttttacattgacaaaactatgcagagctataaggaagaattataggcaggataaaaaaggatggaaactaaacttgatttagctcggaaaaaaaaaaaaaaaaaaaaagaaaaaaaaaaaaaaaaaaaactcgagggggggcccggt

SEQ ID NO: 38233 - protein, 191 aa, Zea mays subsp. mays
MDESGGDSGSVATPVQQRAHEAWRIYQHYLDKTTPHANYRWIGTLVVALIYCLRVYYIQGFYIIAYGLGIYLLNLLIGFLSPLVDPEAGGVSDGPSLPTRGSDEFKPFIRRLPEFKFWYSMTKAFCIAFLMTFFSVFDVPVFWPILLCYWIVLFVLTMRRQIAHMIKYKYIPFSFGKQKYGGRSSSGSRAD

SEQ ID NO: 38234 - DNA, 725 bp, Zea mays subsp. mays
aaaatttcgttcgaccattctatccacaaactccaaccatagcgtcgtgtactcgtgtaccagttgatgctgccactgcccacggcgggggcggtcgccgccgcaggggtagcggcgcccctcgggtcgcgtccgctccgcctcgtcgcgactcgagccaccactaccccttcttctcccactacttccacctcggccatatccaacgcgtcaccagcggggcattcccgcaaggacctgtcaggcagggacggcgccccgtcgaagcccaccaagccccgggtgttcttcctcgacgtcaatcctctatgcttccgcggctcccagcgcaacctcggggccttcgcgcgctggctggcgctcttcttcgcgcacgtcagcctccgtgaccctgtcgttgctgttttggacggcgatggagagaaagagaacgagtaccggaggcgggtgctgccttagtacaaggcgcatagggctcgcggcgttggcactggcgctgacacgcgcgtcgtcaacgttctctgcgaatgcaatgtccgggtgggtgcacatgtttaaactagtgcagccactcagttattcttagctcagactcagattattgagtgtcaattttggaaacggcaaattcaggttgtaagagtcgatggatatgaggctgatgatgtggtggctaccttgacagaacaggttctacagaaaggttacagagttttcaaagcctc

SEQ ID NO: 38235 - protein, 130 aa, Zea mays subsp. mays
MLPLPTAGAVAAAGVAAPLGSRPLRLVATRATTTPSSPTTSTSAISNASPAGHSRKDLSGRDGAPSKPTKPRVFFLDVNPLCFRGSQRNLGAFARWLALFFAHVSLRDPVVAVLDGDGEKENEYRRRVLP

SEQ ID NO: 38236 - protein, 128 aa, Zea mays subsp. mays
NFVRPFYPQTPTIASCTRVPVDAATAHGGGGRRRRGSGAPRVASAPPRRDSSHHYPFFSHYFHLGHIQRVTSGAFPQGPVRQGRRPVEAHQAPGVLPRRQSSMLPRLPAQPRGLRALAGALLRARQPP

SEQ ID NO: 38237 - DNA, 689 bp, Zea mays subsp. mays
aaaaatctcatctcagcgtcattcatttcaatcaccgtgtgtgtgtgaaagaactgaacatggccatgagaggcaacaatgtcaagaccttggcgttgatgctcgtagttgtgggtcttgtggcactccagcaaacccagcaagtacaagcatcccactgttgttgccatctagactccgtccctacctattttaagtgccgcgaaaaatctgatagcaccgtctcagagtgctgcggttcttctgatggctatatatcagacgccgctggatttgaatgcaagtccggttttatagatatagagacagcactgcaagccgtcaactactgcaagctggggtgcacggcttccttgtgcaacaaagtaactccatctgggaaagatgccatggaacgctgcactagtggatgccacgatctgtgcaccaagaacaatgccgaaattgcgcaagtcgtcgcggcttaactagttatgccaaagagctgcatctgacaagcccgccaaggagtgtttatgttgccttcaataattggtgccaaatccaataaggatcatgagctgtatgatgcatcttcctgcgaggatgtatagtgctcgatcatcatttcttgttaaatgttttatcttgtatccttggcaaatggcatgatgacgacatgcttttagtgaaatcttgtttagtttgcg

SEQ ID NO: 38238 - protein, 154 aa, Zea mays subsp. mays
KSHLSVIHFNHRVCVKELNMAMRGNNVKTLALMLVVVGLVALQQTQQVQASHCCCHLDSVPTYFKCREKSDSTVSECCGSSDGYISDAAGFECKSGFIDIETALQAVNYCKLGCTASLCNKVTPSGKDAMERCTSGCHDLCTKNNAEIAQVVAA

SEQ ID NO: 38239 - protein, 135 aa, Zea mays subsp. mays
MAMRGNNVKTLALMLVVVGLVALQQTQQVQASHCCCHLDSVPTYFKCREKSDSTVSECCGSSDGYISDAAGFECKSGFIDIETALQAVNYCKLGCTASLCNKVTPSGKDAMERCTSGCHDLCTKNNAEIAQVVAA

SEQ ID NO: 38240 - protein, 133 aa, Zea mays subsp. mays
MRGNNVKTLALMLVVVGLVALQQTQQVQASHCCCHLDSVPTYFKCREKSDSTVSECCGSSDGYISDAAGFECKSGFIDIETALQAVNYCKLGCTASLCNKVTPSGKDAMERCTSGCHDLCTKNNAEIAQVVAA

SEQ ID NO: 38241 - DNA, 511 bp, Zea mays subsp. mays
  misc_feature (436)..(436): n is a, c, g, or t
accaccgcatcccacaacccccgagctcagcttagctccactccagctccaatcgcagtcgtgaccagagcgcgagagctagctagagggccgtgaaaatgccgatcaataggatcgccctggggagccaccaggaggtgtaccacccgggcgccctcaaggcggcgttcgctgagttcatctccaccctcatcttcgtcttcgccggccagggctccggcatggccttcagcaagctgaccggcggcggcccgacgaccccggcgggcctgatcgcggcggcggtggcgcacgcgttcgcgctgtttcgtggcggtgtctgtgggcgcgaacaatctccggcgggcacgtgaaaccctgccgtggaccttcggcgccttcgtgggcggcaacatcacccttgttccgggggctcctggtactggggtggcgcagnctgctggggtccaaccgtggcgtgcttcctgctccggcttctcgacgggcgggcaggccacgggcacctttcggg

SEQ ID NO: 38242 - protein, 84 aa, Zea mays subsp. mays
MPINRIALGSHQEVYHPGALKAAFAEFISTLIFVFAGQGSGMAFSKLTGGGPTTPAGLIAAAVAHAFALFRGGVCGREQSPAGT

SEQ ID NO: 38243 - protein, 43 aa, Zea mays subsp. mays
MAFSKLTGGGPTTPAGLIAAAVAHAFALFRGGVCGREQSPAGT

SEQ ID NO: 38244 - DNA, 1133 bp, Zea mays subsp. mays
acgcctgcacatccccactcctaaaaatagtagccggcggcatgcaaatacgataccccacgccttcttcccgttcatgatatggagctctcctcagatcaataatgggcctatatatgagacgcacgagcaacgccagttagcaaccagccaccactaccaaccctccagtctcagtctccgtctcctgctgagcaacaaggcttcagcagttcagagattctgctggagcctggaggaagcttctctacccaccactccgacgcggccgccgtcgacgagatcagccgcgccgtcgccaccaaaggcaaaagaagagatcgagctcgaggctcgagctcgagcaggcagcagggagggggcacccagatatatagatccccaaaaggtgcatgtaatcatcggctgcgtcgtcacgtcagtcgttcatgtgtttgtatctgattcgtggatgccagattaattgatggacctgtccccgaaccccgagagcccgggaagcggtggtgatggcggcggtggcggaggcggagccgggggatcgagcagcggcggggcgtctccgtcggggggcttcggcacgccgcagacgccgagccggtacgaggcgcagaagcggcgggactggaacacgttcgggcagtacctgcggaaccaccggccgccgctgagcctggcgcagtgcagcggtgcgcacgtgctggagttcctgcgctacctggaccagttcggcaagaccaaggtgcacacgccggcgtgccccttcttcggccacccgaacccgcccgcgccgtgcccctgcccgctgcgccaggcctggggtagcctcgacgcgctggtggcccgcctccgcgccgccttcgaggagaacggggtcctcccggagtccaaccccttcgcggcgcgcgccgtccgcctctacctccgcgaggtccgcgagcaccaggcccgcgcgcgcggcgtcagctacgagaagaagaagcgcaagaaggcgcagcggccggctgatcatgccagcggcagtggaggcggccaaggacctcaccacccgccgcccgccggcgcgtcgggctgaggaacccatggtatgccggccggactgagcatattttatgtaggtttcgatcgatttg

SEQ ID NO: 38245 - protein, 202 aa, Zea mays subsp. mays
MDLSPNPESPGSGGDGGGGGGGAGGSSSGGASPSGGFGTPQTPSRYEAQKRRDWNTFGQYLRNHRPPLSLAQCSGAHVLEFLRYLDQFGKTKVHTPACPFFGHPNPPAPCPCPLRQAWGSLDALVARLRAAFEENGVLPESNPFAARAVRLYLREVREHQARARGVSYEKKKRKKAQRPADHASGSGGGQGPHHPPPAGASG

SEQ ID NO: 38246 - protein, 153 aa, Zea mays subsp. mays
RLHIPTPKNSSRRHANTIPHAFFPFMIWSSPQINNGPIYETHEQRQLATSHHYQPSSLSLRLLLSNKASAVQRFCWSLEEASLPTTPTRPPSTRSAAPSPPKAKEEIELEARARAGSREGAPRYIDPQKVHVIIGCVVTSVVHVFVSDSWMPD

SEQ ID NO: 38247 - protein, 128 aa, Zea mays subsp. mays
MIWSSPQINNGPIYETHEQRQLATSHHYQPSSLSLRLLLSNKASAVQRFCWSLEEASLPTTPTRPPSTRSAAPSPPKAKEEIELEARARAGSREGAPRYIDPQKVHVIIGCVVTSVVHVFVSDSWMPD

SEQ ID NO: 38248 - DNA, 1037 bp, Zea mays subsp. mays
tgaagagtcttaagagcattcccaatgtcgtatccgtgggaagcccaaatccatattcaacaagggtgttaccagtgggtggccaatcgccaggaaatggaatgaatgggacacctgggaaactcaagcttgagaaacttgcaatcaataagttctctccaactagcctattgaattccatcaaattgagaagagaaggtcctctttctctcatgacagagcacaaagaagcattatggagcacgtattcgccaaccacaaagcccgatacttctgttctaaataggctcattgacgctggtgtgtcaccaaggattgaggagtccatgtcagtagtcaacaatgagatattgcggcggcacttcttggagttgacgaccaacttccttgcgccttttgggccgtatctgagaactacaacaccatcagaagggacttcaccttttgttgacccaccattgctaccaccgtttcatgcagatgagttcatcaatggtttggcagctagaggtccagggaagtttttgtccaaaaggatgaggtccaattggttggacctatataggagatttctcgaaggccccaattttatgccttggttccggcaaaggcgtgctgctgcggagcaagaacagcagaggctctggaggcaggctcgcatgaatgttgacattgaaaagctaatgtcaaatatgtccgaaatagagaggattgattcttttgatgctgttgagcgttatcttctcagagagatggagaaccctggaaaaggaagtgctgattcaataggggcatgccaaaaattgaaggtagacctccaagcagcattcaatgtactgccgaaggacttgcagcaactcctgctctccaaccctaaaagagctgttcttcttcaaggtagtcaagagaaggccctgggtgccaatggcattggcacccagacaagtttgtagcagccccctctgtaacattaccattgtcactattttttgcacacataatacaaagttacacatttatatacacccacgtttgtc

SEQ ID NO: 38249 - protein, 316 aa, Zea mays subsp. mays
KSLKSIPNVVSVGSPNPYSTRVLPVGGQSPGNGMNGTPGKLKLEKLAINKFSPTSLLNSIKLRREGPLSLMTEHKEALWSTYSPTTKPDTSVLNRLIDAGVSPRIEESMSVVNNEILRRHFLELTTNFLAPFGPYLRTTTPSEGTSPFVDPPLLPPFHADEFINGLAARGPGKFLSKRMRSNWLDLYRRFLEGPNFMPWFRQRRAAAEQEQQRLWRQARMNVDIEKLMSNMSEIERIDSFDAVERYLLREMENPGKGSADSIGACQKLKVDLQAAFNVLPKDLQQLLLSNPKRAVLLQGSQEKALGANGIGTQTSL

SEQ ID NO: 38250 - protein, 283 aa, Zea mays subsp. mays
MNGTPGKLKLEKLAINKFSPTSLLNSIKLRREGPLSLMTEHKEALWSTYSPTTKPDTSVLNRLIDAGVSPRIEESMSVVNNEILRRHFLELTTNFLAPFGPYLRTTTPSEGTSPFVDPPLLPPFHADEFINGLAARGPGKFLSKRMRSNWLDLYRRFLEGPNFMPWFRQRRAAAEQEQQRLWRQARMNVDIEKLMSNMSEIERIDSFDAVERYLLREMENPGKGSADSIGACQKLKVDLQAAFNVLPKDLQQLLLSNPKRAVLLQGSQEKALGANGIGTQTSL

SEQ ID NO: 38251 - protein, 246 aa, Zea mays subsp. mays
MTEHKEALWSTYSPTTKPDTSVLNRLIDAGVSPRIEESMSVVNNEILRRHFLELTTNFLAPFGPYLRTTTPSEGTSPFVDPPLLPPFHADEFINGLAARGPGKFLSKRMRSNWLDLYRRFLEGPNFMPWFRQRRAAAEQEQQRLWRQARMNVDIEKLMSNMSEIERIDSFDAVERYLLREMENPGKGSADSIGACQKLKVDLQAAFNVLPKDLQQLLLSNPKRAVLLQGSQEKALGANGIGTQTSL

SEQ ID NO: 38252 - DNA, 1277 bp, Zea mays subsp. mays
ctgggccctgggtcccttcgtcctgctcatcccctactactagttgagtttttcaagtgaagagaagccattagccatggcggcggtggatctgtccaagctggtgaaggagaagcgcttctgggtggcctccttcctcgtcgtatgggcagcagcgctgcagggccacatgatgtggatgcagcgccaggacaccttcaagcacaagtttggtatcgaccaagcagacggacccgatgctcaggattcctcatcttcgtcttcgtcttcctcttcttaatgtgtgatatgctgttccctcaattatgcctgagaattccatccacaaatgcgatgcatgtcaggggccttcagtcccttggtcaactttttggttgtacatccaagaacatcgataatcatttggatgcccttgcatcacaccaaagtgttggaaacaagaatctttgccagagtgagacattgcaagatatgagcatggatcaatctggtcaacccactttattctgcgaagcatcaatggcaacactactcctgagaggacttgcaatagctcccattcagcttagcccgtgtaccaacttctttattttgctggccattgatacagcctgaaggggcagccagcgatgacattgcattgggtattgctgttggtagcacaggaagaggcaaccttcctggttctacatcagatattcgagcagcgcttcttttacttttgattggtaaatgcacagctgatcaggaggcactaaaggaggtagaaggcaatggggttcttcaggggccttctggatgacacagattcaagggtagcatatactattctgctgcttttcttttgaagagaatgatgacagaggaactagagatctaccaacggatgcttgaaagcctcatctcaaaagctcagcagatgctatgcgtgtgtttggttgcacgtccagtgatagtccgcatggagatggttgagcatgttacgtatttgtgggatacgcgtgaaatcgccgtatgtgttgggccatactcacatcctatgtgaatgatgtaaattatcgatgggggcatgagcctctgaatttgtttgtttattctttgttagactagtcactgtacaagggagtcactgtggataatcctgtgttatggacagagacacagttctacaattttgtattgctgaaccagaggcgtgtatgtttgtaattgtgtagggtggaatatattgatttggggaccctttattgcattgtgcggaactgcagaacttgtct

SEQ ID NO: 38253 - protein, 156 aa, Zea mays subsp. mays
MGSSAAGPHDVDAAPGHLQAQVWYRPSRRTRCSGFLIFVFVFLFLMCDMLFPQLCLRIPSTNAMHVRGLQSLGQLFGCTSKNIDNHLDALASHQSVGNKNLCQSETLQDMSMDQSGQPTLFCEASMATLLLRGLAIAPIQLSPCTNFFILLAIDTA

SEQ ID NO: 38254 - protein, 111 aa, Zea mays subsp. mays
MCDMLFPQLCLRIPSTNAMHVRGLQSLGQLFGCTSKNIDNHLDALASHQSVGNKNLCQSETLQDMSMDQSGQPTLFCEASMATLLLRGLAIAPIQLSPCTNFFILLAIDTA

SEQ ID NO: 38255 - protein, 108 aa, Zea mays subsp. mays
MLFPQLCLRIPSTNAMHVRGLQSLGQLFGCTSKNIDNHLDALASHQSVGNKNLCQSETLQDMSMDQSGQPTLFCEASMATLLLRGLAIAPIQLSPCTNFFILLAIDTA

SEQ ID NO: 38256 - DNA, 458 bp, Zea mays subsp. mays
aatctgggttttatcttgttcttggaagctcgaacgtcgatgaagggttacgtggttatttgacaaagtatgactgcagttcagctgatgtaaaccccattggaagtgtaagtaagcaagatctgagagcttttttacgatgggcagcaattcatcttaagtattcttccttggccgaggttgaagctgcaccacctactgccgagcttgagccaatacgagcaaactacaatcagttggatgaaatagacatgggaatgacatatgaggagctgtctatatatggaaggttaaggaaaattttccgatgtggtcctgtttcaatgtttcagaacctgtgccacagttggtgtggaagattgtctccgtctgaagtggctgacaaagtgaagcacttcttcaagtactacgccataaaccggcacaagatgactgttttgacacccatcttatcatgc

SEQ ID NO: 38257 - protein, 152 aa, Zea mays subsp. mays
SGFYLVLGSSNVDEGLRGYLTKYDCSSADVNPIGSVSKQDLRAFLRWAAIHLKYSSLAEVEAAPPTAELEPIRANYNQLDEIDMGMTYEELSIYGRLRKIFRCGPVSMFQNLCHSWCGRLSPSEVADKVKHFFKYYAINRHKMTVLTPILSC

SEQ ID NO: 38258 - protein, 69 aa, Zea mays subsp. mays
MGMTYEELSIYGRLRKIFRCGPVSMFQNLCHSWCGRLSPSEVADKVKHFFKYYAINRHKMTVLTPILSC

SEQ ID NO: 38259 - DNA, 1092 bp, Zea mays subsp. mays
atccacctcggctcactccactcactgcaccgagctcactggcaatggctaccagcaccaagctcgtggcccttggctttgccgtcctcctgagcatcggcttctccgatgcagcgagggtagttaggcttggtagccatgcgtctgcgggaggtggaggtggcggcgggggaggcggctccgggtcgactgggggtggctttggcggtgggtcgggcggtggcggtggttacggcataggtaagggtggcggggactggtggaacaatttcgtctctagtatagcaggtggtggaggaggaggacaaggcggaggcggtggcaccaatggtgggtccgggtccggcggtgggtccggttatggttctggcagcagctcgactgcagcctctggccccagcagtggcaactacgccgacgctgagggcaagggcgccggtggaggcatgggcggtggtgccaatggtgcatatggttctggtgctggtggaggcgttggcaagggcgagggtgtgagtggtgtggcactcgcaccatcgtccaacggctactacaatggcggtgccgccgatgctaccggtggcggttccggcgccggcggtggacatggtggtggcgcagccggagctccaagctatggaaccggaggcggcctcggcggaggcaagggtgaggccggcagcgatggatcgtgggggtcaggttatgctcagggaatcggtgctggcacaggcggcggtggcggcggcggatcccaaggcggctctggtggcggtggaggctctgggtccggatccggcagcggtggaatccactgagcttgcacttcagtagctagagcctagagccccgcattagtgtcagtccattctgtggttttttgctgtctttgttacgagaattaatcaggaataaagcgtaatgggcttcgtgattgtagttcgagtaggtagcaaagcatgcaactgatatgaatgcatgtaatggctatctacgagtgtgtgcccctagctgtaatctgtttctcatcgatcgttaaggtcgttgcatccggttttatttatcttctgaaaccaaaatacattggaactc

SEQ ID NO: 38260 - protein, 271 aa, Zea mays subsp. mays
PPRLTPLTAPSSLAMATSTKLVALGFAVLLSIGFSDAARVVRLGSHASAGGGGGGGGGGSGSTGGGFGGGSGGGGGYGIGKGGGDWWNNFVSSIAGGGGGGQGGGGGTNGGSGSGGGSGYGSGSSSTAASGPSSGNYADAEGKGAGGGMGGGANGAYGSGAGGGVGKGEGVSGVALAPSSNGYYNGGAADATGGGSGAGGGHGGGAAGAPSYGTGGGLGGGKGEAGSDGSWGSGYAQGIGAGTGGGGGGGSQGGSGGGGGSGSGSGSGGIH

SEQ ID NO: 38261 - protein, 257 aa, Zea mays subsp. mays
MATSTKLVALGFAVLLSIGFSDAARVVRLGSHASAGGGGGGGGGGSGSTGGGFGGGSGGGGGYGIGKGGGDWWNNFVSSIAGGGGGGQGGGGGTNGGSGSGGGSGYGSGSSSTAASGPSSGNYADAEGKGAGGGMGGGANGAYGSGAGGGVGKGEGVSGVALAPSSNGYYNGGAADATGGGSGAGGGHGGGAAGAPSYGTGGGLGGGKGEAGSDGSWGSGYAQGIGAGTGGGGGGGSQGGSGGGGGSGSGSGSGGIH

SEQ ID NO: 38262 - DNA, 749 bp, Zea mays subsp. mays
gaaccaagagagcagggtgtgggcgaagagaccccagccagtcgatcgttcaagaaaaataccagcttaccaacaacagcagcagcaagcccacccgttcgacgacatggcccgcctcggcgccggcgccgtgttggcgctcctagtggcggtcgcggcggtggccgcgttcctcgcggtgccggcctcggcgaagtccggggagctgagcgcgatggggttgctggcggcgaagggcggcagcggcgcgggcccgcagaagtgctcgggcgcggtgggcgagtgcgacgtggacgaggcggaggagctcgggctgagcggcggcggcctcggctccgacgacgcggtgcggcggacgctggcgcagcggaagccgaccaaccggtacatcagctacgcggcgctgcgcgcggaccaggtgccgtgcaacaagcgcggccggtcctactacagcaactgcgaggcgcagaaggccgccaacccctaccgccgcggctgctccgccatcacgcgctgcgcccgcaacatgaactgagcccagcgctagctgctgccggggcgcgccgtcgtcgccgagccggtcggtctggtctggtttggtctgcctgcctgccaggtcacgcagcctggctccaccgatcgcacaccatacattgacgtcgtcgtcgcggccgtacgtgccgttggacggtggaggaggcggtggcgctacgacagtatatatatacacaattacacatacacacccc

SEQ ID NO: 38263 - protein, 218 aa, Zea mays subsp. mays
EPREQGVGEETPASRSFKKNTSLPTTAAASPPVRRHGPPRRRRRVGAPSGGRGGGRVPRGAGLGEVRGAERDGVAGGEGRQRRGPAEVLGRGGRVRRGRGGGARAERRRPRLRRRGAADAGAAEADQPVHQLRGAARGPGAVQQARPVLLQQLRGAEGRQPLPPRLLRHHALRPQHELSPALAAAGARRRRRAGRSGLVWSACLPGHAAWLHRSHTIH

SEQ ID NO: 38264 - protein, 177 aa, Zea mays subsp. mays
NQESRVWAKRPQPVDRSRKIPAYQQQQQQAHPFDDMARLGAGAVLALLVAVAAVAAFLAVPASAKSGELSAMGLLAAKGGSGAGPQKCSGAVGECDVDEAEELGLSGGGLGSDDAVRRTLAQRKPTNRYISYAALRADQVPCNKRGRSYYSNCEAQKAANPYRRGCSAITRCARNMN

SEQ ID NO: 38265 - protein, 142 aa, Zea mays subsp. mays
MARLGAGAVLALLVAVAAVAAFLAVPASAKSGELSAMGLLAAKGGSGAGPQKCSGAVGECDVDEAEELGLSGGGLGSDDAVRRTLAQRKPTNRYISYAALRADQVPCNKRGRSYYSNCEAQKAANPYRRGCSAITRCARNMN

SEQ ID NO: 38266 - DNA, 421 bp, Zea mays subsp. mays
acctaggcgagctgccgagctattgctcggcgcctccatctcgtccacaccacacagccgttgagtccaattcgctcactcaccgtcaaacccacacctcaaactccttcccttcaagaatgtcagattatccactgcggcctcttcctcctcttcctccgcccctcccaccatgattgccacccatctctccccagccctcaagcagtaccgcttcccgtccccgctccactccacctctcacaaccaccaccttcccgtgcacctcccgctcccccgccgccaccgcaacttcgctaagcccgccgcggccgcgccagacctcctcgccagcgtcgagtccgtggtctccgcggcctccgtcctggccgccatcgtgctcgtccacgagtccgggcacttcctggccgcggcctcccgg

SEQ ID NO: 38267 - protein, 83 aa, Zea mays subsp. mays
MIATHLSPALKQYRFPSPLHSTSHNHHLPVHLPLPRRHRNFAKPAAAAPDLLASVESVVSAASVLAAIVLVHESGHFLAAASR

SEQ ID NO: 38268 - protein, 57 aa, Zea mays subsp. mays
LGELPSYCSAPPSRPHHTAVESNSLTHRQTHTSNSFPSRMSDYPLRPLPPLPPPLPP

SEQ ID NO: 38269 - DNA, 622 bp, Zea mays subsp. mays
gatccagaaaaagacgaacaacaatggcgttgcaatggctgattctatcgtatgtggtggccgtcgaagtagtaatcaccctcgtgttgactctcccttaccctatgcttcttaagaaacgtgtagttcagcttgtctcattgattctccaacctgctgcttccatcgtcgccttcgccggatttcagctcctcgatatttactggaaggctgagcatagactatcttgttcatctgaggtttgcactgctacagaacgtgatcgctacgagaaatctatctacaaggctcagaggaacgtggttctatgcgctgcaggaattctactctactggtgcatctaccgcatctgcaaatacaacaaagacctggagcgcttggaggcaacggagaagagattcaaggaagagtaataatcttcacgagtatagggagttggttcctcaaaaccattatataagtaaagcttttttttattgcatttttacgttctaatattattggacctgaatgaaactaagagtatcgtgaacagcctttgcacactatatgtgtatatcatcagtgtccatttctttgatcaaaaaaaaaaaaaaaaaaaactcgagggggggcccggtac

SEQ ID NO: 38270 - protein, 136 aa, Zea mays subsp. mays
SRKRRTTMALQWLILSYVVAVEVVITLVLTLPYPMLLKKRVVQLVSLILQPAASIVAFAGFQLLDIYWKAEHRLSCSSEVCTATERDRYEKSIYKAQRNVVLCAAGILLYWCIYRICKYNKDLERLEATEKRFKEE

SEQ ID NO: 38271 - protein, 129 aa, Zea mays subsp. mays; identical to SEQ ID NO: 311

SEQ ID NO: 38272 - protein, 102 aa, Zea mays subsp. mays; identical to SEQ ID NO: 312

SEQ ID NO: 38273 - DNA, 1169 bp, Zea mays subsp. mays
aagttgaagacattcgcgaccgttatttatttcgcagagtgattagagataaagagagagacagagagaatcaaaacaatggccactgtgaaaatctatctttccttggcttcgctatcaccatcttcttcttcttcttcaattcaatctaagttatcaccatctttcattcccaatgcggcacctgcaaaggcggtgaagttgcgattcaatggaaagtccctgagagcaaaaccaatggtatacagatcatctcgctccgttggagtcacctgctctgcttcatcttctctgacgactcttccctctgctcttctcttcgattgcgatggcgttcttgttgataccgagaaggacggtcacaggatctccttcaacgacactttcaaagagagagatttgaatgttacctgggatgttgatttatacggcgagttacttaaaatcggtggtggtaaagaaaggatgactgcgtattttaacaaggttggttggccagagaaagctcctaaagatgaagcagagaggaaagagttcatagctggacttcacaagcagaagactgagcttttcatggttcttatcgagaaaaagctgcttccgcttcgacccggtgttgcaaagttggttgatcaagctttaacaaacggagtcaaagtagctgtgtgcagtacttcaaatgagaaggcggtttctgctatagtttcatgcttgcttgggccagaacgagcagagaaaatcaagatattcgcaggagacgtagtccccaaaaagaaacctgatccagccatttacaacttagcagctgaaacccttggagttgatccctcaaaatgtgtagtggttgaagacagcgcgatcgggctagcagctgcaaaagctgcgggaatgacttgtatagttacaaagagtggatacacggctgatgaagatttcgagaacgcagatgcggtttttgactgcattggagaccctccagaagagagatttgatttggcattctgtggaagttttttccagaaacagttcgttagttaaaaaccccaaaccccattaagaaaattgtttttatatcaacattgttgtgtatagtcatttgaacagaacattcatgtaaaaccatatatataatataattcggttataacattatgaagaaaagcgtttcc

SEQ ID NO: 38274 - protein, 319 aa, Zea mays subsp. mays
MATVKIYLSLASLSPSSSSSSIQSKLSPSFIPNAAPAKAVKLRFNGKSLRAKPMVYRSSRSVGVTCSASSSLTTLPSALLFDCDGVLVDTEKDGHRISFNDTFKERDLNVTWDVDLYGELLKIGGGKERMTAYFNKVGWPEKAPKDEAERKEFIAGLHKQKTELFMVLIEKKLLPLRPGVAKLVDQALTNGVKVAVCSTSNEKAVSAIVSCLLGPERAEKIKIFAGDVVPKKKPDPAIYNLAAETLGVDPSKCVVVEDSAIGLAAAKAAGMTCIVTKSGYTADEDFENADAVFDCIGDPPEERFDLAFCGSFFQKQFVS

SEQ ID NO: 38275 - protein, 266 aa, Zea mays subsp. mays
MVYRSSRSVGVTCSASSSLTTLPSALLFDCDGVLVDTEKDGHRISFNDTFKERDLNVTWDVDLYGELLKIGGGKERMTAYFNKVGWPEKAPKDEAERKEFIAGLHKQKTELFMVLIEKKLLPLRPGVAKLVDQALTNGVKVAVCSTSNEKAVSAIVSCLLGPERAEKIKIFAGDVVPKKKPDPAIYNLAAETLGVDPSKCVVVEDSAIGLAAAKAAGMTCIVTKSGYTADEDFENADAVFDCIGDPPEERFDLAFCGSFFQKQFVS

SEQ ID NO: 38276 - protein, 190 aa, Zea mays subsp. mays
MTAYFNKVGWPEKAPKDEAERKEFIAGLHKQKTELFMVLIEKKLLPLRPGVAKLVDQALTNGVKVAVCSTSNEKAVSAIVSCLLGPERAEKIKIFAGDVVPKKKPDPAIYNLAAETLGVDPSKCVVVEDSAIGLAAAKAAGMTCIVTKSGYTADEDFENADAVFDCIGDPPEERFDLAFCGSFFQKQFVS

SEQ ID NO: 38277 - DNA, 1137 bp, Zea mays subsp. mays
gatttctattttctcctccgaggtcgtctctcgaccaaaccacaaaaaccagaacaaaaataactaaaaaacaatcagatctgagatcgaacaaaacaacatgaacacgttaatcccatcggagaaaagatggatcatcaccggcgttttactagccggtttagttggcggtgctttgcttttcacaagcttcatacgagccgctgacgaaacgctcttcctctgttccacagcaagcgccaaaagcagagcggtggctgcggcagctgattacgaagcgactccgattcagcttcaagcgatcgtccactacgcgacatctaacgttgtcccacaacagaatcttgctgagatctcgatctctttcaacatcttgaaaaagctagctccggctaactttctcgtgttcggtctcggtcgtgactcgctcatgtgggcttctttaaatccacgtggcaaaaccttgttcttggaagaagatcttgaatggtttcagaaagtgaccaaagactctcctttcttacgtgcgcatcacgtgcgttacaggacgcagcttcaacaagccgattcgcttctacgttcgtacaaaacggagcctaactgttttccggcgaaatcttatctccggggaaacgagaagtgtaagctagctctcacgggactgcccgatgagttctacgatacagagtgggatctgctgatggtcgatgctcctaaaggttacttcgcagaagctccgggaagaatggcggcgattttctcggcggctgttatggctaggaaccggaagaaaccgggagttacgcacgtgttcttgcacgatgttaatcggagggtggagaagacttttgccgaggagtttttatgccggaagtatagagtcaacgccgccgggaggttatggcattttgctattcctccggcggctgcgaacgctacgattgactctggtgattataggttttgctaagattgcgacacgatttatcttcttatttcctcttttgcccttttattttacttttttgaggaattttattacagcattgggttcacttactatctgatttagtgccgacagttttggatctgcaaaaagaaaaaaaaaaaaaaaaaaaactcgagggggggcccggt

SEQ ID NO: 38278 - protein, 289 aa, Zea mays subsp. mays
MNTLIPSEKRWIITGVLLAGLVGGALLFTSFIRAADETLFLCSTASAKSRAVAAAADYEATPIQLQAIVHYATSNVVPQQNLAEISISFNILKKLAPANFLVFGLGRDSLMWASLNPRGKTLFLEEDLEWFQKVTKDSPFLRAHHVRYRTQLQQADSLLRSYKTEPNCFPAKSYLRGNEKCKLALTGLPDEFYDTEWDLLMVDAPKGYFAEAPGRMAAIFSAAVMARNRKKPGVTHVFLHDVNRRVEKTFAEEFLCRKYRVNAAGRLWHFAIPPAAANATIDSGDYRFC

SEQ ID NO: 38279 - protein, 179 aa, Zea mays subsp. mays
MWASLNPRGKTLFLEEDLEWFQKVTKDSPFLRAHHVRYRTQLQQADSLLRSYKTEPNCFPAKSYLRGNEKCKLALTGLPDEFYDTEWDLLMVDAPKGYFAEAPGRMAAIFSAAVMARNRKKPGVTHVFLHDVNRRVEKTFAEEFLCRKYRVNAAGRLWHFAIPPAAANATIDSGDYRFC

SEQ ID NO: 38280 - DNA, 698 bp, Zea mays subsp. mays
gagtttgaggaggggtgttaaggcccattaggcccaggcctacagcctatatatattatatagtccttagggactcatcattattgattaatctcaaggttagtaacagctagaagggcaagcctggtgcagtggcgagagctattttactgagtcagcaagtcaggggtttgaagcagcttctccagatttgcgggggaaaggcttgccttggtttatcactttctcagattccactcatgtgggagccttcgatcgggttagctcttgatgtagttgaccgcatgtgtaaatccagttctgatgtgccaattgaatcatttcacccaatcatacatgcttgtgaacaaagatgtgaacttcacatggcccgccccatatatgatttgatccgccaccacaatttgaaatttaaaagcaaaacattcagaagcataataagtttatttgtaaaattgaaggattttgaaggtgcttacaatatactcacagacgctgaagaatctggggagatatcaaccgtaagcctgtataatgctataatgctagggtattatagggagaaaaactacaatggagcacaaatggtcatgtctcaaatgcagattgctggagtaaaaccagattctgagacattcagttatttgatagcgaattgtgagtctgaagagacatttctaagtactgtgaccaattac

SEQ ID NO: 38281 - protein, 153 aa, Zea mays subsp. mays
MWEPSIGLALDVVDRMCKSSSDVPIESFHPIIHACEQRCELHMARPIYDLIRHHNLKFKSKTFRSIISLFVKLKDFEGAYNILTDAEESGEISTVSLYNAIMLGYYREKNYNGAQMVMSQMQIAGVKPDSETFSYLIANCESEETFLSTVTNY

SEQ ID NO: 38282 - protein, 138 aa, Zea mays subsp. mays
MCKSSSDVPIESFHPIIHACEQRCELHMARPIYDLIRHHNLKFKSKTFRSIISLFVKLKDFEGAYNILTDAEESGEISTVSLYNAIMLGYYREKNYNGAQMVMSQMQIAGVKPDSETFSYLIANCESEETFLSTVTNY

SEQ ID NO: 38283 - protein, 111 aa, Zea mays subsp. mays
MARPIYDLIRHHNLKFKSKTFRSIISLFVKLKDFEGAYNILTDAEESGEISTVSLYNAIMLGYYREKNYNGAQMVMSQMQIAGVKPDSETFSYLIANCESEETFLSTVTNY

SEQ ID NO: 38284 - DNA, 909 bp, Zea mays subsp. mays
  misc_feature (228)..(228): n is a, c, g, or t
gaaacaaaaaaaaacttcaacgccgtttcttcttccattaatctcatctctcaatcaaccaaaagcttcccatctcaaatccctcagtttgattttctaggcaaacaatcatctcccaccatgtttatgaatcggctattcgggaaacccaaacaggagactagtactctccaaacgttagacaagctcaatgagactcttgagatgttagagaagaaggagaatgtncttctcaagaaagctactggagaggttgagaaagctaaggaattctcccgggcgaagaacaaacgcgcggctatacaatgtttgaaaaggaaaaggttatatgagcaacaagttgaacagctcgggaatttccagctccgtattcatgatcaaatgattatgttagaaggtgctaaagcaacaacagagactgtagatgctttgaggactggagcttctgcaatgaaagctatgcagaaagcaacaaacattgatgatgttgacaagacaatggatgagatcaatgaacaaactgagaacatgaaacagatccaagaagcattgtcggctccatttggggctaatgattttgatgaggatgaattggaagcagaacttgacgaactagaaggcgctgagctggaagagcaacttcttcagcctgttccaatccatgtgcctcaaggaaacaagcctgctcgtgctccagctcagaagcaacctactgctgaggaagatgaactcgctgccttacaagctgagatggctctctaagctgaagctagccttggaagatttcgattaagtggggagatttgtgtgtgcattatctaaaaacagaaagaaaagattttatgtatataaggatccgagtctaattgatcggaagattttttttttctttttcaatataattaactt

SEQ ID NO: 38285 - protein, 253 aa, Zea mays subsp. mays
  misc_feature (76)..(76): Xaa can be any naturally occurring amino acid
ETKKNFNAVSSSINLISQSTKSFPSQIPQFDFLGKQSSPTMFMNRLFGKPKQETSTLQTLDKLNETLEMLEKKENXLLKKATGEVEKAKEFSRAKNKRAAIQCLKRKRLYEQQVEQLGNFQLRIHDQMIMLEGAKATTETVDALRTGASAMKAMQKATNIDDVDKTMDEINEQTENMKQIQEALSAPFGANDFDEDELEAELDELEGAELEEQLLQPVPIHVPQGNKPARAPAQKQPTAEEDELAALQAEMAL

SEQ ID NO: 38286 - protein, 213 aa, Zea mays subsp. mays
  misc_feature (36)..(36): Xaa can be any naturally occurring amino acid
MFMNRLFGKPKQETSTLQTLDKLNETLEMLEKKENXLLKKATGEVEKAKEFSRAKNKRAAIQCLKRKRLYEQQVEQLGNFQLRIHDQMIMLEGAKATTETVDALRTGASAMKAMQKATNIDDVDKTMDEINEQTENMKQIQEALSAPFGANDFDEDELEAELDELEGAELEEQLLQPVPIHVPQGNKPARAPAQKQPTAEEDELAALQAEMAL

SEQ ID NO: 38287 - protein, 211 aa, Zea mays subsp. mays
  misc_feature (34)..(34): Xaa can be any naturally occurring amino acid
MNRLFGKPKQETSTLQTLDKLNETLEMLEKKENXLLKKATGEVEKAKEFSRAKNKRAAIQCLKRKRLYEQQVEQLGNFQLRIHDQMIMLEGAKATTETVDALRTGASAMKAMQKATNIDDVDKTMDEINEQTENMKQIQEALSAPFGANDFDEDELEAELDELEGAELEEQLLQPVPIHVPQGNKPARAPAQKQPTAEEDELAALQAEMAL

SEQ ID NO: 38288 - DNA, 1435 bp, Zea mays subsp. mays
cccgatagtgcgtctttcccaaagtcgttttcttctatacaccttttttaataactctggaagcaaaaatggcataagagtcctttggatttggaatcgcttctacttcactctcaccttcctcctattctctctctctttctatgtcaagttagcttagccgtctcaccagaaagctaaccttacctcacaaacattgattgtgttacactaatctcttaaatagagagccgtaatttctacacactctgatcgctagatggaaacggagatatcaggaatggataatccagctatgaccttggacgaggtttccatggaacgcaacaagagcttcgttaaggcattgcaggagctcaagaacttgaggcctcaactttattcagctgctgattactgtgaaaagtcttatcttcatagcgagcaaaagcaaatggtattggacaatttgaaagactacactgtgaaggctctagttaatgctgttgatcaccttggaactgtagcttccaagcttactgatctttttgatcaccaaaattcagacatatcaactatggaaatgagagcttcttgtgttagccagcaactgcttacatgccggacatatatcgacaaagaaggtcttagacagcaacagctattagcagttatcccattgcatcacaagcattacattcttcccaattctgttaacaagcgggtacactttagtcctctcagacgaactgacacaagacagaatcattaccaagctatatcccgtcttcaaccttcagatgcccctgcatcgaaatcactctcctggcatttaggctcagagaccaagtctaccctcaaaggaacatccacagttgcaccaagctccaaagattcaaaagctttctcaaagacatctggagtgttccatctcttaggtgatgatgaaaacatagcaaacaagaagcctttggctggttctcaggtctcaggtgttcctgctgcatccactgcccataaggatttggaggttccgaaacttctaactgcacacaggtcacttgataacaacccgcgacgagagatcattcaagctcctgtccggacaaagagtgttctttctgcgttctttgttaaacagaaaactccaaagctcaaagctggctatgtctcgtgaaaacaccaactctttgtactgagaaggaaatttcaatctcataccacgtttcttttaccttatacaataacatgttgattttcatgtaattatcttaatcaccacatcaacgtacgaagtccagtaagacatgattttggtctatcattaacaaaactgtgtaatagattaagaatgtgtttttagaatgtaaaagcttaataaagatttctgttgagttattaaaaaaaaaaaaaaaaaaagaaaaaaaaaaaaaaaaaactcgagggggggcccggt

SEQ ID NO: 38289 - protein, 298 aa, Zea mays subsp. mays; identical to SEQ ID NO: 3615

SEQ ID NO: 38290 - protein, 291 aa, Zea mays subsp. mays; identical to SEQ ID NO: 3616

SEQ ID NO: 38291 - protein, 286 aa, Zea mays subsp. mays; identical to SEQ ID NO: 3617

SEQ ID NO: 38292 - DNA, 1438 bp, Zea mays subsp. mays
cagacggactcacagctcgcagcacctgcaccacttgacaaccagccagctagctaaccaaccggcggagccaagaacaagcaagagacaacttgccctgtccaggcagcatgtgcaactccaacgtcaagtccgcgggcgtcgcccagatcgacggccgcccggtgctgcagccggcgggcaaccgcgtggcggcgccggacgccgcccgcccgctcaagaagtccctgcacaagtccttctccatgccgccttcctacgacaacaatgccaccgtgcccgcccgtcccgcccctgccgagaacacccgtgcggcgccggcgccgccttctctgctgcctcctacgacgccggccccggccccggccgccgcgagggcgaccaaggcggcgggcgccgtgcccgcggagaagcccaggtccaaggccaggaagcccggcgccgtgctgccggtggcgacgttcgcggcgccagaggcgttcgagccggcggggagcatcgccgcggcgcggcgggagcatgccgcgcaggcgcaggcgcagcgcaagtcgcggatcgcgcactacggccgcaccgcgtccttctcccgggtggagggccgagtcggcgccaccgccacggccgagccggccgtcccagcctcccccaccaccgggctcgacgagaagcgctgtagcttcatcacgccctactctgaccccttgtatgtggcgtaccacgacgaggagtggggagtgcccgtgcacgacgacgagttgctgttcgagatgctcacactgtctggcgtgcaagtcggggccgattggacttccatcctcaagaaaagacacgtctacagggaggcgttctccggcttcgacgtggatgcggtcgccaagtacaccgagaagcagatggcgtcgctgagcgccgactacgggctggatttgggcaccgtcagaggaaccgtcaacaacgcctgccggattcttgaggtgcggagggacttttgctcgctggacaagtacgtgtgggcgttcgtgaacaacaagccgctgtcgccgagctacaagtacagccggaagatcccggtgaagacgtccaagtcggagtccatcagcaaggacatggtccggcgcggcttccgcttcgtcggccccactgtcatccactccttcatggaggcggtcgggctcaccaacgaccacctcgtctcgtgcccgcgcccacgcgtctgctccgccgccgcccgcgtaaataactgattctgctgacgaccaccaagcaaaacacaagagggaattatctaaggacaaccaagacgagagagagagagagaggtagcagtagtaatatacaaaagagagtgttggcggtttgcatgtgtgtatgatgacccagtgtgcttgtgtagattaattacggcctctgattagcgaattgtttaaacacaataaag

SEQ ID NO: 38293 - protein, 377 aa, Zea mays subsp. mays
MCNSNVKSAGVAQIDGRPVLQPAGNRVAAPDAARPLKKSLHKSFSMPPSYDNNATVPARPAPAENTRAAPAPPSLLPPTTPAPAPAAARATKAAGAVPAEKPRSKARKPGAVLPVATFAAPEAFEPAGSIAAARREHAAQAQAQRKSRIAHYGRTASFSRVEGRVGATATAEPAVPASPTTGLDEKRCSFITPYSDPLYVAYHDEEWGVPVHDDELLFEMLTLSGVQVGADWTSILKKRHVYREAFSGFDVDAVAKYTEKQMASLSADYGLDLGTVRGTVNNACRILEVRRDFCSLDKYVWAFVNNKPLSPSYKYSRKIPVKTSKSESISKDMVRRGFRFVGPTVIHSFMEAVGLTNDHLVSCPRPRVCSAAARVNN

SEQ ID NO: 38294 - protein, 332 aa, Zea mays subsp. mays
MPPSYDNNATVPARPAPAENTRAAPAPPSLLPPTTPAPAPAAARATKAAGAVPAEKPRSKARKPGAVLPVATFAAPEAFEPAGSIAAARREHAAQAQAQRKSRIAHYGRTASFSRVEGRVGATATAEPAVPASPTTGLDEKRCSFITPYSDPLYVAYHDEEWGVPVHDDELLFEMLTLSGVQVGADWTSILKKRHVYREAFSGFDVDAVAKYTEKQMASLSADYGLDLGTVRGTVNNACRILEVRRDFCSLDKYVWAFVNNKPLSPSYKYSRKIPVKTSKSESISKDMVRRGFRFVGPTVIHSFMEAVGLTNDHLVSCPRPRVCSAAARVNN

SEQ ID NO: 38295 - protein, 224 aa, Zea mays subsp. mays
RRTHSSQHLHHLTTSQLANQPAEPRTSKRQLALSRQHVQLQRQVRGRRPDRRPPGAAAGGQPRGGAGRRPPAQEVPAQVLLHAAFLRQQCHRARPSRPCREHPCGAGAAFSAASYDAGPGPGRREGDQGGGRRARGEAQVQGQEARRRAAGGDVRGARGVRAGGEHRRGAAGACRAGAGAAQVADRALRPHRVLLPGGGPSRRHRHGRAGRPSLPHHRARREAL

SEQ ID NO: 38296 - DNA, 1089 bp, Zea mays subsp. mays
tctttcccccttcccactctccactctgagcactctcctccgctctgctcctttgctccccacggcaaaccgtaaaccctagcctgaggggcacccctgtcgcagccatgggcgcaagccggaagctgcagggcgagatcgaccgcgtcctgaagaaggtccaggagggcgtcgatgtctttgacagcatctggaataaggtctacgacactgagaatgccaaccagaaggagaagttcgaggcggacctcaagaaggagatcaagaagctgcagcggtacagggaccagatcaagacgtggattcagtccagcgagatcaaggacaagaaggtgaggattacggattacctcgagtcctgcccctcccctggcaagcctctatgtctgcacgtggagggcatggttgtttgggatgcaatgctgctgctgtttgctgactttgtgttgtgatcaacgtgccgccatgctgtcctccttagtgacttgtgctgtgatcaacgtgccgctatgctgtcctcattagtgactgtgctgtgatcaacgtgccgctatgctgtcctctttagtgacttcactgacttgtgctgtgatcaacgtgctgttatgttgtcctctttagtggagtgctaggtagaagggagtattgaacaagttatgttgtgtggcacgacacaggtggtgatcagtgagtagagacctagactggagaatggttctattgttgtatatcatctaggtgatgattcaggtgacacggtgtaggcataactggtgacgtgatcagtttcatatgtatcctgtcaaggtcaggggtgcaaaggtttttgatgttactattaatactgcttcccattcttttgctatctctctctctctcttttttggcgttgctagctgttctgttatctagattatcctgtaatgacgatgctgatcatgtagatcttgtttccatcaccaaggttgtctgcactctgcagtccatgggtacattgttcccactactagatgccacttgcaatccgaagttgttgggatgcaatatgtaatacttctttgggcactttaatttgtgaaagcagatgat

SEQ ID NO: 38297 - protein, 114 aa, Zea mays subsp. mays
MGASRKLQGEIDRVLKKVQEGVDVFDSIWNKVYDTENANQKEKFEADLKKEIKKLQRYRDQIKTWIQSSEIKDKKVRITDYLESCPSPGKPLCLHVEGMVVWDAMLLLFADFVL

SEQ ID NO: 38298 - protein, 73 aa, Zea mays subsp. mays
MLLLILLPILLLSLSLSFLALLAVLLSRLSCNDDADHVDLVSITKVVCTLQSMGTLFPLLDATCNPKLLGCNM

SEQ ID NO: 38299 - DNA, 1143 bp, Zea mays subsp. mays
tttttcgacttttactactcgaagttgatgagatttcctggataatcaaagtctcatcccttctctgttccgctcgctgaaaaagctcataacctctaaagcatggagtctctatcctttcctattctaaatcctctgttagcttctggttctagtctttacagaaaacagagctcgaggatgacctcttcaatgtcatcttcagttagtttcgccacaggaagaacatctctgtccactgttcgccgctctagagtaggtgttgttaagatgcaagctgttgatgaagatattgatctgaagcaaatgagagacatggctgctgctaagaagcgttgggatggtttgttaagagaaggaaaggtgaagcttctgacaccaagagaagcaggctatgctattcagctttcaaacaaacctcttctcgatgtccgtccttctagcgagcgtaacaaggcatgggttaaaggctctgactgggttcctatcttcgacaatgaagacaaccttgacgctggaactctttccaaaaaggtcaccagttttgctatgggtggatggtggagtggtacacctattttgtctttcaataagctcttcttgtcaaaggttgaggagaaattcccaaaagaaacagagctgatcgttgcttgccaaaaaggattgagatccttagctgcttgtgagctacttattaatgctggatatcagaatattttctgggtgcaaggcggtttagagtctgctgaagacgaggatctagtcacagaaggttctcagccgttgaagcttgctgggattggggggttttctgagttcctcggttggacagaccaacaaagagctcaagctgcgaaagaaggttgggggtaccgtttagtatttactgctcgtctgtttagggtaattctggctgcggatgccttgttccttggtgctcagcaacttggtcattatattcaggagttaagaggtcactaggactctctctgtaaccaaagctccgtgtggttgtactgcttctcttcacaaaaaaaactgtaaatttctgttgaagattgtagtttttgagatagagtagttgaaattgagatactgaaaaagaaaaatctttaaattttggaaaatcttcagtttctgttg

SEQ ID NO: 38300 - protein, 292 aa, Zea mays subsp. mays
MESLSFPILNPLLASGSSLYRKQSSRMTSSMSSSVSFATGRTSLSTVRRSRVGVVKMQAVDEDIDLKQMRDMAAAKKRWDGLLREGKVKLLTPREAGYAIQLSNKPLLDVRPSSERNKAWVKGSDWVPIFDNEDNLDAGTLSKKVTSFAMGGWWSGTPILSFNKLFLSKVEEKFPKETELIVACQKGLRSLAACELLINAGYQNIFWVQGGLESAEDEDLVTEGSQPLKLAGIGGFSEFLGWTDQQRAQAAKEGWGYRLVFTARLFRVILAADALFLGAQQLGHYIQELRGH

SEQ ID NO: 38301 - protein, 266 aa, Zea mays subsp. mays
MTSSMSSSVSFATGRTSLSTVRRSRVGVVKMQAVDEDIDLKQMRDMAAAKKRWDGLLREGKVKLLTPREAGYAIQLSNKPLLDVRPSSERNKAWVKGSDWVPIFDNEDNLDAGTLSKKVTSFAMGGWWSGTPILSFNKLFLSKVEEKFPKETELIVACQKGLRSLAACELLINAGYQNIFWVQGGLESAEDEDLVTEGSQPLKLAGIGGFSEFLGWTDQQRAQAAKEGWGYRLVFTARLFRVILAADALFLGAQQLGHYIQELRGH

SEQ ID NO: 38302 - protein, 262 aa, Zea mays subsp. mays
MSSSVSFATGRTSLSTVRRSRVGVVKMQAVDEDIDLKQMRDMAAAKKRWDGLLREGKVKLLTPREAGYAIQLSNKPLLDVRPSSERNKAWVKGSDWVPIFDNEDNLDAGTLSKKVTSFAMGGWWSGTPILSFNKLFLSKVEEKFPKETELIVACQKGLRSLAACELLINAGYQNIFWVQGGLESAEDEDLVTEGSQPLKLAGIGGFSEFLGWTDQQRAQAAKEGWGYRLVFTARLFRVILAADALFLGAQQLGHYIQELRGH

SEQ ID NO: 38303 - DNA, 982 bp, Zea mays subsp. mays
aattatcacaccactctctccctctcctcctttatattttagttatggccaagattggtttgaaacccgatccagttaacaataatgccaaggagattcgttacagaggcgttaggaagaggccatggggccgttatgccgcggagatccgagatccgggtaagaaaacccgggtctggcttggtactttcgataccgccgaagaggcggcgcgtgcttacgatgcggcggcgcgtgatttccgaggggccaaggctaagaccaatttccccaattttctcgagctgagtgagaagatgccggctgccggcggcggtttcgagcgtagcccaagccagagcagcacccttgactgcgattctcctccggcggcggttacgccggcgagtgctgggattgttccgccgcagctcgagcttcgcctcggcggctatcagatcccgatggcgcgtcctatttactttttggacgttatgggagtaggcaacggaggtcgtgctcagcctccggtggcgtcagcttttaggtcgccggtggcttgtgtggctcagagcgactctgattcgtcgtcggttgttgatttcgaaggtgtgatggagaagagatctcagctgtttgatctagatctaaacttgtctcctccgtcggaacaggcctgaacttatcgaaggtggtcgtggtcgtgttcatttccgacgcgcatgcgttttttttttgtttgggagctgagagaattcgtattctcgttagttttttattctctctcactctagaataattattattatcggtttaaaaaaaaaaagtttatcgggagagagaatataattttagctgacatggatcgttatgtacatattattacataactggagatctgaacttttgttgtgtgcttttttgcgacttggtttcaccttgttgttcctctatctgtagcctttaattttgttattgcaaattttatatcaataatttggtg

SEQ ID NO: 38304 - protein, 218 aa, Zea mays subsp. mays
LSHHSLPLLLYILVMAKIGLKPDPVNNNAKEIRYRGVRKRPWGRYAAEIRDPGKKTRVWLGTFDTAEEAARAYDAAARDFRGAKAKTNFPNFLELSEKMPAAGGGFERSPSQSSTLDCDSPPAAVTPASAGIVPPQLELRLGGYQIPMARPIYFLDVMGVGNGGRAQPPVASAFRSPVACVAQSDSDSSSVVDFEGVMEKRSQLFDLDLNLSPPSEQA

SEQ ID NO: 38305 - protein, 204 aa, Zea mays subsp. mays
MAKIGLKPDPVNNNAKEIRYRGVRKRPWGRYAAEIRDPGKKTRVWLGTFDTAEEAARAYDAAARDFRGAKAKTNFPNFLELSEKMPAAGGGFERSPSQSSTLDCDSPPAAVTPASAGIVPPQLELRLGGYQIPMARPIYFLDVMGVGNGGRAQPPVASAFRSPVACVAQSDSDSSSVVDFEGVMEKRSQLFDLDLNLSPPSEQA

SEQ ID NO: 38306 - protein, 120 aa, Zea mays subsp. mays
MPAAGGGFERSPSQSSTLDCDSPPAAVTPASAGIVPPQLELRLGGYQIPMARPIYFLDVMGVGNGGRAQPPVASAFRSPVACVAQSDSDSSSVVDFEGVMEKRSQLFDLDLNLSPPSEQA

SEQ ID NO: 38307 - DNA, 1303 bp, Zea mays subsp. mays
atcagtttgctttcacagtggagtcggtgctctcttttttttttcttctctctttcttttcacctctcgccggatcccggcgatcttataggaggcaaatctatcagtatcgttattctaggatctctaacaaacaatgaatcgccaccacgatcccaatcctttcgatgaggacgaagaaatcgtcaatcctttttcgaaaggtggtggaagggttcctgctgcatctaggccagttgaatatggtcaaagccttgatgctactgttgatattccattggataatatgaatgactcttcacagaaacagagaaagcttgctgactgggaagctgagctcaggaagaaagaaatggatataaagcgaagagaggaagctattgctaaatttggtgtgcagatagatgataaaaactggccaccgtttttccaatcatacaccatgacattgctaaagagataccagttcatgcacaaaagctgcagtatctggctttcgctagttggttaggtatcgttctgtgtctggtattcaatgtcattgcaacgatggtctgctggattaaaggcggaggtgttaaaatctttttcctggccacaatatatgcattgatcggatgtccactctcttatgtactatggtacaggccactctaccgagccatgaggactgacagtgctttgaagtttggttggtttttcttcacctacttgattcacattggcttttgcatcgttgctgccatcgcccctccaatctttttccatggaaaatcattaacgggtgtgcttgcagcaattgatgtcatctcagacagtttattagctgggatcttttactttatcggattcggtctcttctgcttggagtcactgctgagtctatgggttcttcagaaaatttacctctactttaggggaaacaagtgaaaaggagataaagaggaagatgatggtaattttcccttacgatataaggtctgaaatatgtgtatctcctatgaatgtaattaccattttaccgtttgatgcgttgtgttgattgaggtaaattctttagttactatagtagcaagagagagtggttgttcggccatttctttatgttttttactctgttcttctctggtctgtaatataccaatatcgtctcttagcttttgggattttttttcggcgaagtggatggactatttagacaaaaaaaaatcatagctatgaattattagtaaaaaaaaaaaaaaaaaaaaaaaaaaaaaaaaaaagaaaaaaaaaaaaaaaaaaaactcgagggggggcccgg

SEQ ID NO: 38308 - protein, 126 aa, Zea mays subsp. mays
MVCWIKGGGVKIFFLATIYALIGCPLSYVLWYRPLYRAMRTDSALKFGWFFFTYLIHIGFCIVAAIAPPIFFHGKSLTGVLAAIDVISDSLLAGIFYFIGFGLFCLESLLSLWVLQKIYLYFRGNK

SEQ ID NO: 38309 - protein, 124 aa, Zea mays subsp. mays
MNRHHDPNPFDEDEEIVNPFSKGGGRVPAASRPVEYGQSLDATVDIPLDNMNDSSQKQRKLADWEAELRKKEMDIKRREEAIAKFGVQIDDKNWPPFFQSYTMTLLKRYQFMHKSCSIWLSLVG

SEQ ID NO: 38310 - protein, 88 aa, Zea mays subsp. mays
MRTDSALKFGWFFFTYLIHIGFCIVAAIAPPIFFHGKSLTGVLAAIDVISDSLLAGIFYFIGFGLFCLESLLSLWVLQKIYLYFRGNK

SEQ ID NO: 38311 - DNA, 547 bp, Zea mays subsp. mays
ataccgatttgcagacccatggtgctgacgaagaatgcactccgcattctctacaaatagcttggcaccttgacacctagcttcacctccctcctcctggcccagtcgtcctagccatcaaaattcagttgagggttcttcagttcagccatgaagcttgagatgacagcagcggccatggtcttgatcctgctgacctcgggcgccgaggccaaggtctgctactcgcggagcaggaccttcaaggggtggtgctaccacagcatcaactgcatcgccatctgcatcaccgagggcgacaccagcgggttctgccaggccggggcctgcatgtgcacttatgagtgtctcaatggtgtcgtcgccggtggcggcggtggcggcggacagcatccatcggttggctcatcgcgtggtggtggtgctgaggctaaagcagccgtcccatcagtgtagagcttctgattctggcggggtgatggcagatggtgcactactactcttccgtgcacatgctaactcaaggtttcgagttgatgaataacac

SEQ ID NO: 38312 - protein, 101 aa, Zea mays subsp. mays
MKLEMTAAAMVLILLTSGAEAKVCYSRSRTFKGWCYHSINCIAICITEGDTSGFCQAGACMCTYECLNGVVAGGGGGGGQHPSVGSSRGGGAEAKAAVPSV

SEQ ID NO: 38313 - protein, 97 aa, Zea mays subsp. mays
MTAAAMVLILLTSGAEAKVCYSRSRTFKGWCYHSINCIAICITEGDTSGFCQAGACMCTYECLNGVVAGGGGGGGQHPSVGSSRGGGAEAKAAVPSV

SEQ ID NO: 38314 - protein, 92 aa, Zea mays subsp. mays
MVLILLTSGAEAKVCYSRSRTFKGWCYHSINCIAICITEGDTSGFCQAGACMCTYECLNGVVAGGGGGGGQHPSVGSSRGGGAEAKAAVPSV

SEQ ID NO: 38315 - DNA, 1274 bp, Zea mays subsp. mays
aggctagcccagcgctcggccctcggctccttaaggcttcatcttctcaagttccggccgtccatcgccgccgccggcctcggccggctcagttcctgcctgccagccaaaaattccacaccacccacccagagactgaggcgcgcggtggtgaagacgtgatcgaaagtcgaaaccaaaacgatatatagatggggcgcgggcgcggcaaggtggaggtgcgtcgcatcgagaacagcgtgagccggcaggtgaccttctcgaagcggcggcgcgggctggcgaagaaggcgcgggagctggccgtgctctgcgacgccgacgtcgcgctgctcgtcttctccgacaagggcagtctccacgacttcgccgcgcacggcagcatggagcgaatccttggccgatacgagaggtacttgctatgtgaagatagggacgatgtaacccaagactaccctgaagaatcgcaggggaacatgagctatgaccacatcaagttgaggtccaaactcgaagctataaagaagagccaaaggaatctcatgggggagcagctcgagtccctgacgttcagagaggtacagcagcttgagcaccggatagacagcgctctgaggaacgtcagatccaggaaggaccacatcttgctcaactcgatccaggagctccggaacaaggaaacttttctgatggaacaaaatggcattctagagaaggagaaggctgcagtgggggcatcatcatccctgcacaccaccaccagcaccgcagcagcttcttccacggcagcggcggcggcggcccttccaaacctgaacatctgtcccgacgactccgacgagccaggaatggcggcggcggcggggatcaggttgccgtggtggatgctccagccatctgccgtcagccaacggcaggaacagcactgaactgcttgtcttctcagatgatccacgctgcttgttccagctcgattctagtttctattagaactcgattcagctaaggcgggaatttgtgatctttctattgatctgccgttcttattggttgctagatcgattttatccttgtccttcttagtatctgaacctctgctgtgtcgtttgtcgtagttcttggtcgcaaaagctccggtttgcgtctctagtttggtttggttcctgtaaaatctgctgttgtccttcaatgagctgtgcaggccagttagatgattacttccaaaaaaaaaaaaaaaaaatatcgataccgtcgacctcgagggggggcccggt

SEQ ID NO: 38316 - protein, 245 aa, Zea mays subsp. mays
MGRGRGKVEVRRIENSVSRQVTFSKRRRGLAKKARELAVLCDADVALLVFSDKGSLHDFAAHGSMERILGRYERYLLCEDRDDVTQDYPEESQGNMSYDHIKLRSKLEAIKKSQRNLMGEQLESLTFREVQQLEHRIDSALRNVRSRKDHILLNSIQELRNKETFLMEQNGILEKEKAAVGASSSLHTTTSTAAASSTAAAAAALPNLNICPDDSDEPGMAAAAGIRLPWWMLQPSAVSQRQEQH

SEQ ID NO: 38317 - protein, 181 aa, Zea mays subsp. mays
MERILGRYERYLLCEDRDDVTQDYPEESQGNMSYDHIKLRSKLEAIKKSQRNLMGEQLESLTFREVQQLEHRIDSALRNVRSRKDHILLNSIQELRNKETFLMEQNGILEKEKAAVGASSSLHTTTSTAAASSTAAAAAALPNLNICPDDSDEPGMAAAAGIRLPWWMLQPSAVSQRQEQH

SEQ ID NO: 38318 - protein, 150 aa, Zea mays subsp. mays
MSYDHIKLRSKLEAIKKSQRNLMGEQLESLTFREVQQLEHRIDSALRNVRSRKDHILLNSIQELRNKETFLMEQNGILEKEKAAVGASSSLHTTTSTAAASSTAAAAAALPNLNICPDDSDEPGMAAAAGIRLPWWMLQPSAVSQRQEQH

SEQ ID NO: 38319 - DNA, 1254 bp, Zea mays subsp. mays
ggggaacgtgcaacagaaaaatagttcacccaactttctcctattaatacttctctcttctctcttcctacttctaaccttctttttctccttcatcacacacatatacacacgctttcgtttaaactctctctgtttcaatcattaatcagaaagaagcaacacaaatatggatcacgacaagtctacttcttgttgctgcgttcttgatgcttccacttatgttggtttctggattctcaagaaattgcttagcagaggatactctgttcacgcagcgattcgtagaaacggggagagtgaaattgaggagatgatcagagagatggaaacaacagaagagagattagtggtgtacgatgtagatgtgttggattatcaaagcatacttgtctctctcaagacatgtaacgttgtcttctgttgcttagacagccctgaagggtacgatgagaaggaggtggatttggaagtgagaggagtgatcaatgtggtggaagcgtgtggaagaacagagagtatagagaagattgtgttttcttcttcattaacagcttcaatttggagagacaacattggaactcaaaaggatgttgatgagaagtgttggagtgaccaagacttctgtcgcagcaagaagttgtggcatgcactggaaagatgttgtcggagaaagcagcttgggcattagccatggaccgtaggctcaacatggtctctatcaaccctggtcttgtcgtcggaccatctgtcgcacaacacaacgctaggcccaccatgtcataccttaaaggagctgcacaaatgtatgagaatggtgtgttagcttatgtagacgttaagtttctagcggacgttcatattagagcattcgaggatgtttcagcttgcggtcgatacttctgcttcaaccaaatcgtcaacacagaagaagaagctctcaagctagtggagagtttgtctcctttgattcctatgccaccgaggtatgagaatgagatgcacggaagtgaagtttacgaagaaagattaaggaacaacaaattaagcaagctggtagaagctggctctgcttgttaaagaaagatttcacaatttaaattgaaagagacgagattatacaaaaaaaagttgtaatttgtatattgatcttctcatagatgcatgtgttgcttgtgaactattaaaaagaaagaaaaaaaacacatttcatctcaaaaaaaaaaaaaaaaaaaactcgagggggggcccggt

SEQ ID NO: 38320 - protein, 173 aa, Zea mays subsp. mays
MDHDKSTSCCCVLDASTYVGFWILKKLLSRGYSVHAAIRRNGESEIEEMIREMETTEERLVVYDVDVLDYQSILVSLKTCNVVFCCLDSPEGYDEKEVDLEVRGVINVVEACGRTESIEKIVFSSSLTASIWRDNIGTQKDVDEKCWSDQDFCRSKKLWHALERCCRRKQLGH

SEQ ID NO: 38321 - protein, 139 aa, Zea mays subsp. mays
MLSEKAAWALAMDRRLNMVSINPGLVVGPSVAQHNARPTMSYLKGAAQMYENGVLAYVDVKFLADVHIRAFEDVSACGRYFCFNQIVNTEEEALKLVESLSPLIPMPPRYENEMHGSEVYEERLRNNKLSKLVEAGSAC

SEQ ID NO: 38322 - protein, 128 aa, Zea mays subsp. mays
MDRRLNMVSINPGLVVGPSVAQHNARPTMSYLKGAAQMYENGVLAYVDVKFLADVHIRAFEDVSACGRYFCFNQIVNTEEEALKLVESLSPLIPMPPRYENEMHGSEVYEERLRNNKLSKLVEAGSAC

SEQ ID NO: 38323 - DNA, 999 bp, Zea mays subsp. mays
acccatcacacgacaaaatccctcaccctcgtgagtcctgacgtcctcgcccgtgctcgcagttggtagggttctagccatggcgtggagcgccgccgccgtctccaggttcgcagccgcctccccacccgcggctagaacccgaccaactgctgaaacacgtgcaattctggacctcagtgtccagtattggacaagtagagggtgggcatatgtcgatgtcaactatggaggaagcactggttatggaagagagtatcgggagagactattgaacaaatggggtattgttgatgttgatgattgctgcggctgtgcgagattcctggtggagagtgggaaagtagatgggcagcgcctttgtattactggtagatcagcaggtggatacactactttagcttcacttgcattcagagacacgttcaaggctggagcttctctctatggtgttggggacttgactctgttgagagcggagacgcacaaatttgagtctcattatatggacaatcttgtaggaaatgaaagagcttactacgagagatcaccaatcaactttgtcaaccagtttacttgtccagtcattttgtttcaagggttggaggataaggttgtgccaccagatcaggcacgcaaaatatacagtgccttgaaagagaaaggtttgcctgttgctttggttgaatatgaaggagagcagcatgggttccgtaaggcggagaacatcaagttcacctagatctctctgatctggtctgttctgccctccctccgtcatcgtcgactccccctgcgtccgttcctttggatctgaataagatggtggtgatctgagtggtggtcttagtttatcatgtatcgctcgcagtttaatttagcggtttaggtgtggatctgtgaaccccatggcgcctctgcttgattcgtgtttcacctgttatgttctgagattcatgataatgctatgagaactgaaattcccgtttcatgcttctc

SEQ ID NO: 38324 - protein, 220 aa, Zea mays subsp. mays
MAWSAAAVSRFAAASPPAARTRPTAETRAILDLSVQYWTSRGWAYVDVNYGGSTGYGREYRERLLNKWGIVDVDDCCGCARFLVESGKVDGQRLCITGRSAGGYTTLASLAFRDTFKAGASLYGVGDLTLLRAETHKFESHYMDNLVGNERAYYERSPINFVNQFTCPVILFQGLEDKVVPPDQARKIYSALKEKGLPVALVEYEGEQHGFRKAENIKFT

SEQ ID NO: 38325 - DNA, 889 bp, Zea mays subsp. mays
atcgaaaataagcacaagcacaagcagctaaagcaatctcagtggtcttcaaaacacacacacacacacaaaacatcgatcgaggtagttagagatggccggacgagatgacctgaagctgctcggcacatggccaagcccgtttgttaccagggtgaagctggcactcgccctgaagggcctgagctacgaggacgtggaggaggacctgtacaagaagagcgagcttctcctcaagtccaacccggtgcacaagaagataccagtgctcatccacaacggcgccccggtctgcgagtccatgatcattctgcagtacatcgacgaagtgttcgccggcaccggcccgtcccttctcccagcggacccctacgagcgcgccattgctcgcttctggatggcctacgttgacgacaagctggtagccccatggaggcagtggttgaggggcaagacagaggaggagaaatccgagggaaagaagcaggcgttcgcggcggtgagattcttgaaggggccctgagggaatgctccaagggagggggcttcttcggcggcgacggcctcgggctcgtcgacgttgcgctgggaggcgttctgtcgtggatgaaggtgaccgaggtgttgtccggtgacaagatcttcgatgccgccaagaccccgctcctggccgcatgggtggagcgcttcagcgagctcgacgcggccaaggtgtccctgccagacgtgggcaggctgcttgagttcgccaaggcacgagaggctgccgctgcaccgtctaactgagccagcacacatccagaataactaaaatttgctatttttaaatgttgtttgtttggctgcttgatgtaataatgtagcagtaactcatgtcatccatttattc

SEQ ID NO: 38326 - protein, 142 aa, Zea mays subsp. mays
MAGRDDLKLLGTWPSPFVTRVKLALALKGLSYEDVEEDLYKKSELLLKSNPVHKKIPVLIHNGAPVCESMIILQYIDEVFAGTGPSLLPADPYERAIARFWMAYVDDKLVAPWRQWLRGKTEEEKSEGKKQAFAAVRFLKGP

SEQ ID NO: 38327 - protein, 118 aa, Zea mays subsp. mays
MEAVVEGQDRGGEIRGKEAGVRGGEILEGALRECSKGGGFFGGDGLGLVDVALGGVLSWMKVTEVLSGDKIFDAAKTPLLAAWVERFSELDAAKVSLPDVGRLLEFAKAREAAAAPSN

SEQ ID NO: 38328 - protein, 93 aa, Zea mays subsp. mays
MAKPVCYQGEAGTRPEGPELRGRGGGPVQEERASPQVQPGAQEDTSAHPQRRPGLRVHDHSAVHRRSVRRHRPVPSPSGPLRARHCSLLDGLR

SEQ ID NO: 38329 - DNA, 528 bp, Zea mays subsp. mays
aaacagcctccaggtctagctagggtttcgtctccgccgcttgctctaatcctctcccggcacgcgacacgtgagggcgcagcgtttatggcggcgacaccggcggacgcgaagaccgaggccgccaagatggacctcctcgaggacgacgacgagttcgaagagttcgagatcgaccaagaatgggatgagaaggaagaaggcaatgaagctgtccagcagtgggaggatgattgggatgacgatgatgtgaatgatgatttctcgctgcagctgaggaaagaactggagggaagcaacgcccagaagagctgaagtaaataacagcttattctggttagtttggctatgtgaatacacatgtggtttgcgagtgaggatgcttggttggttactaacgtagtgtcagttgagagtaaggcttaagatttgggtggtaatgacgataatgctggtttgtagctatgtacaggatgctagggtatgcttgctttgtcttgtcaagttatgggggaacgttggattgcc

SEQ ID NO: 38330 - protein, 104 aa, Zea mays subsp. mays
KQPPGLARVSSPPLALILSRHATREGAAFMAATPADAKTEAAKMDLLEDDDEFEEFEIDQEWDEKEEGNEAVQQWEDDWDDDDVNDDFSLQLRKELEGSNAQKS

SEQ ID NO: 38331 - protein, 75 aa, Zea mays subsp. mays
MAATPADAKTEAAKMDLLEDDDEFEEFEIDQEWDEKEEGNEAVQQWEDDWDDDDVNDDFSLQLRKELEGSNAQKS

SEQ ID NO: 38332 - protein, 61 aa, Zea mays subsp. mays
MDLLEDDDEFEEFEIDQEWDEKEEGNEAVQQWEDDWDDDDVNDDFSLQLRKELEGSNAQKS

SEQ ID NO: 38333 - DNA, 662 bp, Zea mays subsp. mays
  misc_feature (576)..(576): n is a, c, g, or t
aggccagttaaaatctctttcaccatgaagataaagattatgagcaaaacacatgtgaaaccaacaaaaccagtactagggaagaaacaattccacctcaccacatttgatcttccttaccttgctttctactacaaccagaagtttctactctacaagttccagaaccttctagatctcgaggaacccacattccaaaacgaggtcgtggagaatctcaaagatggtttgggtttggttcttgaagacttctatcaactcgccggtaagctggccaaggacgatgaaggagtcttccgtgttgagtacgacgctgaagactcagagatcaacggcgtagagttctccgtcgctcatgctgctcacgtaaccgtcgatgatctaacggctgaggacgggacggctaagttcaaggagttggttccttacaatgggatcttgaacttggaagaacttagcagaccactccttgctgtccaggtgaccaagctaaaagatgggcttgcaatgggcctagctttcaatcacgcagtcttagacgggacatccacgtggcatttcatgagctcatgggcngagatctgtcgtggagcccaatccatctcgacccaacctttccttgaccgatcgaaggcgcgtgacacgcgcgtgaagctcgatct

SEQ ID NO: 38334 - protein, 220 aa, Zea mays subsp. mays
  misc_feature (192)..(192): Xaa can be any naturally occurring amino acid
RPVKISFTMKIKIMSKTHVKPTKPVLGKKQFHLTTFDLPYLAFYYNQKFLLYKFQNLLDLEEPTFQNEVVENLKDGLGLVLEDFYQLAGKLAKDDEGVFRVEYDAEDSEINGVEFSVAHAAHVTVDDLTAEDGTAKFKELVPYNGILNLEELSRPLLAVQVTKLKDGLAMGLAFNHAVLDGTSTWHFMSSWXEICRGAQSISTQPFLDRSKARDTRVKLD

SEQ ID NO: 38335 - protein, 212 aa, Zea mays subsp. mays
  misc_feature (184)..(184): Xaa can be any naturally occurring amino acid
MKIKIMSKTHVKPTKPVLGKKQFHLTTFDLPYLAFYYNQKFLLYKFQNLLDLEEPTFQNEVVENLKDGLGLVLEDFYQLAGKLAKDDEGVFRVEYDAEDSEINGVEFSVAHAAHVTVDDLTAEDGTAKFKELVPYNGILNLEELSRPLLAVQVTKLKDGLAMGLAFNHAVLDGTSTWHFMSSWXEICRGAQSISTQPFLDRSKARDTRVKLD

SEQ ID NO: 38336 - protein, 207 aa, Zea mays subsp. mays
  misc_feature (179)..(179): Xaa can be any naturally occurring amino acid
MSKTHVKPTKPVLGKKQFHLTTFDLPYLAFYYNQKFLLYKFQNLLDLEEPTFQNEVVENLKDGLGLVLEDFYQLAGKLAKDDEGVFRVEYDAEDSEINGVEFSVAHAAHVTVDDLTAEDGTAKFKELVPYNGILNLEELSRPLLAVQVTKLKDGLAMGLAFNHAVLDGTSTWHFMSSWXEICRGAQSISTQPFLDRSKARDTRVKLD

SEQ ID NO: 38337 - DNA, 1761 bp, Zea mays subsp. mays
  misc_feature (1593)..(1595): n is a, c, g, or t
ccccccccccccccaataataagagccttgataagcacctttctgatatggctgcagcagttccagaaccacaagtgggtgatctcaccaatttgttcatttaaatgttcctatacagctgaatctcatggggttgagtggcatatcagatatgagataatcaaaggaatttgccatggtttgcattaccttcacacagattgccaaattgtccatttggacctaaagcctgagaatatattgctagatgacaacatggagccaaaaattacagattttggtatgtccaggctctttggtctacaacaatccaaaatcatcaccaaaacttgtggaggaacacttggatacatggcaccagaatacttactaaaagggttgatttcagtgaaggccgacatattcagtttgggcgttataatcatagaggtgatgaccggaggccggaattatcccacttgtgaaaaatcttgcgagcaattcgctgttgatgtggttggacgttggaggaagaggttattggaggaggcaggaaggtacacacccttggaaaaatacgttgagcaagtagagacatgcatcttgataggattgatgtgtgtcgatgatgatcctaacaaaaggcccacgacattggacattatcgaaaggcttaccaaagtagatgtcacgaacacggacagagggccacccaaaactctggaggccgcgacagggcttacaggccaccccaacctcgcaactagatcatttcttgacaggttccgccgaaccatcgtgatagggatgctgaagaaggccctgaaaatccaggacgtatcgcagttggagcagctcctggccaaggaggtgctgctggagctccacaaaatcggcacgaatgcaactggaaacagatcgttcctggagaggctccacgcaagcatcaccatggctacgctggttcaggcgctgcattccttggacttggatccatcggcggcgctgcgtatggaggtgctgttcttggcgctggagaatatgcgtggaaaaaacaactcaaggcgaagaagcgaggacgtccttgagctggaggagcggccagagcagatccggtcggtgctggaggctggcaccagggccaggctcagtgatgaggaacacatgccgtcggtgtctgtgcaggctgaagaccaggcctttcccaaaccgaagttggccaaagtacgcgccaccgccccggtgtgcgtgtcagcagtgtggttggcggccggcataggattcctgtgtggattcaccctaggagagatgaggggattaaggcggacgagggtccacgaacgcacgtgatgccaatgtgcccacatgacatggccagaaaatgtcactgcggtggaccatgcatgcacgaattaaggagcaccagttagaatacgtattctagattcattttacaaattctgtatttaaaaggaacttgtgcattgtgacagaggcggcggactggatcaggttgtattgtttctgctggtgtcctggcgtatgtataagccacggagtgtatcggatgaaattgaacagagaaatgtgcaatatagaaccgtgttgagggcnnnaaaaaaaaaaaaaaaaaaaaaaaaaaaaaaaaaaaaaaaaaaaaaaaaaaaaaaaaaaaaaaaaaaaaaaaaaaaaaaaaaaaaaaaaaaaaaaaaaaaaaaccccgggggggggcccggaacccaattcccccaaaaggggggcgaaaaaaaattcccggggcgg

SEQ ID NO: 38338 - protein, 442 aa, Zea mays subsp. mays
PPPPPIIRALISTFLIWLQQFQNHKWVISPICSFKCSYTAESHGVEWHIRYEIIKGICHGLHYLHTDCQIVHLDLKPENILLDDNMEPKITDFGMSRLFGLQQSKIITKTCGGTLGYMAPEYLLKGLISVKADIFSLGVIIIEVMTGGRNYPTCEKSCEQFAVDVVGRWRKRLLEEAGRYTPLEKYVEQVETCILIGLMCVDDDPNKRPTTLDIIERLTKVDVTNTDRGPPKTLEAATGLTGHPNLATRSFLDRFRRTIVIGMLKKALKIQDVSQLEQLLAKEVLLELHKIGTNATGNRSFLERLHASITMATLVQALHSLDLDPSAALRMEVLFLALENMRGKNNSRRRSEDVLELEERPEQIRSVLEAGTRARLSDEEHMPSVSVQAEDQAFPKPKLAKVRATAPVCVSAVWLAAGIGFLCGFTLGEMRGLRRTRVHERT

SEQ ID NO: 38339 - protein, 357 aa, Zea mays subsp. mays
MEPKITDFGMSRLFGLQQSKIITKTCGGTLGYMAPEYLLKGLISVKADIFSLGVIIIEVMTGGRNYPTCEKSCEQFAVDVVGRWRKRLLEEAGRYTPLEKYVEQVETCILIGLMCVDDDPNKRPTTLDIIERLTKVDVTNTDRGPPKTLEAATGLTGHPNLATRSFLDRFRRTIVIGMLKKALKIQDVSQLEQLLAKEVLLELHKIGTNATGNRSFLERLHASITMATLVQALHSLDLDPSAALRMEVLFLALENMRGKNNSRRRSEDVLELEERPEQIRSVLEAGTRARLSDEEHMPSVSVQAEDQAFPKPKLAKVRATAPVCVSAVWLAAGIGFLCGFTLGEMRGLRRTRVHERT

SEQ ID NO: 38340 - protein, 348 aa, Zea mays subsp. mays
MSRLFGLQQSKIITKTCGGTLGYMAPEYLLKGLISVKADIFSLGVIIIEVMTGGRNYPTCEKSCEQFAVDVVGRWRKRLLEEAGRYTPLEKYVEQVETCILIGLMCVDDDPNKRPTTLDIIERLTKVDVTNTDRGPPKTLEAATGLTGHPNLATRSFLDRFRRTIVIGMLKKALKIQDVSQLEQLLAKEVLLELHKIGTNATGNRSFLERLHASITMATLVQALHSLDLDPSAALRMEVLFLALENMRGKNNSRRRSEDVLELEERPEQIRSVLEAGTRARLSDEEHMPSVSVQAEDQAFPKPKLAKVRATAPVCVSAVWLAAGIGFLCGFTLGEMRGLRRTRVHERT

SEQ ID NO: 38341 - DNA, 823 bp, Zea mays subsp. mays
aggaaatgacgaaggcagagggcgtccaggtccgctcggtaaccgtttcccgcgcgcccggccccgactccggggtaaagagccccggagcggagcagcgctggccgcgtgccgcctccggagccggcagcccccatggctgggggttatggagtgatgggtgacgatggttctattgattatactgttcacgaagcctggaatgaagccaccaatgtttacttgatagttatccttgttagcttcggtctcttcatgtatgccaaaaggaacaaaaggagaattatgaggatattcagtgtgccacctacagaggaaactttgtcagagcccaacttttatgacacgataagcaagattcgtttaagacaacaactggaaatgtattccatttcaagaaagtacgactatcagcagccacaaaaccaagctgacagtgtgcaactctcattggaatgaaacctcagaaaaagagcaacagaagtaattgtttcaagctcctgattctttctactaaatcatgaacagctttaaaaacatttctgtctgcataaaattattttacttgtaacttttccccaattgttctgtgcattgttttgcctttttaaattaaatctccaagtggctcaaaaggccttgacacagggaacctgcacatatccaggatatgtgtaaccagcgatggtgacttgaccttgccaagacctgtgattccttcaggatacaatcagtgagaaataaaaacacatcttgggaagtgggaatcctggagtttatgccatttgcaatattaaaaaataaaaatgcaagttattatttc

SEQ ID NO: 38342 - protein, 107 aa, Zea mays subsp. mays
MAGGYGVMGDDGSIDYTVHEAWNEATNVYLIVILVSFGLFMYAKRNKRRIMRIFSVPPTEETLSEPNFYDTISKIRLRQQLEMYSISRKYDYQQPQNQADSVQLSLE

SEQ ID NO: 38343 - protein, 100 aa, Zea mays subsp. mays
MGDDGSIDYTVHEAWNEATNVYLIVILVSFGLFMYAKRNKRRIMRIFSVPPTEETLSEPNFYDTISKIRLRQQLEMYSISRKYDYQQPQNQADSVQLSLE

SEQ ID NO: 38344 - protein, 67 aa, Zea mays subsp. mays
MYAKRNKRRIMRIFSVPPTEETLSEPNFYDTISKIRLRQQLEMYSISRKYDYQQPQNQADSVQLSLE

SEQ ID NO: 38345 - DNA, 2643 bp, Zea mays subsp. mays
ggccgcgggaattcgattgtcacagaacagttggctgctcacaatggggacactttcaatgtccgacgccagccctatccctgccaagaactgggatgcttcccctgtcaagctcgaggctcaaggtggtgacgccatcctcggcatgaaggaggaagagcgactactggagctcgtgaaggatgagcaggctgatggaatcttggattcattaccaattgacctggaggccaagaatggcgatgcatcactcataactgaagccatgaaaaaggaggaggagcagcttgaagacacccggatcaaggtgcaggaagaagaggaagccaggaagagggaagaggctgctagacttgcttttgatcctgagacacagtataacaagttagatgagctgctgacaaagacacaactcttttcggagtttctacttgagaacatggatcggattgccgatgaaagtgttgaaactcaagctgaacagccacaggtagaagagaagaagaaagggcgcggccggaagaggaaagcaaagccacagtacaatgataagaaggctaagacggcagtggctgccatgctcacaagatctcgcgaagaacgtcttgcggaagattctactctctcagaagaagaaaggtgggaaaaggagcaggctaatcttgtgccgttattgactggtggaaagttgaagtcatatcagataaagggtgtcaagtggcttatatcattgtggcagaatgggctgaatggaatactggctgatcaaatgggccttgggaaaaccatccagacaattggatttcttgctcatctgaaagggaaaggcatgcatggtccatacttaataatcgctcctctgtccactctctcaaactgggtgaatgaaatctcaaggtttactccatctctggttagtatcatataccatggaggtaaggctgcccgggcagagatccgaaggaaatttatgcccacaaatgttggccctgattttccgatagtagtgacttcatatgagatggccatgtttgatgctaaatttcttgctgcctataagtggaagtatgttgttgtggatgaggggcatcgtctgaaaaatgctaagtgtctattattgaagcagctgaagcgcataccaatggataataagctccttttgactggaacacccttgcagaataatcttgcagagctctggtcactattgaacttcattttgcctgatatattctcgtcacatcaagagtttgagtcatggtttgatttttctggtggaaatgaagaaactgatgagaagaaaaggctgcatgttgtttcaaagcttcacgctatcttgcgtccattccttctaaggcgtatgaaggaggatgtggaacagatgcttccacgaaagaaagagataatcatatatgccaacatgactgagcaacagaagcaaatccagcatcacctgatcgaaaaaacatttgacaactacttgcacgaggaatcagatattatattgaaaagacctggcattagggcaaggttgcataatctaatgattcagctgaggaagaattgcaaccatcctgatcttttggaatctccagttgattcaactggtttatatccacctgttgagaagctcctggaacagtgtggtaaattccaactttttgacaggttgctaaatttcctgatggcgcaaaagcacaaggttcttgtattctcgcagtggacaaaggtgctggacattattgaatattaccttgattcaaaaggccatgctgtttgccgaatcgatggtaatgtgaaactggaagaaaggaggaggcagatagcagaattcaatgacgtgaatagcagcatgcgtatcttcctcctgagcacaagggctggtgggcttggcatcaaccttactgctgctgacacctgtatcctctacgacagcgactggaaccctcagatggatttgcaggccatggaccgatgccaccggatcggccaaacacgcccagtgcatgtgtataggctggctacgtcacactccgttgaggggcggatgatcaagagagcctttgggaagctgaagctggagcacgtggtgatcggcaagggacagttcgagcaagacagagctaagccgagcgccttagatgaaggtgagctgctggcgcttctcaaggacgagcagaccgaggaggacaggatcgtccagaccgacatcagcaacgaggacctccagaggctgatggaccggagcgacctgatgggcccgccgcctggcgctggcggcgcaaacgcggcctcgcctcttgtaccgctgaaagggccgggctgggaggtggtggtgccggccaagagtggcggcggcatgctgtcgtcgctcaccagctgagccgtcgtggctgcggggatctgttgtgcttttggttggtcgcacgcactcagttttggtttgcccccccactggtgctggtggttttggtggcagccgttgcgctgctcaggcgatggctgttgaactggggcgttgcccctgcagaagtagcttttagtttaggatcagcaacaaaacaagcaggactctaggccatgtgtggtcgactcttcgtacggaggccgttgcgttagattacgtgggtgggttatggggcg

SEQ ID NO: 38346 - protein, 793 aa, Zea mays subsp. mays
AAGIRLSQNSWLLTMGTLSMSDASPIPAKNWDASPVKLEAQGGDAILGMKEEERLLELVKDEQADGILDSLPIDLEAKNGDASLITEAMKKEEEQLEDTRIKVQEEEEARKREEAARLAFDPETQYNKLDELLTKTQLFSEFLLENMDRIADESVETQAEQPQVEEKKKGRGRKRKAKPQYNDKKAKTAVAAMLTRSREERLAEDSTLSEEERWEKEQANLVPLLTGGKLKSYQIKGVKWLISLWQNGLNGILADQMGLGKTIQTIGFLAHLKGKGMHGPYLIIAPLSTLSNWVNEISRFTPSLVSIIYHGGKAARAEIRRKFMPTNVGPDFPIVVTSYEMAMFDAKFLAAYKWKYVVVDEGHRLKNAKCLLLKQLKRIPMDNKLLLTGTPLQNNLAELWSLLNFILPDIFSSHQEFESWFDFSGGNEETDEKKRLHVVSKLHAILRPFLLRRMKEDVEQMLPRKKEIIIYANMTEQQKQIQHHLIEKTFDNYLHEESDIILKRPGIRARLHNLMIQLRKNCNHPDLLESPVDSTGLYPPVEKLLEQCGKFQLFDRLLNFLMAQKHKVLVFSQWTKVLDIIEYYLDSKGHAVCRIDGNVKLEERRRQIAEFNDVNSSMRIFLLSTRAGGLGINLTAADTCILYDSDWNPQMDLQAMDRCHRIGQTRPVHVYRLATSHSVEGRMIKRAFGKLKLEHVVIGKGQFEQDRAKPSALDEGELLALLKDEQTEEDRIVQTDISNEDLQRLMDRSDLMGPPPGAGGANAASPLVPLKGPGWEVVVPAKSGGGMLSSLTS

SEQ ID NO: 38347 - protein, 779 aa, Zea mays subsp. mays
MGTLSMSDASPIPAKNWDASPVKLEAQGGDAILGMKEEERLLELVKDEQADGILDSLPIDLEAKNGDASLITEAMKKEEEQLEDTRIKVQEEEEARKREEAARLAFDPETQYNKLDELLTKTQLFSEFLLENMDRIADESVETQAEQPQVEEKKKGRGRKRKAKPQYNDKKAKTAVAAMLTRSREERLAEDSTLSEEERWEKEQANLVPLLTGGKLKSYQIKGVKWLISLWQNGLNGILADQMGLGKTIQTIGFLAHLKGKGMHGPYLIIAPLSTLSNWVNEISRFTPSLVSIIYHGGKAARAEIRRKFMPTNVGPDFPIVVTSYEMAMFDAKFLAAYKWKYVVVDEGHRLKNAKCLLLKQLKRIPMDNKLLLTGTPLQNNLAELWSLLNFILPDIFSSHQEFESWFDFSGGNEETDEKKRLHVVSKLHAILRPFLLRRMKEDVEQMLPRKKEIIIYANMTEQQKQIQHHLIEKTFDNYLHEESDIILKRPGIRARLHNLMIQLRKNCNHPDLLESPVDSTGLYPPVEKLLEQCGKFQLFDRLLNFLMAQKHKVLVFSQWTKVLDIIEYYLDSKGHAVCRIDGNVKLEERRRQIAEFNDVNSSMRIFLLSTRAGGLGINLTAADTCILYDSDWNPQMDLQAMDRCHRIGQTRPVHVYRLATSHSVEGRMIKRAFGKLKLEHVVIGKGQFEQDRAKPSALDEGELLALLKDEQTEEDRIVQTDISNEDLQRLMDRSDLMGPPPGAGGANAASPLVPLKGPGWEVVVPAKSGGGMLSSLTS

SEQ ID NO: 38348 - protein, 774 aa, Zea mays subsp. mays
MSDASPIPAKNWDASPVKLEAQGGDAILGMKEEERLLELVKDEQADGILDSLPIDLEAKNGDASLITEAMKKEEEQLEDTRIKVQEEEEARKREEAARLAFDPETQYNKLDELLTKTQLFSEFLLENMDRIADESVETQAEQPQVEEKKKGRGRKRKAKPQYNDKKAKTAVAAMLTRSREERLAEDSTLSEEERWEKEQANLVPLLTGGKLKSYQIKGVKWLISLWQNGLNGILADQMGLGKTIQTIGFLAHLKGKGMHGPYLIIAPLSTLSNWVNEISRFTPSLVSIIYHGGKAARAEIRRKFMPTNVGPDFPIVVTSYEMAMFDAKFLAAYKWKYVVVDEGHRLKNAKCLLLKQLKRIPMDNKLLLTGTPLQNNLAELWSLLNFILPDIFSSHQEFESWFDFSGGNEETDEKKRLHVVSKLHAILRPFLLRRMKEDVEQMLPRKKEIIIYANMTEQQKQIQHHLIEKTFDNYLHEESDIILKRPGIRARLHNLMIQLRKNCNHPDLLESPVDSTGLYPPVEKLLEQCGKFQLFDRLLNFLMAQKHKVLVFSQWTKVLDIIEYYLDSKGHAVCRIDGNVKLEERRRQIAEFNDVNSSMRIFLLSTRAGGLGINLTAADTCILYDSDWNPQMDLQAMDRCHRIGQTRPVHVYRLATSHSVEGRMIKRAFGKLKLEHVVIGKGQFEQDRAKPSALDEGELLALLKDEQTEEDRIVQTDISNEDLQRLMDRSDLMGPPPGAGGANAASPLVPLKGPGWEVVVPAKSGGGMLSSLTS

SEQ ID NO: 38349 - DNA, 729 bp, Zea mays subsp. mays
agattaattcctgctggtgaaaccgaatttgccaaggatgcagtttttggctataaatcttccaatctcagacagtgggttgaagagaagaccaaaggacgggtttaggagaaccaagtttcaacaatttccataactctcttgcgtaaacaaggaccaactgctgtttgtgagcatctctgtagcttggagaagggctctgtgtgcatcgtcaatgctgctagtgacagggacatggctgtctttgcttctggaatgatccaggctgaattgaaaggaaagcgatttctctgccgcacagctgcaagttttgtgagcgcaaggattgggatcaagccaaagccacctatctgtccaaatgaccttggcttaaaaagagctttaactggaggcctcataattgttggttcatatgtgccaaaaactacaaagcaggttgatgagttgcgatcacagttcgggcaatctcttcgagtcatagaggtgtctgtcgagatggtttcaatgaaatcaatggaggacagagaccaagaaatcagacgaattgttgaactagggaatgcttatatacaatccagaaaagacactctaattctcaccagccgccaactcattactggaaaaactcctgaagaaagcttagaaattaattataaagtgagttcagcactagtggagattgtgagaaggattgatagtaaacctcattatatcattgcaaagggagga

SEQ ID NO: 38350 - protein, 165 aa, Zea mays subsp. mays
MAVFASGMIQAELKGKRFLCRTAASFVSARIGIKPKPPICPNDLGLKRALTGGLIIVGSYVPKTTKQVDELRSQFGQSLRVIEVSVEMVSMKSMEDRDQEIRRIVELGNAYIQSRKDTLILTSRQLITGKTPEESLEINYKVSSALVEIVRRIDSKPHYIIAKGG

SEQ ID NO: 38351 - protein, 158 aa, Zea mays subsp. mays
MIQAELKGKRFLCRTAASFVSARIGIKPKPPICPNDLGLKRALTGGLIIVGSYVPKTTKQVDELRSQFGQSLRVIEVSVEMVSMKSMEDRDQEIRRIVELGNAYIQSRKDTLILTSRQLITGKTPEESLEINYKVSSALVEIVRRIDSKPHYIIAKGG

SEQ ID NO: 38352 - DNA, 1207 bp, Zea mays subsp. mays
aattacaagtataactccattcccctccgtcctcccgcatcaactcgaaccgaagggacgaccgagcggagtctagactcgagagcaacctcgacctcccggatctctctcccacccacgcctcgtcggcgccgtcgtctgctgcagcgatggcctcccccgacctgctcttcaatctgcggaacctcttctacctgggcgcctaccaggcagccatcaacaacagcgacgtcccgggcctcgacgccgacgccgccgctgagcgcgacgccatcgtcttccgctcctacatcgccctcggctcctaccagctggtgatcagcgagatcgactcgtcggccgctacctcgctgcaggccgtgaagctgctcgcgctgtacctcactggagacaaggaaggtgctatctccagtctcaaggaatggttgagtgattcagcaattggaagcaatcctgttctgcgattgattgccggaattatatttatgcatgagcaggactacaatgaggctctcaagcacacacactctggaggaactctggatttgcatgcattgaatgtccagatcttcatcaagatgcatcgttcagactatgctgagaagcaattgaagatcatgcaacaaattgatgaagaccatacacttacacaacttgcaaacgcatggctgggcattgctgttggcggctctaagatccgtgaagcttatctcatattccaagactttgctgaaaagtacccaatgacagggatggttttaaacgggaaggcagtctgctgtatgcacatgggaagctttgaggaggctgagactctgttgcttgaagcgttgaacaaggacgcaaaagatcctgaaactcttgcgaatctaattgtatgtaatctccacttaggcaaaccatcatcacgatacctcagccagctgaagctatcgcatcctgaccatgtgctagttaagaatgcggcagcatcagaagcgaccttcgagagggccctccaagccgttgcttgagctcgacacaccccacccagccagattgcaggaatcagcacattctggtctcttctccaattacgagtgtattaacccagagtatggtggttttggttgcctgtatcgtcgctgttgatgcgactctgccagtcttgtactacaaactgctgtataaacggatatgtcgaatattgaatccttacatctattgc

SEQ ID NO: 38353 - protein, 287 aa, Zea mays subsp. mays
MASPDLLFNLRNLFYLGAYQAAINNSDVPGLDADAAAERDAIVFRSYIALGSYQLVISEIDSSAATSLQAVKLLALYLTGDKEGAISSLKEWLSDSAIGSNPVLRLIAGIIFMHEQDYNEALKHTHSGGTLDLHALNVQIFIKMHRSDYAEKQLKIMQQIDEDHTLTQLANAWLGIAVGGSKIREAYLIFQDFAEKYPMTGMVLNGKAVCCMHMGSFEEAETLLLEALNKDAKDPETLANLIVCNLHLGKPSSRYLSQLKLSHPDHVLVKNAAASEATFERALQAVA

SEQ ID NO: 38354 - protein, 175 aa, Zea mays subsp. mays
MHEQDYNEALKHTHSGGTLDLHALNVQIFIKMHRSDYAEKQLKIMQQIDEDHTLTQLANAWLGIAVGGSKIREAYLIFQDFAEKYPMTGMVLNGKAVCCMHMGSFEEAETLLLEALNKDAKDPETLANLIVCNLHLGKPSSRYLSQLKLSHPDHVLVKNAAASEATFERALQAVA

SEQ ID NO: 38355 - protein, 144 aa, Zea mays subsp. mays
MHRSDYAEKQLKIMQQIDEDHTLTQLANAWLGIAVGGSKIREAYLIFQDFAEKYPMTGMVLNGKAVCCMHMGSFEEAETLLLEALNKDAKDPETLANLIVCNLHLGKPSSRYLSQLKLSHPDHVLVKNAAASEATFERALQAVA

SEQ ID NO: 38356 - DNA, 916 bp, Zea mays subsp. mays
  misc_feature (125)..(125): n is a, c, g, or t
ggttggcgagaaagagcagagggacaccgaaacagagaggagcagaggggagcgacgacaggtcagcggagatggaagcagcggcaggaggagtggaggcggagggggtgatgagggtgctggtngtggacgactcccccgtcgaccgccgggggagtcgtcacgcacgcactcctcatcttatcccccgcctcctccggtcctcccgccgctgttgctcacttctgagtcccgacgcacgagctcccaagagctagccatggcgtccaccaccctctcctccgccttcaccctcctatcccgcccctccacctccccgtgccccgccgcctcgctcccgaggtcctcccacgccgcgccccacatccgccggggccgccgcgccgtcgccgtcgcgtgcaccgccaccgagtcccccaagatcctggagctcggggacgccatcgccgggctcacgctcgaggaggcccgcagcctcgtcgaccacctccaggagcggctcggcgtcaccgccgcggccttcgcgccggccgccgtcgtcgcggcgcccggggcgggcggcggggccgcggccgaggaggaggcccccgtcgagaagacggagttcgacgtgatgatcgaagaggtgcccagcagcgcgcgtatcgccactatcaaggtggtgcgcgcgctcaccagcctcgcgctcaaggaggccaaggaccttatcgagggtctccccaagaaggtcaaggaggccgtcagcaaggacgaggccgaggacgccaagaagcagctcgaggaggtcggcgccaaggtgtctatcgcgtgacactaggtatacgaggactcctttttttttttctttagtttcttttgtttgcatccccaatctcttgtatccccactatcgttcgtaaggaattgctgtttcatg

SEQ ID NO: 38357 - protein, 269 aa, Zea mays subsp. mays
  misc_feature (42)..(42): Xaa can be any naturally occurring amino acid
VGEKEQRDTETERSRGERRQVSGDGSSGRRSGGGGGDEGAGXGRLPRRPPGESSRTHSSSYPPPPPVLPPLLLTSESRRTSSQELAMASTTLSSAFTLLSRPSTSPCPAASLPRSSHAAPHIRRGRRAVAVACTATESPKILELGDAIAGLTLEEARSLVDHLQERLGVTAAAFAPAAVVAAPGAGGGAAAEEEAPVEKTEFDVMIEEVPSSARIATIKVVRALTSLALKEAKDLIEGLPKKVKEAVSKDEAEDAKKQLEEVGAKVSIA

SEQ ID NO: 38358 - protein, 183 aa, Zea mays subsp. mays
MASTTLSSAFTLLSRPSTSPCPAASLPRSSHAAPHIRRGRRAVAVACTATESPKILELGDAIAGLTLEEARSLVDHLQERLGVTAAAFAPAAVVAAPGAGGGAAAEEEAPVEKTEFDVMIEEVPSSARIATIKVVRALTSLALKEAKDLIEGLPKKVKEAVSKDEAEDAKKQLEEVGAKVSIA

SEQ ID NO: 38359 - DNA, 469 bp, Zea mays subsp. mays
aaatttccccgtgctcctctccatccagctctcctcttgctcataccgcgacgctctatctctttcgccgagctcctcgaaaccctaggagcgtgcttgaccggcggcggcgaggtgatggcgatggaccctgacgcggtagcgaaggccttcgtggagcattactaccgaacgttcgacaccaaccgcgcggcgctggttgggctgtaccaggagacctccatgctcaccttcgagggccagaagttccagggcccgtccgccattgccggcaagctcggatctctccctttccaggcctgcgagcatcagatcgtcaccgtcgactgccagccatcgggtccccagggaggcatgctcgtcttcgtctccggttccatacgcaccggcccccgagagcaccccatcaagttctcccaggcattccatttgctgccggccgctgggtccttcttcgtgcagaatgaca

SEQ ID NO: 38360 - protein, 156 aa, Zea mays subsp. mays
KFPRAPLHPALLLLIPRRSISFAELLETLGACLTGGGEVMAMDPDAVAKAFVEHYYRTFDTNRAALVGLYQETSMLTFEGQKFQGPSAIAGKLGSLPFQACEHQIVTVDCQPSGPQGGMLVFVSGSIRTGPREHPIKFSQAFHLLPAAGSFFVQND

SEQ ID NO: 38361 - protein, 117 aa, Zea mays subsp. mays
MAMDPDAVAKAFVEHYYRTFDTNRAALVGLYQETSMLTFEGQKFQGPSAIAGKLGSLPFQACEHQIVTVDCQPSGPQGGMLVFVSGSIRTGPREHPIKFSQAFHLLPAAGSFFVQND

SEQ ID NO: 38362 - protein, 115 aa, Zea mays subsp. mays
MDPDAVAKAFVEHYYRTFDTNRAALVGLYQETSMLTFEGQKFQGPSAIAGKLGSLPFQACEHQIVTVDCQPSGPQGGMLVFVSGSIRTGPREHPIKFSQAFHLLPAAGSFFVQND

SEQ ID NO: 38363 - DNA, 754 bp, Zea mays subsp. mays
cgagaccattacctagaacatcctaatcgaaaaactccgatcctgccctctaataacagcagcagcagccgccatggaaggcagcagcaagaagctccagccgttcctcctcacgctgctgctggtgctctccaccgccgtgacgcccatcctctcgctgtcagtgccagacgacgaggtagcctgcgactgcgacaaacccaaggcgcccaagccgtcgcacccgcccaagaccaagccctcctcaacatcaacctctacctgccactggcgctccagctcctcctcacctgcggcaagacgccgccgccgggctacacctgcaccgtctgatctggactagctggcagcccccggcccatgcgtccatttatccgtgaacatgggttttggagtgagctagcatccagttcatcggtcgtttgaagagagatcgacatgagaggatgtcgtctgcttcgtcgttccaagctgaagaaggcacgccggaggaggaagagagtaacaacggccgggtcgatcagctaacgatggatcgatcattttttccccatatttattgtgttgcgtctgctgtagtttctaattttctagatgtgctttcggtttggtctgtagaccctgcagcttgatttggttaagtttgatttgatgcaagggaaatgggtggcggttgattgctaataattcccgttgatatttgtcatgcgtacgtgaacttgataacaaaatgcatgatgtcttctctttgcgt

SEQ ID NO: 38364 - protein, 110 aa, Zea mays subsp. mays
RDHYLEHPNRKTPILPSNNSSSSRHGRQQQEAPAVPPHAAAGALHRRDAHPLAVSARRRGSLRLRQTQGAQAVAPAQDQALLNINLYLPLALQLLLTCGKTPPPGYTCTV

SEQ ID NO: 38365 - protein, 89 aa, Zea mays subsp. mays
MEGSSKKLQPFLLTLLLVLSTAVTPILSLSVPDDEVACDCDKPKAPKPSHPPKTKPSSTSTSTCHWRSSSSSPAARRRRRATPAPSDLD

SEQ ID NO: 38366 - protein, 61 aa, Zea mays subsp. mays
MSSASSFQAEEGTPEEEESNNGRVDQLTMDRSFFPHIYCVASAVVSNFLDVLSVWSVDPAA

SEQ ID NO: 38367 - DNA, 1147 bp, Zea mays subsp. mays
aacccctgcaaaaacccgccactctcagatccgcacagcgacgcccgccagccagacccgatcccctccctcgctagggttttcgtccccgcgccgccgcgctcccggatcccaccgaaacaaccatggccggcggtcccgcggcggtgtcgttcctgaccaacatcgcgaaggtggctgcggggctcggagccgcggcctcgctcgcctccgcgtcgctctacaccgtcgacggcggcgagcgcgccgtcatcttcgaccgtttccgcggggtgctcccggagaccgtcggcgagggcacccatttcctcgtgccctggctgcagaagcccttcatcttcgacatccgcacgcgcccgcacaacttctcctccaactcggggaccaaggacctgcagatggtcaacctcacgctccgtctcctctcccgccccgacgtccagcacctccccaccatcttcacctccctcggactcgagtacgacgacaaagtgctcccctccatcggcaacgaggtgctcaaggccgtcgtcgcccagttcaatgccgaccagctcctcaccgaccgcccccacgtctccgccctcgtccgcgacgctctcatccgccgcgcccgcgagttcaacatcatcctcgacgacgtcgccatcacccacctctcctatggtatcgagttctcgctggccgttgagaagaagcaggtcgcgcagcaggaggccgagcgctccaagttcctcgtcgccaaggcggagcaggagaggcgggcggccatcgtgcgcgctgagggagagagcgagtccgcgcgcctcatctctgaggccacggcgatggctgggacagggctgatcgagctcaggaggatcgaggcggccaaggagattgccgcagagctggctcgctcaccgaatgtggcatacattccttctggggaaaacggaaagatgctgcttggtctcaatgctactggatttggccggtgattcactgtttttttagtctgcttgtgctatgtgctgatgcatgactaaaacggaggttcgaactttgaaggacagtgatatctgctatccttgcttatgttaagttttccttgtcttggaactaaatgtgtctgttgtgctccaaataagttttggtttttgactgc

SEQ ID NO: 38368 - protein, 284 aa, Zea mays subsp. mays
MAGGPAAVSFLTNIAKVAAGLGAAASLASASLYTVDGGERAVIFDRFRGVLPETVGEGTHFLVPWLQKPFIFDIRTRPHNFSSNSGTKDLQMVNLTLRLLSRPDVQHLPTIFTSLGLEYDDKVLPSIGNEVLKAVVAQFNADQLLTDRPHVSALVRDALIRRAREFNIILDDVAITHLSYGIEFSLAVEKKQVAQQEAERSKFLVAKAEQERRAAIVRAEGESESARLISEATAMAGTGLIELRRIEAAKEIAAELARSPNVAYIPSGENGKMLLGLNATGFGR

SEQ ID NO: 38369 - protein, 229 aa, Zea mays subsp. mays
TPAKTRHSQIRTATPASQTRSPPSLGFSSPRRRAPGSHRNNHGRRSRGGVVPDQHREGGCGARSRGLARLRVALHRRRRRARRHLRPFPRGAPGDRRRGHPFPRALAAEALHLRHPHAPAQLLLQLGDQGPADGQPHAPSPLPPRRPAPPHHLHLPRTRVRRQSAPLHRQRGAQGRRRPVQCRPAPHRPPPRLRPRPRRSHPPRPRVQHHPRRRRHHPPLLWYRVLAGR

SEQ ID NO: 38370 - protein, 193 aa, Zea mays subsp. mays
MVNLTLRLLSRPDVQHLPTIFTSLGLEYDDKVLPSIGNEVLKAVVAQFNADQLLTDRPHVSALVRDALIRRAREFNIILDDVAITHLSYGIEFSLAVEKKQVAQQEAERSKFLVAKAEQERRAAIVRAEGESESARLISEATAMAGTGLIELRRIEAAKEIAAELARSPNVAYIPSGENGKMLLGLNATGFGR

SEQ ID NO: 38371 - DNA, 667 bp, Zea mays subsp. mays
ctccactccctcccccccgcctccactaccccactcccaggcgccgcacaggtacgtcgccggcggcgatgacgacgcgcttcaagaagaaccgcaagaagcgcggccacgtgtccgccgggcacggccgcatcggcaagcacaggaagcatcccggaggtcgcggtaacgccggtggcatgcaccaccaccgcatcctcttcgacaagtaccatcccggctacttcggtaaggtcggcatgcgctacttccacaagctccgcaacaagttctactgccccgcggtcaacatcgagcgcctctggtcgatggtgcccgccgaaaaggcggcggaagccggcggcgacaaggccccgcagatcgacgtcacgcagttcggctacttcaaggtgctcgggaagggggtgctgccgcccaagcccatcgtcgtcaaggccaagctcatctccaaggtcgccgagaagaagatcaaggccgccggcggcgccgtcgtgctcaccgcctagttttcagtccttattcgcctcttggttttgagatctatatctgaactagcagtgctttcttgtctcacctatttgtgttaagaagacgtagtttttaaatccattgctccttcctgtttggacagtgctttcatatcaaatatttcaggtatattagagcc

SEQ ID NO: 38372 - protein, 167 aa, Zea mays subsp. mays
PLPPPRLHYPTPRRRTGTSPAAMTTRFKKNRKKRGHVSAGHGRIGKHRKHPGGRGNAGGMHHHRILFDKYHPGYFGKVGMRYFHKLRNKFYCPAVNIERLWSMVPAEKAAEAGGDKAPQIDVTQFGYFKVLGKGVLPPKPIVVKAKLISKVAEKKIKAAGGAVVLTA

SEQ ID NO: 38373 - protein, 145 aa, Zea mays subsp. mays
MTTRFKKNRKKRGHVSAGHGRIGKHRKHPGGRGNAGGMHHHRILFDKYHPGYFGKVGMRYFHKLRNKFYCPAVNIERLWSMVPAEKAAEAGGDKAPQIDVTQFGYFKVLGKGVLPPKPIVVKAKLISKVAEKKIKAAGGAVVLTA

SEQ ID NO: 38374 - protein, 108 aa, Zea mays subsp. mays
MHHHRILFDKYHPGYFGKVGMRYFHKLRNKFYCPAVNIERLWSMVPAEKAAEAGGDKAPQIDVTQFGYFKVLGKGVLPPKPIVVKAKLISKVAEKKIKAAGGAVVLTA

SEQ ID NO: 38375 - DNA, 685 bp, Zea mays subsp. mays
aaacaacagcgaacacatctgcttcgcatttcttcccatcccccttcgcaacccaaaccccaactcgctccgcatcgatggcgcccaaggccgagaagaagcccgcggcgaagaagccggcggaggaggagcccgcggctgagaaggcgcccgccgggaagaagccgaaggcggagaagcgggtccccgctggcaagtccgctgccaaggagggcggcgagggcaagaggggcaggaagaagggcaagaagagcgtggagacctacaagatctacatcttcaaggtgctgaagcaggtgcacccggacattggcatctcctccaaggccatgtcgatcatgaactccttcattaacgatatcttcgagaagctagctgctgaggccgccaagctcgcgcgctataacaagaagccaaccatcacctcccgtgagatacagacttccgtgcgcctcgtccttcccggggagctcgccaagcacgccgtctccgagggcaccaaggccgtcaccaagttcacctcggcctaggctgcgctgccgccgcttgcaggattgtctcctgtgttcacgtgtattgctgtagttaggtgctgctggtttctgtctgttacccatctgtctgtagcaactttgttatctgataggaccgtaatggtgcttatttaacccagctatatgtttct

SEQ ID NO: 38376 - protein, 175 aa, Zea mays subsp. mays
TTANTSASHFFPSPFATQTPTRSASMAPKAEKKPAAKKPAEEEPAAEKAPAGKKPKAEKRVPAGKSAAKEGGEGKRGRKKGKKSVETYKIYIFKVLKQVHPDIGISSKAMSIMNSFINDIFEKLAAEAAKLARYNKKPTITSREIQTSVRLVLPGELAKHAVSEGTKAVTKFTSA

SEQ ID NO: 38377 - protein, 150 aa, Zea mays subsp. mays
MAPKAEKKPAAKKPAEEEPAAEKAPAGKKPKAEKRVPAGKSAAKEGGEGKRGRKKGKKSVETYKIYIFKVLKQVHPDIGISSKAMSIMNSFINDIFEKLAAEAAKLARYNKKPTITSREIQTSVRLVLPGELAKHAVSEGTKAVTKFTSA

SEQ ID NO: 38378 - protein, 96 aa, Zea mays subsp. mays
KQQRTHLLRISSHPPSQPKPQLAPHRWRPRPRRSPRRRSRRRRSPRLRRRPPGRSRRRRSGSPLASPLPRRAARARGAGRRARRAWRPTRSTSSRC

SEQ ID NO: 38379 - DNA, 1885 bp, Zea mays subsp. mays
accgagtcgagtccacagtccacaccaccaccgcgaggtccactaaaaaaacaagagcattaccggcaccaatcaatcaggctggcagtggagtgacagcggcggcaacaccacgcccacgcggcgccggagccgaagccgatcccccgatggatctcccgccgctctcccaccaggccctcttcgccggccgtccgatccgccgacgcgcccgccgtccgcgcgctcctggtcgacgccgaggcgtcgggcacctcgttggccgcgctcgccgccgctcagacggacgccggggaaaccgcgctgtacgttgccgcggaggccggaagcgaggaggtcgtgcgcctcctcctcccgctctacgacttcgaggcagccaccgtccgctcacgccttgacctcgacgccttccatgtcgccgccaagcagggccacaccggggttgtgaaagagttcttggggcggtggccagggctttgctcagtctgtgactcttccaacactagtcccctctactctgctgctgtcaaggatcacttggatgtggtaaatgctatactggacactgatgatagctgcataaagattgtgcggaagaatgggaaaacatccctacatactgctgcaagaattggataccatcgtattgtcaaagcactcatagagagagatccaggaattgttccgatcaatgataggaagggacaaactgcacttcacatggctgtgaagggcaaaaatacagatgtagtggaagagttattgatggctgatgtttccattctcaatgtgagggacaagaaaggaaatactgctttgcacatagctacacggaaatggaggccccagatggtacagcttcttcttagctatgaatcacttgaagttaatgctatcaacagtcaaaatgaaacagctatggatttggctgacaaagttccttatggtgagtctaaaacggaaataatagagtggctgacagaagctggtgcaaagaatgccagaaatgttgggaaaattgatgaggcatcagaactgaggagaactgtgagcgatatcaagcacaatgttcaggcacagcttagcgagaatgctaagaccaacaaacgggtgactgggattcgcaaagagttgcagaaactgcatagagaagctatccagaacaccatcaattcagtcaccttggtagcgaccctgatcgcctccattgccttcgtcgccatattcaatctgccaggtcaatacttccaggatgtgaatagtgggggagatattggtgaggctgaaatagccaagcttaccggtttccgtgtcttctgccttctgaacgctactgctctcttcatctccctcgcggtggtcgtggtgcagatcaccttggttgcctgggaaactggtgcccagaagcaagttatcaagatcgtgaataagctcatgtggacggcatgccttagcacgggtgtggcttttatctcgctggcctatgttgtagttggcccgcagcatgcctggatggccttcacggcatcagccatcggagggccgatcatgattggaactttcctgttcctagcctatctgctgttgcgcccacggttcaagttcggcgaagacagacagcgccgcatcaagagggcaagcggcagcaaatccttctcctggtcaatccatgatgggttttcagatctggaagccttctctgatcacgagaagaggatctatgccctgtaggagggtgtaacagtaactactcctgcaagaggcaactgggagagtacaaatggttcatgtatatatttggtttagccgttttagcctagccgctgttagacctttctccccatgtacaatatctaataatgaagagctgcagctattgtaaagc

SEQ ID NO: 38380 - protein, 336 aa, Zea mays subsp. mays
MAVKGKNTDVVEELLMADVSILNVRDKKGNTALHIATRKWRPQMVQLLLSYESLEVNAINSQNETAMDLADKVPYGESKTEIIEWLTEAGAKNARNVGKIDEASELRRTVSDIKHNVQAQLSENAKTNKRVTGIRKELQKLHREAIQNTINSVTLVATLIASIAFVAIFNLPGQYFQDVNSGGDIGEAEIAKLTGFRVFCLLNATALFISLAVVVVQITLVAWETGAQKQVIKIVNKLMWTACLSTGVAFISLAYVVVGPQHAWMAFTASAIGGPIMIGTFLFLAYLLLRPRFKFGEDRQRRIKRASGSKSFSWSIHDGFSDLEAFSDHEKRIYAL

SEQ ID NO: 38381 - protein, 321 aa, Zea mays subsp. mays
MADVSILNVRDKKGNTALHIATRKWRPQMVQLLLSYESLEVNAINSQNETAMDLADKVPYGESKTEIIEWLTEAGAKNARNVGKIDEASELRRTVSDIKHNVQAQLSENAKTNKRVTGIRKELQKLHREAIQNTINSVTLVATLIASIAFVAIFNLPGQYFQDVNSGGDIGEAEIAKLTGFRVFCLLNATALFISLAVVVVQITLVAWETGAQKQVIKIVNKLMWTACLSTGVAFISLAYVVVGPQHAWMAFTASAIGGPIMIGTFLFLAYLLLRPRFKFGEDRQRRIKRASGSKSFSWSIHDGFSDLEAFSDHEKRIYAL

SEQ ID NO: 38382 - protein, 293 aa, Zea mays subsp. mays
MVQLLLSYESLEVNAINSQNETAMDLADKVPYGESKTEIIEWLTEAGAKNARNVGKIDEASELRRTVSDIKHNVQAQLSENAKTNKRVTGIRKELQKLHREAIQNTINSVTLVATLIASIAFVAIFNLPGQYFQDVNSGGDIGEAEIAKLTGFRVFCLLNATALFISLAVVVVQITLVAWETGAQKQVIKIVNKLMWTACLSTGVAFISLAYVVVGPQHAWMAFTASAIGGPIMIGTFLFLAYLLLRPRFKFGEDRQRRIKRASGSKSFSWSIHDGFSDLEAFSDHEKRIYAL

SEQ ID NO: 38383 - DNA, 1665 bp, Zea mays subsp. mays
attaaccgcctctccctcgctcctctcgctcgctcggctcactccctctccaaagcggcagcctcacgcagtcacgcgctccaccacgccacctccctctactcactcatgttgttttccgtccatccgcccaccggttcgtagcccgcgccgcaaaaccctagccccgggaggatcgcggggcgcctccgcggtgccagcgacgtggctcgtttgatccgattgctggtcgagccccgcccctcgctgccgcgcttcgctccggctgtgcagcggcgtgagcaccgagcacactcgcgaatggggaactgctggggtgcgcggatcaaggatgggagccctcaccctggcgcctcaggaatgttctcaaagagtagtggcaaggatgggagtaggcttagcggctgtagtagtcgagcctcttcagcttctatgccaccaagtgcgaagactgaatgtgaaatcctgcaatccgccaatgttaagatcttcaccttcaataatctcaaggcagccacaaggaatttccgtcctgatagtgttctaggtgaaggagggtttggatctgtctataaaggatggatagatgagaacacattatcaccttgcagacctggcactggaatcgctgttgctgtgaaaagactcaaccatgagggtttgcaagggcaccgagagtggttggcggaagttaattacctaggtcagttctgtcatcccaaccttgtcaagctgattggatactgcttagaggatgagcaccgactgctagtatacgagttcatgccccgtgggaacatggaaaaccatctgtttaggagaggctcatacttccaacctctgtcatggaaccttagaatgaaggttgcactgggagcagcaaaaggactagcttaccttcatagtgcagaggcaaaagttatttaccgagattttaagacttcgaacatcctccttgacacagattattctgcgaagctttctgattttggattggctaaggatggtcctgtcggtgagaagagccatgtgtccacaagagttatgggaacatatggttatgcagctcctgagtatctttcaacaggtcacctaactgcaaagagcgacatctatagctttggggtagtgcttctggagatgctgtcaggccgccgcgccatcgacaagaaccgcccccagggtgagcacaatcttgtggagtgggctcgaccttacctcacacataagcgcaagatattccggatcctggatacgaggctggaaggtcaatacaatctgaacggtgcacaaacaattgctgcccttgctctcgaatgcctatcctacgaagctaagatgaggccgactatggacgctgtggttgctattctagaagagctccagggctctggtgaagccgagaagaagcttcaagaacccaaggccggaaccaaacaggcacctgctgctgtgagtgctagcatgagcagcagccgcaagcctcgccggaaaagtctgggagacacaaaggagactgttggtggtccagatcccaaaccattggcccattctcgttagcaagggaaagcattgcctggtcattgtcgttagttagactgtagctcgcttgtgaatatgctatggtctgtgtatgtatgttcagagggtaatcgggcttttggc

SEQ ID NO: 38384 - protein, 419 aa, Zea mays subsp. mays
MGNCWGARIKDGSPHPGASGMFSKSSGKDGSRLSGCSSRASSASMPPSAKTECEILQSANVKIFTFNNLKAATRNFRPDSVLGEGGFGSVYKGWIDENTLSPCRPGTGIAVAVKRLNHEGLQGHREWLAEVNYLGQFCHPNLVKLIGYCLEDEHRLLVYEFMPRGNMENHLFRRGSYFQPLSWNLRMKVALGAAKGLAYLHSAEAKVIYRDFKTSNILLDTDYSAKLSDFGLAKDGPVGEKSHVSTRVMGTYGYAAPEYLSTGHLTAKSDIYSFGVVLLEMLSGRRAIDKNRPQGEHNLVEWARPYLTHKRKIFRILDTRLEGQYNLNGAQTIAALALECLSYEAKMRPTMDAVVAILEELQGSGEAEKKLQEPKAGTKQAPAAVSASMSSSRKPRRKSLGDTKETVGGPDPKPLAHSR

SEQ ID NO: 38385 - protein, 399 aa, Zea mays subsp. mays
MFSKSSGKDGSRLSGCSSRASSASMPPSAKTECEILQSANVKIFTFNNLKAATRNFRPDSVLGEGGFGSVYKGWIDENTLSPCRPGTGIAVAVKRLNHEGLQGHREWLAEVNYLGQFCHPNLVKLIGYCLEDEHRLLVYEFMPRGNMENHLFRRGSYFQPLSWNLRMKVALGAAKGLAYLHSAEAKVIYRDFKTSNILLDTDYSAKLSDFGLAKDGPVGEKSHVSTRVMGTYGYAAPEYLSTGHLTAKSDIYSFGVVLLEMLSGRRAIDKNRPQGEHNLVEWARPYLTHKRKIFRILDTRLEGQYNLNGAQTIAALALECLSYEAKMRPTMDAVVAILEELQGSGEAEKKLQEPKAGTKQAPAAVSASMSSSRKPRRKSLGDTKETVGGPDPKPLAHSR

SEQ ID NO: 38386 - protein, 375 aa, Zea mays subsp. mays
MPPSAKTECEILQSANVKIFTFNNLKAATRNFRPDSVLGEGGFGSVYKGWIDENTLSPCRPGTGIAVAVKRLNHEGLQGHREWLAEVNYLGQFCHPNLVKLIGYCLEDEHRLLVYEFMPRGNMENHLFRRGSYFQPLSWNLRMKVALGAAKGLAYLHSAEAKVIYRDFKTSNILLDTDYSAKLSDFGLAKDGPVGEKSHVSTRVMGTYGYAAPEYLSTGHLTAKSDIYSFGVVLLEMLSGRRAIDKNRPQGEHNLVEWARPYLTHKRKIFRILDTRLEGQYNLNGAQTIAALALECLSYEAKMRPTMDAVVAILEELQGSGEAEKKLQEPKAGTKQAPAAVSASMSSSRKPRRKSLGDTKETVGGPDPKPLAHSR

SEQ ID NO: 38387 - DNA, 1889 bp, Zea mays subsp. mays
gcaccagtttcaacgatcgtcccgcgtcaatattattaaaaaactcttacatttctttataatcaacccgcactcttataatctcttctctactactataataagagagtttatgtacaaaataaggtgaaattatgtataagtgttctggatattggttgttggctccatattcacacaacctaatcaatagaaaacatatgttttattaaaacaaaatttatcatatatcatatatatatatatacatatatatatatatatataaaccgtagcaatgcacgggcatataactagtgcaacttaatacatgtgtgtattaagatgaataagagggtatccaaataaaaaacttgttcgcttacgtctggatcgaaaggggttggaaacgattaaatctcttcctagtcaaaattgaatagaaggagatttaatctctcccaatccccttcgatcatccaggtgcaaccgtataagtcctaaagtggtgaggaacacgaaacaaccatgcattggcatgtaaagctccaagaatttgttgtatccttaacaactcacagaacatcaaccaaaattgcacgtcaagggtattgggtaagaaacaatcaaacaaatcctctctgtgtgcaaagaaacacggtgagtcatgccgagatcatactcatctgatatacatgcttacagctcacaagacattacaaacaactcatattgcattacaaagatcgtttcatgaaaaataaaataggccggacaggacaaaaatccttgacgtgtaaagtaaatttacaacaaaaaaaaagccatatgtcaagctaaatctaattcgttttacgtagatcaacaacctgtagaaggcaacaaaactgagccacgcagaagtacagaatgattccagatgaaccatcgacgtgctacgtaaagagagtgacgagtcatatacatttggcaagaaaccatgaagctgcctacagccgtctcggtggcataagaacacaagaaattgtgttaattaatcaaagctataaataacgctcgcatgcctgtgcacttctccatcaccaccactgggtcttcagaccattagctttatctactccagagcgcagaagaacccgatcgacaccatgagggtgttgctcgttgccctcgctctcctggctctcgctgcgagcgccacctccacgcatacaagcggcggctgcggctgccagccaccgccgccggttcatctaccgccgccggtgcatctgccacctccggttcacctgccacctccggtgcatctcccaccgccggtccacctgccgccgccggtccacctgccaccgccggtccatgtgccgccgccggttcatctgccgccgccaccatgccactaccctactcaaccgccccggcctcagcctcatccccagccacacccatgcccgtgccaacagccgcatccaagcccgtgccagctgcagggaacctgcggcgttggcagcaccccgatcctgggccagtgcgtcgagttcctgaggcatcagtgcagcccgacggcgacgccctactgctcgcctcagtgccagtcgttgcggcagcagtgttgccagcagctcaggcaggtggagccgcagcaccggtaccaggcgatcttcggcttggtcctccagtccatcctgcagcagcagccgcaaagcggccaggtcgcggggctgttggcggcgcagatagcgcagcaactgacggcgatgtgcggcctgcagcagccgactccatgcccctacgctgctgccggcggtgtcccccactgaagaaactatgtgctgtagtatagccgctggctagctagctagttgagtcatttagcggcgatgattgagtaataatgtgtcacgcatcac

SEQ ID NO: 38388 - protein, 223 aa, Zea mays subsp. mays
MRVLLVALALLALAASATSTHTSGGCGCQPPPPVHLPPPVHLPPPVHLPPPVHLPPPVHLPPPVHLPPPVHVPPPVHLPPPPCHYPTQPPRPQPHPQPHPCPCQQPHPSPCQLQGTCGVGSTPILGQCVEFLRHQCSPTATPYCSPQCQSLRQQCCQQLRQVEPQHRYQAIFGLVLQSILQQQPQSGQVAGLLAAQIAQQLTAMCGLQQPTPCPYAAAGGVPH

SEQ ID NO: 38389 - protein, 149 aa, Zea mays subsp. mays
MPLPYSTAPASASSPATPMPVPTAASKPVPAAGNLRRWQHPDPGPVRRVPEASVQPDGDALLLASVPVVAAAVLPAAQAGGAAAPVPGDLRLGPPVHPAAAAAKRPGRGAVGGADSAATDGDVRPAAADSMPLRCCRRCPPLKKLCAVV

SEQ ID NO: 38390 - protein, 131 aa, Zea mays subsp. mays
MPVPTAASKPVPAAGNLRRWQHPDPGPVRRVPEASVQPDGDALLLASVPVVAAAVLPAAQAGGAAAPVPGDLRLGPPVHPAAAAAKRPGRGAVGGADSAATDGDVRPAAADSMPLRCCRRCPPLKKLCAVV

SEQ ID NO: 38391 - DNA, 863 bp, Zea mays subsp. mays
gcacgagaccattacctagaacatcctaatcgaaaagtcgcccccacgctagtcgcccaaactacgcaaccgatatattccccagcacccccgttccagccgtccaaccgagacaccgcgtgcgaaccaagcagaccccagcagaagaagcgaagtcgtcgccggagcaggaggaagagcgagcagcaagatgtcgtggcaggcgtacgtcgatgaccacctgctgtgcgacatcgaaggccagcacctcagcgccgccgccatcgtcggccacgacggcagcgtctgggcacagtccgagaacttccccgagttaaagcctgaggaggttgctgggatgataaaggactttgatgaacctggaactcttgcaccaactggtctttttgttggaggtacgaagtacatggtgatccaaggtgaacctggagttgtcatccgaggaaagaagggcactggaggcattactatcaagaaaactggcatgtccttgattatcggtatctatgatgagccaatgactccagggcaatgcaatatggtggtggagaggctcggcgattacctgatcgaacaggggcttctaagtttgtcataatgctattttggtcattgggcacttaagtttgcacctcatttggttctgtaatatgtgggcttgtgcatgtgcttggcgtattgcatgcagtgaataatttatcttcgcgttgggttggtgacaatgttgggaacggatttgaattggggtttatgcttgccatctcctcatatctcgaactcagctgctgtttcactgagtaatgtacatttccctggtaatggtacttgtgcactctgctgctttatggaaaagagtgcatttt

SEQ ID NO: 38392 - protein, 135 aa, Zea mays subsp. mays
MSWQAYVDDHLLCDIEGQHLSAAAIVGHDGSVWAQSENFPELKPEEVAGMIKDFDEPGTLAPTGLFVGGTKYMVIQGEPGVVIRGKKGTGGITIKKTGMSLIIGIYDEPMTPGQCNMVVERLGDYLIEQGLLSLS

SEQ ID NO: 38393 - protein, 86 aa, Zea mays subsp. mays
MIKDFDEPGTLAPTGLFVGGTKYMVIQGEPGVVIRGKKGTGGITIKKTGMSLIIGIYDEPMTPGQCNMVVERLGDYLIEQGLLSLS

SEQ ID NO: 38394 - protein, 71 aa, Zea mays subsp. mays
ARDHYLEHPNRKVAPTLVAQTTQPIYSPAPPFQPSNRDTACEPSRPQQKKRSRRRSRRKSEQQDVVAGVRR

SEQ ID NO: 38395 - DNA, 1366 bp, Zea mays subsp. mays
  misc_feature (603)..(603): n is a, c, g, or t
aaccaccgcagccgcagcacaatcgcctcgccttcccttccccaccagcccccgtctctctctctctctttctctctctcgtagccgcgtccacctcgcagcagcaagcaagcgcgaccaaatggcgcctctaggagacggcggagctgctgccgcggcggcgtccaacaacctggtggtgtcgttcggcgagatgctgatcgacttcgtccccgacgtggccgggctgtcgctggccgagtcgggcggcttcgtcaaggcccccggcggcgcgcccgccaacgtcgcctgcgccatcgccaagctcggcggctcctccgccttcgtcggcaagttcggcgacgacgagttcgggcacatgctggtgaacatcctgaagcagaacaacgtgaactcggaggggtgcctgttcgacaagcacgcgcggacggcgctggccttcgtgacgctcaagcacgacggggagcgcgagttcatgttctacaggaacccgagcgcggacatgctgctgacggaggcggagctggacctgggcctggtgcggcgcgccagggtgttccactacggctccatctcgctcatctccgagccgtgccgctcggngcacatggccgccatgcgcgcagccaaggccgcgggcgtgctctgctcctacgaccccaacgtgcgcctcccgctctggccgtcgcccgacgccgcacgcgagggcatcctcagcatctggaaggaggcagacttcatcaaggtcagcgacgacgaggtggccttcctcacgcgcggggacgccaacgacgagaagaacgtgctgtccctgtggtttgacgggctcaagctgctcgtcgtcaccgacggggacaagggatgcaggtacttcaccaaggacttcaagggcagcgtgtccggcttcaaggtcgacaccgtcgacaccaccggcgccggcgacgccttcgtcggctccctcctcgtcaacgtcgccaaggacgactccatcttccacaacgaggagaagctccgcgaggctctcaagttctccaacgcctgcggcgccatctgcaccaccaagaagggcgccatcccggcgctgcccacggtcgccaccgcccaggacctcatcgccaaggccaactagatcatggccgcacgcccgccgttccaccacgtcactgtcccccgccgccccgcccctcgtcgtcgacgtcctcggtttcggttcattaggtagatcgagtcttagcgtccgtctctgcgcctctacgctgagacggtttgtttgggttaattaagttagctttcgtggagatttcgccccggggcatcaataaaatgttggcatgcgtggtgggatgctatcctttatttttatttt

SEQ ID NO: 38396 - protein, 375 aa, Zea mays subsp. mays
  misc_feature (201)..(201): Xaa can be any naturally occurring amino acid
TTAAAAQSPRLPFPTSPRLSLSLSLSRSRVHLAAASKRDQMAPLGDGGAAAAAASNNLVVSFGEMLIDFVPDVAGLSLAESGGFVKAPGGAPANVACAIAKLGGSSAFVGKFGDDEFGHMLVNILKQNNVNSEGCLFDKHARTALAFVTLKHDGEREFMFYRNPSADMLLTEAELDLGLVRRARVFHYGSISLISEPCRSXHMAAMRAAKAAGVLCSYDPNVRLPLWPSPDAAREGILSIWKEADFIKVSDDEVAFLTRGDANDEKNVLSLWFDGLKLLVVTDGDKGCRYFTKDFKGSVSGFKVDTVDTTGAGDAFVGSLLVNVAKDDSIFHNEEKLREALKFSNACGAICTTKKGAIPALPTVATAQDLIAKAN

SEQ ID NO: 38397 - protein, 335 aa, Zea mays subsp. mays
  misc_feature (161)..(161): Xaa can be any naturally occurring amino acid
MAPLGDGGAAAAAASNNLVVSFGEMLIDFVPDVAGLSLAESGGFVKAPGGAPANVACAIAKLGGSSAFVGKFGDDEFGHMLVNILKQNNVNSEGCLFDKHARTALAFVTLKHDGEREFMFYRNPSADMLLTEAELDLGLVRRARVFHYGSISLISEPCRSXHMAAMRAAKAAGVLCSYDPNVRLPLWPSPDAAREGILSIWKEADFIKVSDDEVAFLTRGDANDEKNVLSLWFDGLKLLVVTDGDKGCRYFTKDFKGSVSGFKVDTVDTTGAGDAFVGSLLVNVAKDDSIFHNEEKLREALKFSNACGAICTTKKGAIPALPTVATAQDLIAKAN

SEQ ID NO: 38398 - protein, 311 aa, Zea mays subsp. mays
  misc_feature (137)..(137): Xaa can be any naturally occurring amino acid
MLIDFVPDVAGLSLAESGGFVKAPGGAPANVACAIAKLGGSSAFVGKFGDDEFGHMLVNILKQNNVNSEGCLFDKHARTALAFVTLKHDGEREFMFYRNPSADMLLTEAELDLGLVRRARVFHYGSISLISEPCRSXHMAAMRAAKAAGVLCSYDPNVRLPLWPSPDAAREGILSIWKEADFIKVSDDEVAFLTRGDANDEKNVLSLWFDGLKLLVVTDGDKGCRYFTKDFKGSVSGFKVDTVDTTGAGDAFVGSLLVNVAKDDSIFHNEEKLREALKFSNACGAICTTKKGAIPALPTVATAQDLIAKAN

SEQ ID NO: 38399 - DNA, 1525 bp, Zea mays subsp. mays
atcccgtcacgttcggcgaaacccgggttataaaaccggagcacctcgccccccctctaccaccaccggcagccgcagcacaatcgcctcgccttcccttccccaccagcccgtctctctcttctctctgactctctctctcgtagccgcgtccacctcgcagcagcaagcaagcgcgaccaaatggcgcctctaggagacggcggagctgctgccgcggcggcgtccaacaacctggtggtgtcgttcggcgagatgctgatcgacttcgtccccgacgtggccgggctgtcgctggccgagtcgggcggcttcgtcaaggcacccggcggcgcgcccgccaacgtcgcctgcgccatcgccaagctcggcggatcctccgccttcgtaggcaagttcggcgacgacgagttcgggcacatgctggtgaacatcctgaagcagaacaacgtgaacgcggaggggtgcctgttcgacaagcacgcgcggacggcgctggccttcgtgacgctcaagcacgacggggagcgcgagttcatgttctacaggaacccgagcgcggacatgctgctgacggaggcggagctggacctgggcctggtgcggcgcgccagggtgttccactacggctccatctcgctcatctccgagccgtgccgctcggcgcacatggccgccatgcgcgcagccaaggccgcgggcgtgctctgctcctacgaccccaacgtgcgcctcccgctctggccgtcgcccgacgccgcacgcgagggcatcctcagcatctggaaggaggccgacttcatcaaggtcagcgacgacgaggtggccttcctcacgcgcggggacgccaacgacgagaagaacgtgctgtccctgtggtttgacgggctcaagctgctcgtcgtcaccgacggggacaagggatgcaggtacttcaccaaggacttcaagggcagcgtgcccggcttcaaggtcgacaccgtcgacaccaccggcgccggcgacgccttcgtcggctccctcctcgtcaacgtcgccaaggacgactccatcttccacaacgaggagaagctccgcgaggctctcaagttctccaacgcctgcggcgccatctgcaccaccaagaagggcgccatcccggcgctgcccacggtcgccaccgcccaggacctcatcgccaaggccaactagatggccgcacgccccgccgttccaccacgtcactgtcccccgccgccccgcccctcgtcgtcgacgtcctcggtttcggttcattaggtagatcgagtcttagcgtccgtctctgcgcctctacgctgagacggtttgtttgggttaattaagttagctttcgtggagatttcgccccggggcatcaataaaatgttggcatgcgtggtgggatgctatcctttttttttattttattttattttatttttagcttggatcagttggggttttgaacattgctagtgtcgtgtgattgggaaggctaatgtgatgccttcgatgcagagttttc

SEQ ID NO: 38400 - protein, 335 aa, Zea mays subsp. mays
MAPLGDGGAAAAAASNNLVVSFGEMLIDFVPDVAGLSLAESGGFVKAPGGAPANVACAIAKLGGSSAFVGKFGDDEFGHMLVNILKQNNVNAEGCLFDKHARTALAFVTLKHDGEREFMFYRNPSADMLLTEAELDLGLVRRARVFHYGSISLISEPCRSAHMAAMRAAKAAGVLCSYDPNVRLPLWPSPDAAREGILSIWKEADFIKVSDDEVAFLTRGDANDEKNVLSLWFDGLKLLVVTDGDKGCRYFTKDFKGSVPGFKVDTVDTTGAGDAFVGSLLVNVAKDDSIFHNEEKLREALKFSNACGAICTTKKGAIPALPTVATAQDLIAKAN

SEQ ID NO: 38401 - protein, 311 aa, Zea mays subsp. mays
MLIDFVPDVAGLSLAESGGFVKAPGGAPANVACAIAKLGGSSAFVGKFGDDEFGHMLVNILKQNNVNAEGCLFDKHARTALAFVTLKHDGEREFMFYRNPSADMLLTEAELDLGLVRRARVFHYGSISLISEPCRSAHMAAMRAAKAAGVLCSYDPNVRLPLWPSPDAAREGILSIWKEADFIKVSDDEVAFLTRGDANDEKNVLSLWFDGLKLLVVTDGDKGCRYFTKDFKGSVPGFKVDTVDTTGAGDAFVGSLLVNVAKDDSIFHNEEKLREALKFSNACGAICTTKKGAIPALPTVATAQDLIAKAN

SEQ ID NO: 38402 - protein, 256 aa, Zea mays subsp. mays
MLVNILKQNNVNAEGCLFDKHARTALAFVTLKHDGEREFMFYRNPSADMLLTEAELDLGLVRRARVFHYGSISLISEPCRSAHMAAMRAAKAAGVLCSYDPNVRLPLWPSPDAAREGILSIWKEADFIKVSDDEVAFLTRGDANDEKNVLSLWFDGLKLLVVTDGDKGCRYFTKDFKGSVPGFKVDTVDTTGAGDAFVGSLLVNVAKDDSIFHNEEKLREALKFSNACGAICTTKKGAIPALPTVATAQDLIAKAN

SEQ ID NO: 38403 - DNA, 716 bp, Zea mays subsp. mays
accaaattttactcgcctcctgtacctctctcccgtgtgaccatcacaacaaaaataaaatcaataatagagagagaagaggtaacaacaccggctgcttaatctcttcttttccctcctctttatctccagcgcatcgtaaagggaggagcggagcggcgaattcttgtggtttcccaagatgtcttctccaagcaagcgccgggagatggacctcatgaagctgatgatgagcgactacaaggtggatatggtgaacgatgggatgcaggagttctttgttgaatttcgtgggcctaacgaaagcatttatcaaggaggtatatggagggttagagtagaactgccagatgcgtatccttacaaatccccatcgattggtttcatcaataagatatatcacccaaatgtcgatgaaatgtctggttcagtctgtttggatgtcatcaaccagacatggagcccaatgtttgatcttgtcaatgtgttcgaggtcttccttccacaacttctgttatatcctaatccttctgatccattaaatggagatgcagctgcgttgatgatgcgtgatcgccctgctttgtgaaacgttttcctgcattttttttttgtgatgtgtatatagtagtatagtgaactgtccagtccagtaacaagtgatttcgtgtgtaaccatgagctggtcgcattcgcgtcccctctgatccaacaac

SEQ ID NO: 38404 - protein, 135 aa, Zea mays subsp. mays
MSSPSKRREMDLMKLMMSDYKVDMVNDGMQEFFVEFRGPNESIYQGGIWRVRVELPDAYPYKSPSIGFINKIYHPNVDEMSGSVCLDVINQTWSPMFDLVNVFEVFLPQLLLYPNPSDPLNGDAAALMMRDRPAL

SEQ ID NO: 38405 - protein, 126 aa, Zea mays subsp. mays
MDLMKLMMSDYKVDMVNDGMQEFFVEFRGPNESIYQGGIWRVRVELPDAYPYKSPSIGFINKIYHPNVDEMSGSVCLDVINQTWSPMFDLVNVFEVFLPQLLLYPNPSDPLNGDAAALMMRDRPAL

SEQ ID NO: 38406 - protein, 123 aa, Zea mays subsp. mays
MKLMMSDYKVDMVNDGMQEFFVEFRGPNESIYQGGIWRVRVELPDAYPYKSPSIGFINKIYHPNVDEMSGSVCLDVINQTWSPMFDLVNVFEVFLPQLLLYPNPSDPLNGDAAALMMRDRPAL

SEQ ID NO: 38407 - DNA, 892 bp, Zea mays subsp. mays
  misc_feature (588)..(588): n is a, c, g, or t
  misc_feature (591)..(591): n is a, c, g, or t
acgtgccgcgtcgcggtcgtcacggcccacggcccggcgctcctcccccctcgccgaccaccccctctcccttcttctattccccaccccccgcctcgtctcctccaccgccgcccccacatctattcacccatccattcgttccttcgtctctacgcacaaacgagagaaggctaggtcgtcgtcgttgtcattgtcgtcgtgacgcggagagatctgggaggaggagcgatggacgggaagttgccgccgccgaacccgaacctggcgtactgggaggactgttggagcgagggcgagaaggtcgcgcttgtcgacgcctggggctcgcgctacctcgacctcaaccgtgggagcctccgccagccgcagtggcgggaggtcgccgacgccgtcaactctcgccccggggcctccgcgcgccgctgcctgccgcgcaccgacatccagtgcaagaaccgcgttgacacgctcaagaagaagtacaaggtcgagtgcgcgcggcgggccatcgtcgtggaacttctacagccagttcggacctcctcgtcgggcccacgctcaccggcatcaagaagttgtccccanccngcgccgcgctgcctgtgttctggagggggcactagtacaaagaagttctatagtggcggttgtaaacctatttatagtggcgtttttcgtaaccgccagtgctaggggccagtagaaatcatcatttgtacaggcgggtaactgaggaccgccagtgaaaatcaattttcactggcggtcggcgtaataaaaccgccagtgaaaatcgattttcactagcggtcgacgtaataaaccgccagtgcaaatcgtttccaggaaacataaaacatattttaaaaatagttaaaaattttatttt

SEQ ID NO: 38408 - protein, 154 aa, Zea mays subsp. mays
  misc_feature (119)..(120): Xaa can be any naturally occurring amino acid
MDGKLPPPNPNLAYWEDCWSEGEKVALVDAWGSRYLDLNRGSLRQPQWREVADAVNSRPGASARRCLPRTDIQCKNRVDTLKKKYKVECARRAIVVELLQPVRTSSSGPRSPASRSCPXXAPRCLCSGGGTSTKKFYSGGCKPIYSGVFRNRQC

SEQ ID NO: 38409 - protein, 154 aa, Zea mays subsp. mays
VPRRGRHGPRPGAPPPSPTTPSPFFYSPPPASSPPPPPPHLFTHPFVPSSLRTNERRLGRRRCHCRRDAERSGRRSDGREVAAAEPEPGVLGGLLERGREGRACRRLGLALPRPQPWEPPPAAVAGGRRRRQLSPRGLRAPLPAAHRHPVQEPR

SEQ ID NO: 38410 - DNA, 697 bp, Zea mays subsp. mays
aaacagtctcggcctctcctcccggcttcctcacacggcactccagccgctagccctcactcaaccagacaaccagtacaccaccgccaccaagcccgggccgaataactctgccgggcaaccgccgcccttcgccggcaaagaacgcccaccagatccaccccggcctgctatggagtccgcggtgaacccgaaggcgtacccgctggctgatgcgcagctgacgatgggtatcctcgatatcatccagcaggccgccaactacaagcagctcaagaagggagcgaacgaagcgacgaaaaccctgaatagggggatatcggagttcgttgtgatggcggcggacacggagcctctcgagatcctgctccacctccccttgttagccgaggataagaacgtcccatatgtatttgttccatcgaaacaagctcttggccgtgcttgtggtgtgacaagacccgtcattgcttgctcagtgaccagcaatgagggtagccagctgaaacaacagatacagggtctcaaggactcgattgagaagcttctcatctgatttacctaagatctttcagtgtgatgggcctcggcgacacatttttcagaggcttggactggtgatggtgtcttgtttacattacgctttccaaactatatttgaacactgctaagtcaatcatatttgaattgtgcttcg

SEQ ID NO: 38411 - protein, 184 aa, Zea mays subsp. mays
NSLGLSSRLPHTALQPLALTQPDNQYTTATKPGPNNSAGQPPPFAGKERPPDPPRPAMESAVNPKAYPLADAQLTMGILDIIQQAANYKQLKKGANEATKTLNRGISEFVVMAADTEPLEILLHLPLLAEDKNVPYVFVPSKQALGRACGVTRPVIACSVTSNEGSQLKQQIQGLKDSIEKLLI

SEQ ID NO: 38412 - protein, 127 aa, Zea mays subsp. mays
MESAVNPKAYPLADAQLTMGILDIIQQAANYKQLKKGANEATKTLNRGISEFVVMAADTEPLEILLHLPLLAEDKNVPYVFVPSKQALGRACGVTRPVIACSVTSNEGSQLKQQIQGLKDSIEKLLI

SEQ ID NO: 38413 - protein, 109 aa, Zea mays subsp. mays
MGILDIIQQAANYKQLKKGANEATKTLNRGISEFVVMAADTEPLEILLHLPLLAEDKNVPYVFVPSKQALGRACGVTRPVIACSVTSNEGSQLKQQIQGLKDSIEKLLI

SEQ ID NO: 38414 - DNA, 1653 bp, Zea mays subsp. mays
gcacgagaccattacctagaacatcctaatcaaaaactcaaatcctcagatccgccccctcctccacccttgcgccgcgctttcacagctctcccgcctccggatccagatccgccgccaccaacgcctgctcctccccctcctgctgcaccaccaccatcaagaggtccagcagggcggcagcggcagcggcggcggcggcggcggcggcgacatggggcgtgacggcggtggcggtgtcgccggcggcatgtctgactcggtgctccggaaggtgctcctctcctacttctacgtggcggtgtggatcttcctctccttctccgtcatcgtctacaacaagtacatcctcgacccaaagatgtacaactggcccttccccatctcgctcaccatggtgcacatgggtttctgctcatccctcgccgtcgcgctcgtccgcgtcctccgcgtcgtcgacctccccacttcgccatccatgacgccgcagttctacacctcctccgtcgtccccatcggcgcgctctacgcgatgtcgctctggttctccaactcagcctacatctacctgtccgtgtcattcatccagatgctcaaggcgctgatgcccgtcgccgtctactccatcggcgtcctcttcaagaaggagaccttcaggtcctcctccatgctcaacatgctctccatctcattcggtgtggccatcgccgcctacggcgaggcgcgcttcgacgtgcgcggtgtcgcgctgcagctcgccgccgtcgccttcgaggccacgcggctcgtgctcatccagatcctgctcacgtccaagggcatctcgctcaaccctatcacctcgctctactatgtcgcgccgtgctgcttctgtttcctcctcgtgccctgggccttcgtcgagctgcccaggctgcgcgccgtcggcaccttccaaccggatttcttcgtctttgggacgaactcactctgcgcctttgcgctcaaccttgccgtctttctgctggtcggcaagacctcggcgctgaccatgaacgtcgcgggagtagtcaaggactggctgttgattgccttctcgtggtccgtgatccgggacaccgtcacaccgatcaacctgttcgggtacgggatcgcgtttttaggggtgggctactacaatcatgtcaagctgcaggcgctcaaggctaaggaggcccagaagaaagccacacaggctgatgaggaggccgggtcgctcttgcaggagcgcgatggacacagtgatcgcaagagcgacaatcaagcctagagggccagatctgatcctggcttccccatattgggcatctgatgcaaggtgcaaagactggtgtttggtctgtggttgctttcaaggaggtgtgtgccggttgcttgcacatctttaactctgggtctgaagagcaaatcagaagtatttatggcttaggaaatatgcacctgctttgctggagaactttgtcctgctatttatttatagacacttctgatctacaggaaggcggccattcctcactacctctctttgcccattgtctacatttatttgttctactagtagattaggggactacagatgtactcctgcagatggttaatttggtggctattttcgatatataatgagcttacagt

SEQ ID NO: 38415 - protein, 357 aa, Zea mays subsp. mays; identical to SEQ ID NO: 33298

SEQ ID NO: 38416 - protein, 345 aa, Zea mays subsp. mays; identical to SEQ ID NO: 33299

SEQ ID NO: 38417 - protein, 308 aa, Zea mays subsp. mays
MYNWPFPISLTMVHMGFCSSLAVALVRVLRVVDLPTSPSMTPQFYTSSVVPIGALYAMSLWFSNSAYIYLSVSFIQMLKALMPVAVYSIGVLFKKETFRSSSMLNMLSISFGVAIAAYGEARFDVRGVALQLAAVAFEATRLVLIQILLTSKGISLNPITSLYYVAPCCFCFLLVPWAFVELPRLRAVGTFQPDFFVFGTNSLCAFALNLAVFLLVGKTSALTMNVAGVVKDWLLIAFSWSVIRDTVTPINLFGYGIAFLGVGYYNHVKLQALKAKEAQKKATQADEEAGSLLQERDGHSDRKSDNQA

SEQ ID NO: 38418 - DNA, 926 bp, Zea mays subsp. mays
tctccccctctggcctctaccctgcctgccgtttccatctccatccagttctccgcacccacccacccacccactcctttccccaacccatggccgccgccgccgccggcacccgggaggagatggtctacatggccaagctagcggagcaggcggagcggtacgaggagatggtggagttcatggagaaggtcgcggccgccgccgagctcaccgtcgaggagcgcaacctgctctccgtcgcctacaagaacgtcatcggcgcgcgccgcgcctcctggcgcatcgtctcctccatcgagcacaaggaggagacgcggggcgcggcggccgtggacgccagggtcttctacctcaagatgaagggggactaccaccgctacctcgccgagttcaagaccggcgccgagcgcaaggacgccgcggactccacgctcgccgcctaccaggccgcgcaggacatcgccgtcaaggagctgccgcccacgcatcccatcaggctcggcctcgccctcaacttctccgtcttctactacgagatcctcagctcgccggaccgcgcctgctcgctggccaagcaggccttcgacgaagctatttcagagctggatagtcttggggaagagtcgtacaaggatagcaccctcatcatgcagcttcttcgtgacaacctcaccttgtggacttctgacatgcaggaggatggtggcgatgaaatgcgggatgcaaataagcctgacgaggagcagtagtagtcgtcatgccatgccatgccatgccatgcttgtacaaggaccattttcgtgtgtcctttccttcaatcgtcgacctttcgttttgttgttatactgctattgtggaaccctgttactgttactgttagtgtatcctattggcaataatcaaatgtggtatggttgactact

SEQ ID NO: 38419 - protein, 249 aa, Zea mays subsp. mays
SPSGLYPACRFHLHPVLRTHPPTHSFPQPMAAAAAGTREEMVYMAKLAEQAERYEEMVEFMEKVAAAAELTVEERNLLSVAYKNVIGARRASWRIVSSIEHKEETRGAAAVDARVFYLKMKGDYHRYLAEFKTGAERKDAADSTLAAYQAAQDIAVKELPPTHPIRLGLALNFSVFYYEILSSPDRACSLAKQAFDEAISELDSLGEESYKDSTLIMQLLRDNLTLWTSDMQEDGGDEMRDANKPDEEQ

SEQ ID NO: 38420 - protein, 220 aa, Zea mays subsp. mays
MAAAAAGTREEMVYMAKLAEQAERYEEMVEFMEKVAAAAELTVEERNLLSVAYKNVIGARRASWRIVSSIEHKEETRGAAAVDARVFYLKMKGDYHRYLAEFKTGAERKDAADSTLAAYQAAQDIAVKELPPTHPIRLGLALNFSVFYYEILSSPDRACSLAKQAFDEAISELDSLGEESYKDSTLIMQLLRDNLTLWTSDMQEDGGDEMRDANKPDEEQ

SEQ ID NO: 38421 - protein, 209 aa, Zea mays subsp. mays
MVYMAKLAEQAERYEEMVEFMEKVAAAAELTVEERNLLSVAYKNVIGARRASWRIVSSIEHKEETRGAAAVDARVFYLKMKGDYHRYLAEFKTGAERKDAADSTLAAYQAAQDIAVKELPPTHPIRLGLALNFSVFYYEILSSPDRACSLAKQAFDEAISELDSLGEESYKDSTLIMQLLRDNLTLWTSDMQEDGGDEMRDANKPDEEQ

SEQ ID NO: 38422 - DNA, 1683 bp, Zea mays subsp. mays
ctgccaaactagcccttagcctacctttgcccctcccagccgtgggacgcgccacccttactccttactcccagctgccgcacacgtggaggctccacgcgaccacgcggcagcggcacgccggcacgcgcgccacccggcgcccctcagcctcgcgcctcagtctcgcgctctcgccgcgttaagccggtcagccttgcgggttgcggtctcgccgccgacgccgggcgccggggattgccgcctgcccgccttgctggagacgggagacgccatgtccttgctgctcctgcccctctgtcgaacctccgcggaccgcgccgttccctggttgtcgtaggacgtcggcaggagcccctccgccgtcacccgtcagacgcgccaccgcggcgccgcctccccaggctcccctgctctgctccacagcttcagtgctccgtgcaagagcaggaagactcttccagtaatcatgggtgcatgtgcctcttcatctcgtggtcgacccaaccatggcaagaaccagaaatcagcaaaggtcgcggcaattccatgtactccggcagcgcaggtaggtcgtggtgctgcctcttctgaaatggaagagaagagcagcttcatttggcaaatcgatggcttctcctcgcttcttgacaagcaagaaggatggaccaactccggatattttaagatcaaggaccttaattggtacttgcagttgaacctgaaggaccggaagagtggcgacgaaagagaatacgtctctcttatcctcgtgctgtcaaaaacttctggtctggaacccgacaccattgtcgaagcatcgttcaagctcttgatatacgatcaagcatacggacgacatagcgaacatgaatttagccacagattccagactacagagagcagcaggagctccgggatctcatgcatgatcctcgtctacacactcaaggaaccctcctccggtttcatcgttggtgacagctgtgtcttcggagtggagctcatcaagttcaccactgctaaagtcaaggacggttcaggaacgctgcatgttcagaagagaattggcttctgtagtgcccgggaggcctacacctggatcatcaatgacttcttaagcctgaaggggcggtgctactcaccggagtttgagatcggtggacacaaatggtacctgaccatgtacccttctggcactggcatcgacggtgataaggaaattctctccctctacctgcatatggccaagccaaacggagacgcttccctccagaactctggggtgcttgtagaagtcagtctgtccatcaaagacaaggtgaccagcaatcgcaaaacaatgacaggccggtgccagctccaagcgacggagggcgaaggctggggatggtcaaatttcatggcgacgaagtctgtgaaggactggtaccttgtgaagggcagctgcttaatcgaggcagatgttgccattcttggatcgtccaagatgaattagggatcatacgactctctacttttgtgcgtgtgccgagccaataatggaattgtgcagcgttagaccttatctgtttcatccctaaatcatagtgattaggaaggattggagaggattgaggagaattttgactgttaggaaatttaatccccttaatccctcctaacacccttgctttagggggt

SEQ ID NO: 38423 - protein, 342 aa, Zea mays subsp. mays
MGACASSSRGRPNHGKNQKSAKVAAIPCTPAAQVGRGAASSEMEEKSSFIWQIDGFSSLLDKQEGWTNSGYFKIKDLNWYLQLNLKDRKSGDEREYVSLILVLSKTSGLEPDTIVEASFKLLIYDQAYGRHSEHEFSHRFQTTESSRSSGISCMILVYTLKEPSSGFIVGDSCVFGVELIKFTTAKVKDGSGTLHVQKRIGFCSAREAYTWIINDFLSLKGRCYSPEFEIGGHKWYLTMYPSGTGIDGDKEILSLYLHMAKPNGDASLQNSGVLVEVSLSIKDKVTSNRKTMTGRCQLQATEGEGWGWSNFMATKSVKDWYLVKGSCLIEADVAILGSSKMN

SEQ ID NO: 38424 - protein, 300 aa, Zea mays subsp. mays
MEEKSSFIWQIDGFSSLLDKQEGWTNSGYFKIKDLNWYLQLNLKDRKSGDEREYVSLILVLSKTSGLEPDTIVEASFKLLIYDQAYGRHSEHEFSHRFQTTESSRSSGISCMILVYTLKEPSSGFIVGDSCVFGVELIKFTTAKVKDGSGTLHVQKRIGFCSAREAYTWIINDFLSLKGRCYSPEFEIGGHKWYLTMYPSGTGIDGDKEILSLYLHMAKPNGDASLQNSGVLVEVSLSIKDKVTSNRKTMTGRCQLQATEGEGWGWSNFMATKSVKDWYLVKGSCLIEADVAILGSSKMN

SEQ ID NO: 38425 - protein, 189 aa, Zea mays subsp. mays
MILVYTLKEPSSGFIVGDSCVFGVELIKFTTAKVKDGSGTLHVQKRIGFCSAREAYTWIINDFLSLKGRCYSPEFEIGGHKWYLTMYPSGTGIDGDKEILSLYLHMAKPNGDASLQNSGVLVEVSLSIKDKVTSNRKTMTGRCQLQATEGEGWGWSNFMATKSVKDWYLVKGSCLIEADVAILGSSKMN

SEQ ID NO: 38426 - DNA, 792 bp, Zea mays subsp. mays
ctcccggtccttctggacgcgacagcacaccacctctacgaagcatctcgaactctcggtgccgctcaatttgtacccccaatccccttccacacaccgcctcgccacatcgcagagccagagcaagggaagacgacgcagatctcgccacgcgaacacagttagatcgagggagtaagtgagagtgagagccatgacggagctgttcgacacggccgtgaccagcctcctccacctgccggaggtgctggaccgcctcgccgccgcagacggcgaccggcggtcggccggccaccacgcggcgcacggccacggccacggccacggccacggacgcgtccacgggctcggcggcggcggagcgccggtggacatcgtggagagcccccgcgagtacgccttcgtgctcgacgtgcccggcctctccaagtcagacatccaggtgacgctggaggaggaccgggtgctggtgatgaagggcggcagcggggcgcgttgcgtcgtacaagaagctccggctgctgcgcttcgtggacgccatccccaagtcggtgtccggcaagatcctgcggaggcagctcagggacgagttcgtcaagaagacggcagcagcgtaataatgcacatcatcctgtgggtggctgcttgattataccagtgcaagatcctgcattcgccacttgatgaagacaataatacaattagggtacagtcagatgttccaggctactgatacaattgttgtttctgcaaaaggtactcccaactagtgcatatacattggcattgtgg

SEQ ID NO: 38427 - protein, 151 aa, Zea mays subsp. mays
MTELFDTAVTSLLHLPEVLDRLAAADGDRRSAGHHAAHGHGHGHGHGRVHGLGGGGAPVDIVESPREYAFVLDVPGLSKSDIQVTLEEDRVLVMKGGSGARCVVQEAPAAALRGRHPQVGVRQDPAEAAQGRVRQEDGSSVIMHIILWVAA

SEQ ID NO: 38428 - DNA, 619 bp, Zea mays subsp. mays
acaatcgtcaaattcaaaaaaaaaaaaactgtggccgccacctcatcgcacaagccgttccgttctctgggttttcccgtgcgtccttccagcgccaaccacaaaaacgcaacgcatcgcgtcgcgattcgcgacggttccccccaaccccatcaagtctggccaggtctctcccatatcgggttctcccttcctcttcctgtttccgcgcgcgagatcgccgccccgggtgggctctagatcccgatggcctcgcgccgccgcaccctgctcaaggtcatcatcctcggcgacagcggggttgggaagacgtctttgatgaaccaatatgtgaacaagaagttcagcaaccagtacaaggctacgattggggcggatttcctcaccaaggaggtgcagttcgaggacaggctcttcactctgcaaatatgggacactgctggtcaggaaaggtttcagagtcttggcgttgcattctaccggggaggagaactaatatctgcactttattgtaccttaaatgatagccatgtttttattgtgaacctgtagtatgttgctaggcagtcagtttgaacattacaaatagcgtaagggcctctagccgggttggttaggt

SEQ ID NO: 38429 - protein, 173 aa, Zea mays subsp. mays
NRQIQKKKNCGRHLIAQAVPFSGFSRASFQRQPQKRNASRRDSRRFPPTPSSLARSLPYRVLPSSSCFRARDRRPGWALDPDGLAPPHPAQGHHPRRQRGWEDVFDEPICEQEVQQPVQGYDWGGFPHQGGAVRGQALHSANMGHCWSGKVSESWRCILPGRRTNICTLLYLK

SEQ ID NO: 38430 - protein, 105 aa, Zea mays subsp. mays
QSSNSKKKKLWPPPHRTSRSVLWVFPCVLPAPTTKTQRIASRFATVPPNPIKSGQVSPISGSPFLFLFPRARSPPRVGSRSRWPRAAAPCSRSSSSATAGLGRRL

SEQ ID NO: 38431 - protein, 101 aa, Zea mays subsp. mays
MASRRRTLLKVIILGDSGVGKTSLMNQYVNKKFSNQYKATIGADFLTKEVQFEDRLFTLQIWDTAGQERFQSLGVAFYRGGELISALYCTLNDSHVFIVNL

SEQ ID NO: 38432 - DNA, 917 bp, Zea mays subsp. mays
aattttcgctagttagcaccgcgcggggaactgagagaatcagagcgctggtgacgtcatcgctgtcgtgatcgacctcgtgcccagtcaacggagttcgctgcagcgcgcagaacaagtttttaacggtgttgggcgcgaagtcgggcacatcgggggtcaattcctcgctggcattgtagcaaagctccatccgcacgtggtcgagttcgcctccacccagggatcctcggagaagaacaggtggttcaagaggagccgcacaatgaggagttctatttgatctaagtggcatctcctagttgtgtggctcctctgcaactgtgctctcgccaccagactcaccacgtgggaccgacaagccattgcttcccttcagcaaggcagacgaacaagaagataagaaggatgtgccgaggccggtgacatactcctactctttctttcacctcatcttctccctggccagcatgtactcggcaatgctcttgactggctggtcaacttcggttggtgagagcggaaagcttgtggatgttgggtggccatctgtctgggtcaggattgcaacccagtgggcgacggcaggtctgttcatatggtcgcttgttgcacccgtcctctttcccgacagggaattctaagttcaaccacggtaagcctggagcatcaaacgtgtctactgtggtagctaatatatcctatcaagtatgttgcctttaaaacatgctccgagtcggtgtttgcccactgttatcaagtttgtctacttaataacatgtgactttaggcattgtgccactatcttaacagtgaacgtgtgtgctgcttgtattgtgtatatactggagaattttaagattgcatcatgcgagcgtgttgtgtatcgattgcttggtggctgtgtctgcggactt

SEQ ID NO: 38433 - protein, 69 aa, Zea mays subsp. mays
MLPLKHAPSRCLPTVIKFVYLITCDFRHCATILTVNVCAACIVYILENFKIASCERVVYRLLGGCVCGL

SEQ ID NO: 38434 - protein, 62 aa, Zea mays subsp. mays
MLGGHLSGSGLQPSGRRQVCSYGRLLHPSSFPTGNSKFNHGKPGASNVSTVVANISYQVCCL

SEQ ID NO: 38435 - protein, 57 aa, Zea mays subsp. mays
MYSAMLLTGWSTSVGESGKLVDVGWPSVWVRIATQWATAGLFIWSLVAPVLFPDREF

SEQ ID NO: 38436 - DNA, 1485 bp, Zea mays subsp. mays
aaaatccacgcgaccgcgattgctctcagaaggcactagcacgcaaaaaccccacgagagagacgaatcttccgaatctctcggtggcgatggcgctctccgaccgctcccgcgagtcgctcctcccgagcttcctctacgcctcctcggcgcgctctttcgctgccacaggagccgccgcgcgcctccctgtctcctccccagcgcctgccacggctggagcaggaggcggcgtgccgttctcgatccaggcgcccaaggagaagatcgagatgtactcgccggccttctatgccgcctgcactgccggaggaatcgccagctgcgggctcacccacatggccgtcacgcctctcgacctcgtcaagtgcaatatgcagattgacccagcgaaatacaagagtatctcatctggatttggtatcctgttaaaggagcaaggggccaggggtttcttcaggggatgggtgcctactttgcttggttacagtgctcagggggcttgcaagtttggcttctatgagttctttaagaagtattactcggacattgcagggcctgagtatgcccaaaagtacaagactctaatctacctcgcaggatctgcatctgctgaggtaattgctgatgtggctctctgcccttttgaagctgtgaaggtacgtgtgcagacacaacctggatttgctcgtggattgagtgatgggctccccaaatttgtccgatctgagggtgttcttgggctctacaagggaattgttcctctctggggtcgtcagattccttataccatgatgaagtttgcttcctttgagaccatcgttgagcttatctacaagcatgctgtgcctgttccgaagtctgagtgcagcaagactacccagttgggtattagctttgctggtggttacattgccggtgtgttctgtgctattgtttctcacccggctgacaaccttgtgtctttcctgaacaatgccaagggagctacagtgggagatgctgttaagaagcttggtctctggggtctcttcactagaggacttcctcttcgtatcgtcatgattggtacccttactggtgctcagtggggaatttacgatgcattcaaagtgatggttggactcccaacaacgggaggtgttacacctgccccagcagcagaggctgaattgaaagccagtgcttgatttttttttctgtgttccctgagatcatatttggtggagtggaattgtatcagccggtcgagagcttagttcccgaatcttttttaatcttaacggaaaatttgtccgtcatccttctgatgagaggaactcattaaacaggcgaaataggtctttttttgcgctgggaaaagtttacgcttgatgcataataatttgtaggacggcaacgctctagagcgcaggttttgttcacctcctgtaccgaggaatgcttaaagttacatttcacattatggtctttatgaaagagtgc

SEQ ID NO: 38437 - protein, 395 aa, Zea mays subsp. mays
NPRDRDCSQKALARKNPTRETNLPNLSVAMALSDRSRESLLPSFLYASSARSFAATGAAARLPVSSPAPATAGAGGGVPFSIQAPKEKIEMYSPAFYAACTAGGIASCGLTHMAVTPLDLVKCNMQIDPAKYKSISSGFGILLKEQGARGFFRGWVPTLLGYSAQGACKFGFYEFFKKYYSDIAGPEYAQKYKTLIYLAGSASAEVIADVALCPFEAVKVRVQTQPGFARGLSDGLPKFVRSEGVLGLYKGIVPLWGRQIPYTMMKFASFETIVELIYKHAVPVPKSECSKTTQLGISFAGGYIAGVFCAIVSHPADNLVSFLNNAKGATVGDAVKKLGLWGLFTRGLPLRIVMIGTLTGAQWGIYDAFKVMVGLPTTGGVTPAPAAEAELKASA

SEQ ID NO: 38438 - protein, 366 aa, Zea mays subsp. mays
MALSDRSRESLLPSFLYASSARSFAATGAAARLPVSSPAPATAGAGGGVPFSIQAPKEKIEMYSPAFYAACTAGGIASCGLTHMAVTPLDLVKCNMQIDPAKYKSISSGFGILLKEQGARGFFRGWVPTLLGYSAQGACKFGFYEFFKKYYSDIAGPEYAQKYKTLIYLAGSASAEVIADVALCPFEAVKVRVQTQPGFARGLSDGLPKFVRSEGVLGLYKGIVPLWGRQIPYTMMKFASFETIVELIYKHAVPVPKSECSKTTQLGISFAGGYIAGVFCAIVSHPADNLVSFLNNAKGATVGDAVKKLGLWGLFTRGLPLRIVMIGTLTGAQWGIYDAFKVMVGLPTTGGVTPAPAAEAELKASA

SEQ ID NO: 38439 - protein, 305 aa, Zea mays subsp. mays
MYSPAFYAACTAGGIASCGLTHMAVTPLDLVKCNMQIDPAKYKSISSGFGILLKEQGARGFFRGWVPTLLGYSAQGACKFGFYEFFKKYYSDIAGPEYAQKYKTLIYLAGSASAEVIADVALCPFEAVKVRVQTQPGFARGLSDGLPKFVRSEGVLGLYKGIVPLWGRQIPYTMMKFASFETIVELIYKHAVPVPKSECSKTTQLGISFAGGYIAGVFCAIVSHPADNLVSFLNNAKGATVGDAVKKLGLWGLFTRGLPLRIVMIGTLTGAQWGIYDAFKVMVGLPTTGGVTPAPAAEAELKASA

SEQ ID NO: 38440 - DNA, 676 bp, Zea mays subsp. mays
atgctttcatggatagggttaaggaggatttcacaaaaaggtatggtggtgggaaagctgctactgctgcagctaacagcctcaatcgagagtttggatcaaaacttaaagaacacatgcagtattgtgtggatcaccctgaagaggttagcaagctggccaaagtgaaggcgcaggtttcagaagtcaagggtgttatgatggaaaacattgaaaaggttctggatcgtggagagaagattgagctgcttgtcgacaagacccgagaatcttcgctcacaggcacaagatttcagacagcagggaacaaatgtcaggagaaagatgtggttacagaacatgaaaatcaagctcatcgtcctgggaataatcatcgcactcattctgatcattatcctctctgtctgtcatggtttcaaatgccattaagcacagaccagaatactgatacattcaactgcacctattatactgctgcttggagcaaaaaaaagtatgatcttttgttgtttcgctagtgtgctgtggcccggtcattatgcataggtgttttacattgtcgtagtgtttgataaatgatggatggtgactgggtttgttgtgtcaactgtcataactattgtgcatttttggacgctatatgtgtagccttgatatgaatagatttactgtactt

SEQ ID NO: 38441 - protein, 171 aa, Zea mays subsp. mays
AFMDRVKEDFTKRYGGGKAATAAANSLNREFGSKLKEHMQYCVDHPEEVSKLAKVKAQVSEVKGVMMENIEKVLDRGEKIELLVDKTRESSLTGTRFQTAGNKCQEKDVVTEHENQAHRPGNNHRTHSDHYPLCLSWFQMPLSTDQNTDTFNCTYYTAAWSKKKYDLLLFR

SEQ ID NO: 38442 - protein, 169 aa, Zea mays subsp. mays
MDRVKEDFTKRYGGGKAATAAANSLNREFGSKLKEHMQYCVDHPEEVSKLAKVKAQVSEVKGVMMENIEKVLDRGEKIELLVDKTRESSLTGTRFQTAGNKCQEKDVVTEHENQAHRPGNNHRTHSDHYPLCLSWFQMPLSTDQNTDTFNCTYYTAAWSKKKYDLLLFR

SEQ ID NO: 38443 - protein, 133 aa, Zea mays subsp. mays
MQYCVDHPEEVSKLAKVKAQVSEVKGVMMENIEKVLDRGEKIELLVDKTRESSLTGTRFQTAGNKCQEKDVVTEHENQAHRPGNNHRTHSDHYPLCLSWFQMPLSTDQNTDTFNCTYYTAAWSKKKYDLLLFR

SEQ ID NO: 38444 - DNA, 445 bp, Zea mays subsp. mays
aaaatcagtaattaatccgtcacctataatattttgagcattcagaaacacacctagcgaagcgcactagcaacgacctaacaacaatggctaccaagatattatccctccttgcgattcttgcccttttagtgagcgcaacaaatgcgttcattattccacaatgctcacttgctcctagtgccattattccacagttcctcccaccagttacttcaatgggcttcgaacacccagttgtgcaagcctacaggctacaacaagcgcttgcggcgagcgtcttacaacaaccaattgcccaattacaacaacaatccttggcacatctaacaatacaaaccatcgcaacgcaacagcaacaacagttcctaccaacactgagccacctagccatggtgaaccctgccgcctacttgcaacaacaactgcttgcatccaacccaat

SEQ ID NO: 38445 - protein, 119 aa, Zea mays subsp. mays
MATKILSLLAILALLVSATNAFIIPQCSLAPSAIIPQFLPPVTSMGFEHPVVQAYRLQQALAASVLQQPIAQLQQQSLAHLTIQTIATQQQQQFLPTLSHLAMVNPAAYLQQQLLASNP

SEQ ID NO: 38446 - protein, 75 aa, Zea mays subsp. mays
MGFEHPVVQAYRLQQALAASVLQQPIAQLQQQSLAHLTIQTIATQQQQQFLPTLSHLAMVNPAAYLQQQLLASNP

SEQ ID NO: 38447 - protein, 61 aa, Zea mays subsp. mays
MRSLFHNAHLLLVPLFHSSSHQLLQWASNTQLCKPTGYNKRLRRASYNNQLPNYNNNPWHI

SEQ ID NO: 38448 - DNA, 845 bp, Zea mays subsp. mays
aaaaaacaatattttgtaaacatgaccttaccctagatcttagaaactctctctctaaacaaaaggcaccctgtttcccgttcgtgagaaattcctcgcagacacgggcgcgcctactcaaccgaggccaacaagtcaaggcgagtgcggagtagaggcacaaggtcggatgcctagagagatttcccggtcgcctccgccattccgccggcgaggctcccctcctctgcggtacgctagccggagaaacagacgagatcggagccgctccccttacgcctctcggcgaaaaactcgttctccttctccactatgggacaggagcaactcaccaagtccaagaaggcatagaagcccactatctccaaggagacacagaagacagagaagtcggagcactacaagttcattagagaataacccatccagtccaagtcacgcatcagagaaaataaattcatctgtaaaacaaaggctggaagaagaaaagaaaaggcgtcaaaaggaagctgaatttaagttactggaagaggagcttgctagaagggtcgaagaagctataaggaaaaatgttgaggaacgtctgaaatctgaagaggtgaaacgtgacatagaacaccgaattgaggagggtattagaaagttatttgatgaggttgacgctcagctacaaaaagagaaagaagtggccctttatgaggccaggcagaaagcagaacaagaaagaagagagagggaggagttggatagaatgctcgaagagaacaggcgtaaagtggaggaagcttggaactttataaatcgttgtcatgcccatggctttctatttctttctcggagctgcg

SEQ ID NO: 38449 - protein, 225 aa, Zea mays subsp. mays
MPREISRSPPPFRRRGSPPLRYASRRNRRDRSRSPYASRRKTRSPSPLWDRSNSPSPRRHRSPLSPRRHRRQRSRSTTSSLENNPSSPSHASEKINSSVKQRLEEEKKRRQKEAEFKLLEEELARRVEEAIRKNVEERLKSEEVKRDIEHRIEEGIRKLFDEVDAQLQKEKEVALYEARQKAEQERREREELDRMLEENRRKVEEAWNFINRCHAHGFLFLSRSC

SEQ ID NO: 38450 - DNA, 1856 bp, Zea mays subsp. mays
  misc_feature (1488)..(1488): n is a, c, g, or t
gatgatgggagggcgcgctctgctgctgctcctggtctcggcgctgctcgttcagatccgcgcctctgacccgctgctgtacgagccgtttgatgaggacttcgagggtagatggatcgtctccaagaaggatgaataccaaggtgtatggaagcatgccaagagtgatgggcatgaggactatggcctccttgttagtgacaaggcaaggaaatacgccataatcaaggagcttgatgagccagttaccttaaatgatgggacagtggtcctgcagtttgaagtgagacttcagaatggccttgaatgtggaggtgcctacattaagtacatccgccctcaggatgctggatgggatgccaaggagtttgataatgagactccatacactattatgtttggtccagataaatgtgggtcaaccaacaaggttcatttcatccttaagcacaagaatcctaagactggaaagtatgttgagcatcacctcaaattcccaccttctgtcccatacgacaagctctctcatgtctacacagctatcttgaagccagacaatgaggtcagaattttgatcgatggggaagaaaagaagaaggcaaacttcctttctgctgatgactttgagccagcacttatcccatccaagaccattcctgaccctgatgacaagaagccggaggactgggatgagagagctaaaatccctgatccagatgcagtgaagcctgatgattgggatgaggatgcccccatggaaattgtggatgaggaagccaccaagcctgagggatggttggatgatgaacccgaggagattgatgatcctgaggcagccaagcccgaggactgggacgatgaagaggatggtgaatgggaggcaccaaagattgacaaccccaagtgtgaagaggcacctggatgtggcgagtggaagaggccgatgaagcagaatcctgcttacaaaggcaagtggcatgcacctatgattgacaaccccaactacaagggaatctggaagcctcaggagatacccaaccctgagtactttgagcttgacaggcctgattttgatccaattgctgctattgggattgagatctggacaatgcaggatggcatcctgttcgacaatatcttgattgctgatgatgagaaagttgccacctccattctggagaagacatggaagcccaagtatgatgttgagaaggaaaaggagaaggctgaggaggctgctgctggtgcagatggtctttctgacttccagaagaagatttttgacgtcctgtacaagattgctgatattccgttcttggcaccctacaagaccaagattattgatgttatcgagaagggagagaagcagcccaacatcactattggcattttggtctccgttgtcatcgtgttcgttaccgttctcttcaagatcctttttggtggcaagaaaccagtggcacctgtgaaacctgcagctgagggcgnaagtaagcccaaggccgcggagacggacggtgctggaagcagtggtgacaaggatgagaaagaggatgaaaaggacgagacaggcccacgtcggaggacccgaagaggagacatagacctgtttttgacgtgttttagctcttctggcgtctgcttattttgagaactcttaatatttgtgagtgtataataggagcttatgtcacctctgcggcttcccccgctgctgatttgtttttaatggttagaccaggacccttcacgagcgtagaatttagttcttgttggtcatttatgtgctgtgcctgacggtgttcaatcagatagaggtgatggtttttttggtagatcaaatcaaggaatatttc

SEQ ID NO: 38451 - protein, 549 aa, Zea mays subsp. mays
  misc_feature (496)..(496): Xaa can be any naturally occurring amino acid
MMGGRALLLLLVSALLVQIRASDPLLYEPFDEDFEGRWIVSKKDEYQGVWKHAKSDGHEDYGLLVSDKARKYAIIKELDEPVTLNDGTVVLQFEVRLQNGLECGGAYIKYIRPQDAGWDAKEFDNETPYTIMFGPDKCGSTNKVHFILKHKNPKTGKYVEHHLKFPPSVPYDKLSHVYTAILKPDNEVRILIDGEEKKKANFLSADDFEPALIPSKTIPDPDDKKPEDWDERAKIPDPDAVKPDDWDEDAPMEIVDEEATKPEGWLDDEPEEIDDPEAAKPEDWDDEEDGEWEAPKIDNPKCEEAPGCGEWKRPMKQNPAYKGKWHAPMIDNPNYKGIWKPQEIPNPEYFELDRPDFDPIAAIGIEIWTMQDGILFDNILIADDEKVATSILEKTWKPKYDVEKEKEKAEEAAAGADGLSDFQKKIFDVLYKIADIPFLAPYKTKIIDVIEKGEKQPNITIGILVSVVIVFVTVLFKILFGGKKPVAPVKPAAEGXSKPKAAETDGAGSSGDKDEKEDEKDETGPRRRTRRGDIDLFLTCFSSSGVCLF

SEQ ID NO: 38452 - protein, 548 aa, Zea mays subsp. mays
  misc_feature (495)..(495): Xaa can be any naturally occurring amino acid
MGGRALLLLLVSALLVQIRASDPLLYEPFDEDFEGRWIVSKKDEYQGVWKHAKSDGHEDYGLLVSDKARKYAIIKELDEPVTLNDGTVVLQFEVRLQNGLECGGAYIKYIRPQDAGWDAKEFDNETPYTIMFGPDKCGSTNKVHFILKHKNPKTGKYVEHHLKFPPSVPYDKLSHVYTAILKPDNEVRILIDGEEKKKANFLSADDFEPALIPSKTIPDPDDKKPEDWDERAKIPDPDAVKPDDWDEDAPMEIVDEEATKPEGWLDDEPEEIDDPEAAKPEDWDDEEDGEWEAPKIDNPKCEEAPGCGEWKRPMKQNPAYKGKWHAPMIDNPNYKGIWKPQEIPNPEYFELDRPDFDPIAAIGIEIWTMQDGILFDNILIADDEKVATSILEKTWKPKYDVEKEKEKAEEAAAGADGLSDFQKKIFDVLYKIADIPFLAPYKTKIIDVIEKGEKQPNITIGILVSVVIVFVTVLFKILFGGKKPVAPVKPAAEGXSKPKAAETDGAGSSGDKDEKEDEKDETGPRRRTRRGDIDLFLTCFSSSGVCLF

SEQ ID NO: 38453 - protein, 418 aa, Zea mays subsp. mays
  misc_feature (365)..(365): Xaa can be any naturally occurring amino acid
MFGPDKCGSTNKVHFILKHKNPKTGKYVEHHLKFPPSVPYDKLSHVYTAILKPDNEVRILIDGEEKKKANFLSADDFEPALIPSKTIPDPDDKKPEDWDERAKIPDPDAVKPDDWDEDAPMEIVDEEATKPEGWLDDEPEEIDDPEAAKPEDWDDEEDGEWEAPKIDNPKCEEAPGCGEWKRPMKQNPAYKGKWHAPMIDNPNYKGIWKPQEIPNPEYFELDRPDFDPIAAIGIEIWTMQDGILFDNILIADDEKVATSILEKTWKPKYDVEKEKEKAEEAAAGADGLSDFQKKIFDVLYKIADIPFLAPYKTKIIDVIEKGEKQPNITIGILVSVVIVFVTVLFKILFGGKKPVAPVKPAAEGXSKPKAAETDGAGSSGDKDEKEDEKDETGPRRRTRRGDIDLFLTCFSSSGVCLF

SEQ ID NO: 38454 - DNA, 626 bp, Zea mays subsp. mays
agtcccccccccactgagaagaaggagagctcagaaaccaaagaagctcggaagagcacgcagagtccagaaggcggcggcaaaggcgacgagggtccagacagcaaggcggagggcgagaaggaagcggccgttgttgaccttaggccactgacgatggaagacctgaggcaggcaaagaaccaggttgcagcgagcttcgccgccgagggtgccgtgatgaacgagctcaggcagtggaacgacctgtacggcgaaggggggtccaggaagaaacagcagctgacctacttcttgtagaggtgaagcatttggcaggtggtggagaggaacagagctgggcagacggtggacccatacttgatgaaccgagcatggtttcttcaagacgtgacgtgggcatgacgcatagtactagtctttgaggttccaggatccatgagatgagatgaggtcgatggtcaatttgtaggatcatgaactattattcttttacatgcatttgtacatgagcgctagactggttatgtatatctggattgattgaacagctcttgtgtttgagggtcattttagcttctcgtagactgctgtaattatatcatatatagtgagtatatatattc

SEQ ID NO: 38455 - protein, 99 aa, Zea mays subsp. mays
SPPPTEKKESSETKEARKSTQSPEGGGKGDEGPDSKAEGEKEAAVVDLRPLTMEDLRQAKNQVAASFAAEGAVMNELRQWNDLYGEGGSRKKQQLTYFL

SEQ ID NO: 38456 - protein, 50 aa, Zea mays subsp. mays
VPPPLRRRRAQKPKKLGRARRVQKAAAKATRVQTARRRARRKRPLLTLGH

SEQ ID NO: 38457 - protein, 47 aa, Zea mays subsp. mays
MEDLRQAKNQVAASFAAEGAVMNELRQWNDLYGEGGSRKKQQLTYFL

SEQ ID NO: 38458 - DNA, 987 bp, Zea mays subsp. mays
aaaatcagtaattaatccgtcacctataatattttgagcattcagaaacacaccaagcgaagcacattagcaacaacctaacaacaatggctaccaagatattatccctccttgcgcttcttgcgctttttgcgagcgcaacaaatgcgttcattattccacaatgctcacttgctccaagttccattattacacagttcctcccaccagttacttcaatgggcttcgaacacccagctgtgcaagcctataggctacaacaagcaattgcggcgagcgtcttacaacaaccaatttcccagttgcaacaacaatccttggcacatctaacaatacaaaccatcgcaacgcaacagcaacaacagttcctaccagcactgagccacctagccatggtgaaccctgtcgcctacttgcaacagcagctgcttgcatccaacccacttgctctagcaaacgtagttgcaaaccagcaacaacaacagctgcaacagtttctgccagcgcttagtcaactagccatggtgaaccctgccgcctacctacaacagcaacaactgctttcatctagcccgctcgctgtggccaatgcacctacatacctgcaacaagaattgttgcaacagattgtaccagctctgactcagctagttgtggcaaaccctgttgcctacttgcaacagctgcttccattcaaccaactgactatgtcgaactctgctgcgtacctacaacagcgacaacagttacttaatccattggcagtggctaacccattggtcgctgccttcctacagcagcaacaattgctgccatacaaccagttctctttgataaaccctgtcttgtcgaggcagcaacccatcgttggaggtgccatcttttagattacatatgagatgtactcgataatggtgccctcattccggcatgtgtttcctagaaataatcaatatattgattgagatttatctcaatatatttctg

SEQ ID NO: 38459 - protein, 266 aa, Zea mays subsp. mays
MATKILSLLALLALFASATNAFIIPQCSLAPSSIITQFLPPVTSMGFEHPAVQAYRLQQAIAASVLQQPISQLQQQSLAHLTIQTIATQQQQQFLPALSHLAMVNPVAYLQQQLLASNPLALANVVANQQQQQLQQFLPALSQLAMVNPAAYLQQQQLLSSSPLAVANAPTYLQQELLQQIVPALTQLVVANPVAYLQQLLPFNQLTMSNSAAYLQQRQQLLNPLAVANPLVAAFLQQQQLLPYNQFSLINPVLSRQQPIVGGAIF

SEQ ID NO: 38460 - protein, 222 aa, Zea mays subsp. mays
MGFEHPAVQAYRLQQAIAASVLQQPISQLQQQSLAHLTIQTIATQQQQQFLPALSHLAMVNPVAYLQQQLLASNPLALANVVANQQQQQLQQFLPALSQLAMVNPAAYLQQQQLLSSSPLAVANAPTYLQQELLQQIVPALTQLVVANPVAYLQQLLPFNQLTMSNSAAYLQQRQQLLNPLAVANPLVAAFLQQQQLLPYNQFSLINPVLSRQQPIVGGAIF

SEQ ID NO: 38461 - protein, 164 aa, Zea mays subsp. mays
MVNPVAYLQQQLLASNPLALANVVANQQQQQLQQFLPALSQLAMVNPAAYLQQQQLLSSSPLAVANAPTYLQQELLQQIVPALTQLVVANPVAYLQQLLPFNQLTMSNSAAYLQQRQQLLNPLAVANPLVAAFLQQQQLLPYNQFSLINPVLSRQQPIVGGAIF

SEQ ID NO: 38462 - DNA, 897 bp, Zea mays subsp. mays
  misc_feature (312)..(313): n is a, c, g, or t
  misc_feature (815)..(815): n is a, c, g, or t
  misc_feature (840)..(840): n is a, c, g, or t
ctctacaaatgaaacccctgagacagtcagacgtcccgtgctcgtcatcaccacccacatctcagttcaccccggcgtcgtcctcttcccccggcgctactctcccgctccacgttccaaaggaaagatggcgtcccatattgttggataccctcgcatgggccccaagagagagctcaagtttgccttggagtctttctgggatgggaagagcagcgccgatgatttagagaaagttgcctctgacctcaggtctagcatctggaagcaaatgtcagaagctgggatcaagtacattcccagcaacacctnntcgtactatgaccaggtccttgataccacggccatgcttggtgctgtcccagagcgctactcttggactggaggcgagattggcttgagcacctatttctcaatggccaggggaaatgccactgtccctgctatggagatgaccaagtggtttgatacaaactaccactttattgtccctgaacttggcccaagcaccaagttcacatacgcttctcacaaggctgtttctgagtacaaggaggcaaaagcgctcggtattgatactgtcccagtgcttgttggaccagtgtcatacttgctcctctctaagcctgccaagggtgtggagaaatctttctctcttctttcgcttcttggcagcattcttcccatctacaaggaggttgtttctgaactgaaggcagctggtgcttcatggattcagtttgatgagcctacccttgttaaagaccttgatgttcacgaattggcagcattctcttcagcatatgctgaactanagtcggcattctctggattgaatgngcttattgagacatactttgctgacattcctgctgagtcctacaagaccctcacgtc

SEQ ID NO: 38463 - protein, 298 aa, Zea mays subsp. mays
  misc_feature (104)..(104): Xaa can be any naturally occurring amino acid
  misc_feature (272)..(272): Xaa can be any naturally occurring amino acid
  misc_feature (280)..(280): Xaa can be any naturally occurring amino acid
STNETPETVRRPVLVITTHISVHPGVVLFPRRYSPAPRSKGKMASHIVGYPRMGPKRELKFALESFWDGKSSADDLEKVASDLRSSIWKQMSEAGIKYIPSNTXSYYDQVLDTTAMLGAVPERYSWTGGEIGLSTYFSMARGNATVPAMEMTKWFDTNYHFIVPELGPSTKFTYASHKAVSEYKEAKALGIDTVPVLVGPVSYLLLSKPAKGVEKSFSLLSLLGSILPIYKEVVSELKAAGASWIQFDEPTLVKDLDVHELAAFSSAYAELXSAFSGLNXLIETYFADIPAESYKTLT

SEQ ID NO: 38464 - protein, 256 aa, Zea mays subsp. mays
  misc_feature (62)..(62): Xaa can be any naturally occurring amino acid
  misc_feature (230)..(230): Xaa can be any naturally occurring amino acid
  misc_feature (238)..(238): Xaa can be any naturally occurring amino acid
MASHIVGYPRMGPKRELKFALESFWDGKSSADDLEKVASDLRSSIWKQMSEAGIKYIPSNTXSYYDQVLDTTAMLGAVPERYSWTGGEIGLSTYFSMARGNATVPAMEMTKWFDTNYHFIVPELGPSTKFTYASHKAVSEYKEAKALGIDTVPVLVGPVSYLLLSKPAKGVEKSFSLLSLLGSILPIYKEVVSELKAAGASWIQFDEPTLVKDLDVHELAAFSSAYAELXSAFSGLNXLIETYFADIPAESYKTLT

SEQ ID NO: 38465 - protein, 246 aa, Zea mays subsp. mays
  misc_feature (52)..(52): Xaa can be any naturally occurring amino acid
  misc_feature (220)..(220): Xaa can be any naturally occurring amino acid
  misc_feature (228)..(228): Xaa can be any naturally occurring amino acid
MGPKRELKFALESFWDGKSSADDLEKVASDLRSSIWKQMSEAGIKYIPSNTXSYYDQVLDTTAMLGAVPERYSWTGGEIGLSTYFSMARGNATVPAMEMTKWFDTNYHFIVPELGPSTKFTYASHKAVSEYKEAKALGIDTVPVLVGPVSYLLLSKPAKGVEKSFSLLSLLGSILPIYKEVVSELKAAGASWIQFDEPTLVKDLDVHELAAFSSAYAELXSAFSGLNXLIETYFADIPAESYKTLT

SEQ ID NO: 38466 - DNA, 2887 bp, Zea mays subsp. mays
ggctgagaccgctcagcgacaaggagatttcaaggggggacccggcggagtgggagtgcatcaacgacactaccatcatctcccggagcaccttcccggaccggcccactgctccgactgcgtattcgttcgatagggtatttcgttctgactgtactaccaaagaagtatatgaggaagggaccaaagcagttgccctctctgtagttagtggcattaactcaagtgtttttgcatatggtcaaacaagtagtggaaaaacatacaccatgactggaataacggaatatacagcagcagatatctatgattacattgccaagcatgaagagagagcgtttgtattgaaattttcagcaatcgaaatatataacgaagttgtaagggatcttcttagtgcagaaaacacatcgcttagactttgggatgatgcagagaagggaacatgtgtagagaaccttacagaggtgaccttgagggattcagaccacctgaaagaacttattctacgtgtgaagctcaaaaggaggaccggagagacatacttaaatgaaaacagctccagatcacaccaaatacttaaactgactattgaaagttctgctcatgagttcttgggtaaggacaagtcaacaacacttgttgctagtgtgaacttcgttgatttggctggaagtgaacgtgcatcccaggcattatcagctgggactaggctgaaggaaggttgtcatattaatagaagtctacttaccctaggaactggtattcggaaactaagcaaggtaagaaatgggcacataccataccgagattcaaagctcacgcgcatattcaccttctctaggaggcaatgcaagaacagcaattatttgtacaatgagcccagcccggagccatatggacagtcaaggaataccttgttgtttgcaagttgtgcaaaggaagtggtgacaaatgcccaggttaatgtcgttatgtctgataaggcactggttaagcaattacaaaaagaacttgcaaggttggagagtgaattgcgatgcccagcttcatattctggtcttgaagcattagtgagagaaaaagataatcaaatccggaagatggataaagaaattaaggaactgaagttacatcgtgatcttgctcagtctagactgcaagatttgctcaaggttgttggagataaccacggttcgaagcaccccctggcttcttctgcaagaaattttacttttgatgttcctcagccatgtgaggatgagcaatcgacgacatcagaagctttcagcagtggccaaattttaggcttcaaggcgcctgacacacaaagagattataggtcacagcaatctgaaaatgatgtgcagtttgctacccctcttagctattcaatcagcagtcccccattcagtgggatgcctccaactaatggcagaaatgataactctcatatatctgatgaagattcagaggatctttgcaaagaagtacggtgcatagagaccaatgaaacagaagaaaatgaatgcttagagtcgtcagctgtgggaagcaatagtctgcaagattcaaatttagcttccagcatgcatgggaacgacaatacaaatcgatctgtgaattctggacggaatgatgcatcttctattaccctggaacaacatctggagaatgtcaaaaaaccgtttgccaatcctggcatggatctgggatcctctacacgtaactcgtcaagctcaaaagtaattggcagaagcaggagctgtaggtctctgatgggttctactctgttggaagacttggagaaagaagtttgcacccctccaagcagaagtttcatggactacccagggaggcccgaaacatgtcaaagaagggtacccgcactgaactacgatgcagagagtgaagctttatccagggcaggatcaatgctatctgaaattaccaccacgaggggtggactgaaggaaaacagctctgctgctggtgatacagaatttgttgctggcataggtgaatttgtcgcggagctaaaagaaatggcccagggtcataatggagaattggctgaagggaccataaggagcgtggggctggatcccattatggatatcttgcaatcaccttctcgctggcctttggaattcgagaagaaacagcaggagatcattgacctgtggcatggatgcaacgtttccttggtccacaggacttactttttcctgctgttcaaaggggacccagccgacgccatttacatggaagtggagcttaggaggttatcatttctcaagaacacatactccaacggaagcatggggtatgatatggtggcaggcagcttgagcacttctctggtttcaagtgcaaagaaactgcaacgcgagagggagatgctctgcaggcagatgcagaagcggctgacgatccaggaacgggagagcctgtacaccaagtggggagtctcgctgtcctccaagaggaggcggctgcaggtcgctcggcgcctttggacggagaccagggacctggagcatgtgagggagagcgcgtccctcgtggccagactgatcgggctcctggagcctgggaaggcgctgagggagatgtttggtctgagcttcgcgccgcagcagtccacccggaggtcgcacagtagttggcggtatggccgttcttctctagactgactgagctcgaaagacgcagctgacaaaaaaacaacaacagttattccgttgttttcgttttgtgtagtgcctgatttttttgctgtcctctcggaaaatagaaattcctgaacattttgtgaccagtctgcgagaaaatttggtagcattttcaagatttattgatgtttacaatttggaaaccgtcaacg

SEQ ID NO: 38467 - protein, 897 aa, Zea mays subsp. mays
LRPLSDKEISRGDPAEWECINDTTIISRSTFPDRPTAPTAYSFDRVFRSDCTTKEVYEEGTKAVALSVVSGINSSVFAYGQTSSGKTYTMTGITEYTAADIYDYIAKHEERAFVLKFSAIEIYNEVVRDLLSAENTSLRLWDDAEKGTCVENLTEVTLRDSDHLKELILRVKLKRRTGETYLNENSSRSHQILKLTIESSAHEFLGKDKSTTLVASVNFVDLAGSERASQALSAGTRLKEGCHINRSLLTLGTGIRKLSKVRNGHIPYRDSKLTRIFTFSRRQCKNSNYLYNEPSPEPYGQSRNTLLFASCAKEVVTNAQVNVVMSDKALVKQLQKELARLESELRCPASYSGLEALVREKDNQIRKMDKEIKELKLHRDLAQSRLQDLLKVVGDNHGSKHPLASSARNFTFDVPQPCEDEQSTTSEAFSSGQILGFKAPDTQRDYRSQQSENDVQFATPLSYSISSPPFSGMPPTNGRNDNSHISDEDSEDLCKEVRCIETNETEENECLESSAVGSNSLQDSNLASSMHGNDNTNRSVNSGRNDASSITLEQHLENVKKPFANPGMDLGSSTRNSSSSKVIGRSRSCRSLMGSTLLEDLEKEVCTPPSRSFMDYPGRPETCQRRVPALNYDAESEALSRAGSMLSEITTTRGGLKENSSAAGDTEFVAGIGEFVAELKEMAQGHNGELAEGTIRSVGLDPIMDILQSPSRWPLEFEKKQQEIIDLWHGCNVSLVHRTYFFLLFKGDPADAIYMEVELRRLSFLKNTYSNGSMGYDMVAGSLSTSLVSSAKKLQREREMLCRQMQKRLTIQERESLYTKWGVSLSSKRRRLQVARRLWTETRDLEHVRESASLVARLIGLLEPGKALREMFGLSFAPQQSTRRSHSSWRYGRSSLD

SEQ ID NO: 38468 - protein, 808 aa, Zea mays subsp. mays
MTGITEYTAADIYDYIAKHEERAFVLKFSAIEIYNEVVRDLLSAENTSLRLWDDAEKGTCVENLTEVTLRDSDHLKELILRVKLKRRTGETYLNENSSRSHQILKLTIESSAHEFLGKDKSTTLVASVNFVDLAGSERASQALSAGTRLKEGCHINRSLLTLGTGIRKLSKVRNGHIPYRDSKLTRIFTFSRRQCKNSNYLYNEPSPEPYGQSRNTLLFASCAKEVVTNAQVNVVMSDKALVKQLQKELARLESELRCPASYSGLEALVREKDNQIRKMDKEIKELKLHRDLAQSRLQDLLKVVGDNHGSKHPLASSARNFTFDVPQPCEDEQSTTSEAFSSGQILGFKAPDTQRDYRSQQSENDVQFATPLSYSISSPPFSGMPPTNGRNDNSHISDEDSEDLCKEVRCIETNETEENECLESSAVGSNSLQDSNLASSMHGNDNTNRSVNSGRNDASSITLEQHLENVKKPFANPGMDLGSSTRNSSSSKVIGRSRSCRSLMGSTLLEDLEKEVCTPPSRSFMDYPGRPETCQRRVPALNYDAESEALSRAGSMLSEITTTRGGLKENSSAAGDTEFVAGIGEFVAELKEMAQGHNGELAEGTIRSVGLDPIMDILQSPSRWPLEFEKKQQEIIDLWHGCNVSLVHRTYFFLLFKGDPADAIYMEVELRRLSFLKNTYSNGSMGYDMVAGSLSTSLVSSAKKLQREREMLCRQMQKRLTIQERESLYTKWGVSLSSKRRRLQVARRLWTETRDLEHVRESASLVARLIGLLEPGKALREMFGLSFAPQQSTRRSHSSWRYGRSSLD

SEQ ID NO: 38469 - protein, 573 aa, Zea mays subsp. mays
MSDKALVKQLQKELARLESELRCPASYSGLEALVREKDNQIRKMDKEIKELKLHRDLAQSRLQDLLKVVGDNHGSKHPLASSARNFTFDVPQPCEDEQSTTSEAFSSGQILGFKAPDTQRDYRSQQSENDVQFATPLSYSISSPPFSGMPPTNGRNDNSHISDEDSEDLCKEVRCIETNETEENECLESSAVGSNSLQDSNLASSMHGNDNTNRSVNSGRNDASSITLEQHLENVKKPFANPGMDLGSSTRNSSSSKVIGRSRSCRSLMGSTLLEDLEKEVCTPPSRSFMDYPGRPETCQRRVPALNYDAESEALSRAGSMLSEITTTRGGLKENSSAAGDTEFVAGIGEFVAELKEMAQGHNGELAEGTIRSVGLDPIMDILQSPSRWPLEFEKKQQEIIDLWHGCNVSLVHRTYFFLLFKGDPADAIYMEVELRRLSFLKNTYSNGSMGYDMVAGSLSTSLVSSAKKLQREREMLCRQMQKRLTIQERESLYTKWGVSLSSKRRRLQVARRLWTETRDLEHVRESASLVARLIGLLEPGKALREMFGLSFAPQQSTRRSHSSWRYGRSSLD

SEQ ID NO: 38470 - DNA, 492 bp, Zea mays subsp. mays
  misc_feature (206)..(206): n is a, c, g, or t
  misc_feature (208)..(208): n is a, c, g, or t
  misc_feature (212)..(213): n is a, c, g, or t
  misc_feature (216)..(218): n is a, c, g, or t
  misc_feature (229)..(229): n is a, c, g, or t
  misc_feature (237)..(237): n is a, c, g, or t
  misc_feature (239)..(239): n is a, c, g, or t
  misc_feature (243)..(243): n is a, c, g, or t
  misc_feature (256)..(256): n is a, c, g, or t
  misc_feature (261)..(261): n is a, c, g, or t
  misc_feature (269)..(269): n is a, c, g, or t
  misc_feature (297)..(297): n is a, c, g, or t
  misc_feature (308)..(308): n is a, c, g, or t
  misc_feature (312)..(312): n is a, c, g, or t
  misc_feature (322)..(322): n is a, c, g, or t
  misc_feature (325)..(325): n is a, c, g, or t
  misc_feature (339)..(339): n is a, c, g, or t
  misc_feature (378)..(378): n is a, c, g, or t
  misc_feature (380)..(380): n is a, c, g, or t
  misc_feature (391)..(391): n is a, c, g, or t
  misc_feature (396)..(396): n is a, c, g, or t
  misc_feature (410)..(410): n is a, c, g, or t
  misc_feature (420)..(420): n is a, c, g, or t
  misc_feature (423)..(423): n is a, c, g, or t
atacattttttccatcggaatgtctgatactatgttgggtgaatcctaatggatggttgagcattattggtgtcatattttgtccggtctatgtgtcaaccgtgaagcttttaatccaaatcctttcactctttctgcctctgtcaagtctggggcaggcaaagaagaagaccaaagaagattcgcacatctgcacatattattgngnccanntannnacatagaacgnacaatagngnaccnccaatggcagccnaaatnttttgccnccttatgctccttggcctttctgcaagngctgctacggngacnattttcccanaangctcacgagctccnatagcttcccttcttcccccgtacctcttcaccagcggngncttcggaatgngaaancccaattcttcaancctatagganccnacaggaaatcgcagctggtgatcttacctttatcacccttgttcctcccacaatcatcagccctattac

SEQ ID NO: 38471 - protein, 96 aa, Zea mays subsp. mays
  misc_feature (52)..(52): Xaa can be any naturally occurring amino acid
  misc_feature (54)..(56): Xaa can be any naturally occurring amino acid
  misc_feature (59)..(59): Xaa can be any naturally occurring amino acid
  misc_feature (62)..(64): Xaa can be any naturally occurring amino acid
  misc_feature (68)..(68): Xaa can be any naturally occurring amino acid
  misc_feature (70)..(70): Xaa can be any naturally occurring amino acid
  misc_feature (73)..(73): Xaa can be any naturally occurring amino acid
  misc_feature (82)..(82): Xaa can be any naturally occurring amino acid
  misc_feature (86)..(87): Xaa can be any naturally occurring amino acid
  misc_feature (90)..(91): Xaa can be any naturally occurring amino acid
  misc_feature (96)..(96): Xaa can be any naturally occurring amino acid
MVEHYWCHILSGLCVNREAFNPNPFTLSASVKSGAGKEEDQRRFAHLHILLXPXXXIEXTIXXXQWQXKXFAXLCSLAFLQXLLRXXFSXXAHELX

SEQ ID NO: 38472 - protein, 73 aa, Zea mays subsp. mays
  misc_feature (68)..(72): Xaa can be any naturally occurring amino acid
TFFPSECLILCWVNPNGWLSIIGVIFCPVYVSTVKLLIQILSLFLPLSSLGQAKKKTKEDSHICTYYXXXXXT

SEQ ID NO: 38473 - protein, 56 aa, Zea mays subsp. mays
  misc_feature (4)..(5): Xaa can be any naturally occurring amino acid
  misc_feature (8)..(8): Xaa can be any naturally occurring amino acid
  misc_feature (17)..(17): Xaa can be any naturally occurring amino acid
  misc_feature (21)..(22): Xaa can be any naturally occurring amino acid
  misc_feature (26)..(27): Xaa can be any naturally occurring amino acid
  misc_feature (31)..(31): Xaa can be any naturally occurring amino acid
  misc_feature (44)..(45): Xaa can be any naturally occurring amino acid
  misc_feature (49)..(50): Xaa can be any naturally occurring amino acid
  misc_feature (55)..(55): Xaa can be any naturally occurring amino acid
MAAXXFCXLMLLGLSAXAATXXIFPXXSRAXIASLLPPYLFTSXXFGMXXPNSSXL

SEQ ID NO: 38474 - DNA, 7463 bp, Zea mays subsp. mays
ggtcttcaattgtgctgtctgggccacggaacgacaatgtcacagcttggattagccgcagctgcctcaaaggccttgccactactccctaatcgccagagaagttcagctgggactacattctcatcatcttcattatcgaggcccttaaacagaaggaaaagccatactcgttcactccgtgatggcggagatggggtatcagatgccaaaaagcacagccagtctgttcgtcaaggtcttgctggcattatcgacctcccaagtgaggcaccttccgaagtggatatttcacatggatctgaggatcctagggggccaacagattcttatcaaatgaatgggattatcaatgaaacacataatggaagacatgcctcagtgtccaaggttgttgaattttgtgcggcactaggtggcaaaacaccaattcacagtatattagtggccaacaatggaatggcagcagcaaaatttatgaggagtgtccggacatgggctaatgatacttttggatctgagaaggcaattcaactcatagctatggcaactccggaagacatgaggataaatgcagaacacattagaattgctgaccaattcgtagaggtgcctggtggaacaaacaataataactacgccaatgttcaactcatagtggggatggcacaaaaactaggtgtttctgctgtttggcctggttggggtcatgcttctgagaatcctgaactgccagatgcattgaccgcaaaagggatcgtttttcttggcccacctgcatcatcaatgaatgctttgggagataaggtcggctcagctctcattgctcaagcagccggggtcccaactcttgcttggagtggatcacatgttgaagttccattagagtgctgcttagacgcgatacctgaggagatgtatagaaaagcttgcgttactaccacagaggaagcagttgcaagttgtcaagtggttggttatcctgccatgattaaggcatcctggggaggtggtggtaaaggaataagaaaggttcataatgatgatgaggttagagcgctgtttaagcaagtacaaggtgaagtccctggctccccaatatttgtcatgaggcttgcatcccagagtcggcatcttgaagttcagttgctttgtgatcaatatggtaatgtagcagcacttcacagtcgtgattgcagtgtgcaacggcgacaccagaagattattgaagaaggtccagttactgttgctcctcgtgagacagttaaagcacttgagcaggcagcaaggaggcttgctaaggctgtgggttatgttggtgctgctactgttgagtatctttacagcatggaaactggagactactattttctggaacttaatccccgactacaggttgagcatccagtcactgagtggatagctgaagtgaatctgcctgcagctcaagttgctgttggaatgggcatacctctttggcagattccagaaatcagacgtttctatggaatggactatggaggagggtatgacatttggaggaaaacagcagctcttgctacaccatttaattttgatgaagtagattctcaatggccaaagggccattgtgtagcagttagaattactagtgaggacccagatgatggtttcaaacctactggtgggaaagtgaaggagataagttttaaaagcaagcctaatgtttgggcctacttctcagtaaagtctggtggaggcattcatgaatttgctgattctcagtttggacatgcttttgcatatggactctctagaccagcagctataacaaacatgtctcttgcattaaaagagattcagattcgtggagaaattcattcaaatgttgattacacagttgacctcttaaacgcttcagacttcagagaaaacaagatccacactggttggctggatacaagaatagctatgcgtgttcaagctgagaggcccccatggtatatctcagtggttggaggtgctttatataaaacagtaaccaccaatgcagccactgtttctgaatatgttagttatctcaccaagggccatattccaccaaagcatatatcccttgtcaattctacagttaatttgaatatagaagggagcaaatacacaattgaaactgtaaggactggacatggtagctacaggttgagaatgaatgattcaacagttgaagcgaatgtacaatctttatgtgatggtggcctcttaatgcagttggatggaaacagccatgtaatttatgcagaagaagaagctggtggtacacggcttcagattgatggaaagacatgtttattgcagaatgaccatgatccatcgaagttattagctgagacaccctgcaaacttcttcgtttcttggttgctgatggtgctcatgttgatgcggatgtaccatacgcggaagttgaggttatgaagatgtgcatgcctctcttgtcacctgcttctggtgtcattcattgtatgatgtctgagggccaggcattgcaggctggtgatcttatagcaaggttggatcttgatgacccttctgctgtgaaaagagctgagccatttgatggaatatttccacaaatggagctccctgttgctgtctctagtcaagtacacaaaagatatgctgcaagtttgaatgctgctcgaatggtccttgcaggatatgagcacaatattaatgaagtcgttcaagatttggtatgctgcctggacaaccctgagcttcctttcctacagtgggatgaacttatgtctgttctagcaacgaggcttccaagaaatctcaagagtgagttagaggataaatacaaggaatacaagttgaatttttaccatggaaaaaacgaggactttccatccaagttgctaagagacatcattgaggaaaatctttcttatggttcagagaaggaaaaggctacaaatgagaggcttgttgagcctcttatgaacctactgaagtcatatgagggtgggagagagagccatgcacattttgttgtcaagtctcttttcgaggagtatcttacagtggaagaactttttagtgatggcattcagtctgacgtgattgaaacattgcggcatcagcacagtaaagacctgcagaaggttgtagacattgtgttgtctcaccagggtgtgaggaacaaagctaagcttgtaacggcacttatggaaaagctggtttatccaaatcctggtggttacagggatctgttagttcgcttttcttccctcaatcataaaagatattataagttggcccttaaagcaagtgaacttcttgaacaaaccaaactaagtgaactccgtgcaagcgttgcaagaagcctttcggatctggggatgcataagggagaaatgagtattaaggataacatggaagatttagtctctgccccattacctgttgaagatgctctgatttctttgtttgattacagtgatcgaactgttcagcagaaagtgattgagacatacatatcacgattgtaccagcctcatcttgtaaaggatagcatccaaatgaaattcaaggaatctggtgctattactttttgggaattttatgaagggcatgttgatactagaaatggacatggggctattattggtgggaagcgatggggtgccatggtcgttctcaaatcacttgaatctgcgtcaacagccattgtggctgcattaaaggattcggcacagttcaacagctctgagggcaacatgatgcacattgcattattgagtgctgaaaatgaaagtaatataagtggaataagcagtgatgatcaagctcaacataagatggaaaagcttagcaagatactgaaggatactagcgttgcaagtgatctccaagctgctggtttgaaggttataagttgcattgttcaaagagatgaagctcgcatgccaatgcgccacacattcctctggttggatgacaagagttgttatgaagaagagcagattctccggcatgtggagcctcccctctctacacttcttgaattggataagttgaaggtgaaaggatacaatgaaatgaagtatactccttcgcgtgaccgccaatggcatatctacacactaagaaatactgaaaaccccaaaatgttgcatagggtgtttttccgaactattgtcaggcaacccaatgcaggcaacaagtttacatcggctcagatcagcgacgctgaagtaggatgtcccgaagaatctctttcatttacatcaaatagcatcttaagatcattgatgactgctattgaagaattagagcttcatgcaattaggacaggtcattctcacatgtatttgtgcatactgaaagagcaaaagcttcttgacctcattccattttcagggagtacaattgttgatgttggccaagatgaagctaccgcttgttcacttttaaaatcaatggctttgaagatacatgagcttgttggtgcaaggatgcatcatctgtctgtatgccagtgggaggtgaaactcaagttggactgtgatggccctgcaagtggtacctggagagttgtaactacaaatgttactggtcacacctgcaccattgatatataccgagaagtggaggaaatagaatcgcagaagttagtgtaccattcagccacttcgtcagctggaccattgcatggtgttgcactgaataatccatatcaacctttgagtgtgattgatctaaagcgctgctctgctaggaacaacagaacaacatattgctatgattttccgctggcctttgaaactgcactgcagaagtcatggcagtccaatggctctactgtttctgaaggcaatgaaaatagtaaatcctacgtgaaggcaactgagctagtgtttgctgaaaaacatgggtcctggggcactcctataattccgatggaacgccctgctgggctcaacgacattggtatggtcgcttggatcatggagatgtcaacacctgaatttcccaatggcaggcagattattgttgtagcaaatgatatcactttcagagctggatcatttggcccaagggaagatgcattttttgaaactgtcactaacctggcttgcgaaaggaaacttcctcttatatacttggcagcaaactctggtgctaggattggcatagctgatgaagtaaaatcttgcttccgtgttggatggtctgacgaaggcagtcctgaacgagggtttcagtacatctatctgactgaagaagactatgctcgcattagctcttctgttatagcacataagctggagctagatagtggtgaaattaggtggattattgactctgttgtgggcaaggaggatgggcttggtgtcgagaacttacatggaagtgctgctattgccagtgcttattctagggcatatgaggagacatttacacttacatttgtgactgggcggactgtaggaataggagcttatcttgctcgacttggtatacggtgcatacagcgtcttgaccagcctattattttaacagggttttctgccctgaacaagctccttgggcgggaagtgtacagctcccacatgcagcttggtggtcctaagatcatggcgaccaatggtgttgtccacctcactgttccagatgaccttgaaggtgtttccaatatattgaggtggctcagctatgttcctgcaaacattggtggacctcttcctattaccaaacctctggaccctccagacagacctgttgcttacatccctgagaacacatgcgatccacgtgcagctatctgtggtgtagatgacagccaagggaaatggttgggtggtatgtttgacaaagacagctttgtggagacatttgaaggatgggcaaaaacagtggttactggcagagcaaagcttggaggaattcctgtgggcgtcatagctgtggagacacagaccatgatgcagatcatccctgctgatccaggtcagcttgattcccatgagcgatctgtccctcgtgctggacaagtgtggttcccagattctgcaaccaagaccgctcaggcattattagacttcaaccgtgaaggattgcctctgttcatcctggctaattggagaggcttctctggtggacaaagagatctctttgaaggaattcttcaggctgggtcaacaattgtcgagaaccttaggacatataatcagcctgcttttgtgtacattcctatggctggagagcttcgtggaggagcttgggttgtggtcgatagcaaaataaatccagaccgcattgagtgttatgctgaaaggactgccaaaggtaatgttctcgaacctcaagggttaattgaaatcaagttcaggtcagaggaactccaagactgtatgggtaggcttgacccagagttgataaatctgaaagcaaaactccaagatgtaaatcatggaaatggaagtctaccagacatagaagggattcggaagagtatagaagcacgtacgaaacagttgctgcctttatatacccagattgcaatacggtttgctgaattgcatgatacttccctaagaatggcagctaaaggtgtgattaagaaagttgtagactgggaagaatcacgctcgttcttctataaaaggctacggaggaggatcgcagaagatgttcttgcaaaagaaataaggcagatagtcggtgataaatttacgcaccaattagcaatggagctcatcaaggaatggtaccttgcttctcaggccacaacaggaagcactggatgggatgacgatgatgcttttgttgcctggaaggacagtcctgaaaactacaaggggcatatccaaaagcttagggctcaaaaagtgtctcattcgctctctgatcttgctgactccagttcagatctgcaagcattctcgcagggtctttctacgctattagataagatggatccctctcagagagcgaagtttgttcaggaagtcaagaaggtccttgattgatgataccaacacatccaacacaatgtgtgcatgtcacatctttttgttctagtacatacatagaaggatattgcttggtcttgattgatcatgtctgatttaagtcgactattatttcttggaattttcttttggacctggtgctatggttgatggatgtatattggatatgtgcgttctgccaggtgtaagcacaaaggtttagacagaccgagagcaagagcgagtgaacctgttctggttttgcagtggttcagtaaggcagaaagttgttaaaccgtagttctgagatgtattaccagtggcgccatgctgtacttttagggtgtataatgcggatacaaataaacaatttagcggttcattaaagtttgaactcaaataacatgttctttgtaagcatatgtaccgtacctctacgtgaaataaagttgttgaattagcattcg

SEQ ID NO: 38475 - protein, 2337 aa, Zea mays subsp. mays
GLQLCCLGHGTTMSQLGLAAAASKALPLLPNRQRSSAGTTFSSSSLSRPLNRRKSHTRSLRDGGDGVSDAKKHSQSVRQGLAGIIDLPSEAPSEVDISHGSEDPRGPTDSYQMNGIINETHNGRHASVSKVVEFCAALGGKTPIHSILVANNGMAAAKFMRSVRTWANDTFGSEKAIQLIAMATPEDMRINAEHIRIADQFVEVPGGTNNNNYANVQLIVGMAQKLGVSAVWPGWGHASENPELPDALTAKGIVFLGPPASSMNALGDKVGSALIAQAAGVPTLAWSGSHVEVPLECCLDAIPEEMYRKACVTTTEEAVASCQVVGYPAMIKASWGGGGKGIRKVHNDDEVRALFKQVQGEVPGSPIFVMRLASQSRHLEVQLLCDQYGNVAALHSRDCSVQRRHQKIIEEGPVTVAPRETVKALEQAARRLAKAVGYVGAATVEYLYSMETGDYYFLELNPRLQVEHPVTEWIAEVNLPAAQVAVGMGIPLWQIPEIRRFYGMDYGGGYDIWRKTAALATPFNFDEVDSQWPKGHCVAVRITSEDPDDGFKPTGGKVKEISFKSKPNVWAYFSVKSGGGIHEFADSQFGHAFAYGLSRPAAITNMSLALKEIQIRGEIHSNVDYTVDLLNASDFRENKIHTGWLDTRIAMRVQAERPPWYISVVGGALYKTVTTNAATVSEYVSYLTKGHIPPKHISLVNSTVNLNIEGSKYTIETVRTGHGSYRLRMNDSTVEANVQSLCDGGLLMQLDGNSHVIYAEEEAGGTRLQIDGKTCLLQNDHDPSKLLAETPCKLLRFLVADGAHVDADVPYAEVEVMKMCMPLLSPASGVIHCMMSEGQALQAGDLIARLDLDDPSAVKRAEPFDGIFPQMELPVAVSSQVHKRYAASLNAARMVLAGYEHNINEVVQDLVCCLDNPELPFLQWDELMSVLATRLPRNLKSELEDKYKEYKLNFYHGKNEDFPSKLLRDIIEENLSYGSEKEKATNERLVEPLMNLLKSYEGGRESHAHFVVKSLFEEYLTVEELFSDGIQSDVIETLRHQHSKDLQKVVDIVLSHQGVRNKAKLVTALMEKLVYPNPGGYRDLLVRFSSLNHKRYYKLALKASELLEQTKLSELRASVARSLSDLGMHKGEMSIKDNMEDLVSAPLPVEDALISLFDYSDRTVQQKVIETYISRLYQPHLVKDSIQMKFKESGAITFWEFYEGHVDTRNGHGAIIGGKRWGAMVVLKSLESASTAIVAALKDSAQFNSSEGNMMHIALLSAENESNISGISSDDQAQHKMEKLSKILKDTSVASDLQAAGLKVISCIVQRDEARMPMRHTFLWLDDKSCYEEEQILRHVEPPLSTLLELDKLKVKGYNEMKYTPSRDRQWHIYTLRNTENPKMLHRVFFRTIVRQPNAGNKFTSAQISDAEVGCPEESLSFTSNSILRSLMTAIEELELHAIRTGHSHMYLCILKEQKLLDLIPFSGSTIVDVGQDEATACSLLKSMALKIHELVGARMHHLSVCQWEVKLKLDCDGPASGTWRVVTTNVTGHTCTIDIYREVEEIESQKLVYHSATSSAGPLHGVALNNPYQPLSVIDLKRCSARNNRTTYCYDFPLAFETALQKSWQSNGSTVSEGNENSKSYVKATELVFAEKHGSWGTPIIPMERPAGLNDIGMVAWIMEMSTPEFPNGRQIIVVANDITFRAGSFGPREDAFFETVTNLACERKLPLIYLAANSGARIGIADEVKSCFRVGWSDEGSPERGFQYIYLTEEDYARISSSVIAHKLELDSGEIRWIIDSVVGKEDGLGVENLHGSAAIASAYSRAYEETFTLTFVTGRTVGIGAYLARLGIRCIQRLDQPIILTGFSALNKLLGREVYSSHMQLGGPKIMATNGVVHLTVPDDLEGVSNILRWLSYVPANIGGPLPITKPLDPPDRPVAYIPENTCDPRAAICGVDDSQGKWLGGMFDKDSFVETFEGWAKTVVTGRAKLGGIPVGVIAVETQTMMQIIPADPGQLDSHERSVPRAGQVWFPDSATKTAQALLDFNREGLPLFILANWRGFSGGQRDLFEGILQAGSTIVENLRTYNQPAFVYIPMAGELRGGAWVVVDSKINPDRIECYAERTAKGNVLEPQGLIEIKFRSEELQDCMGRLDPELINLKAKLQDVNHGNGSLPDIEGIRKSIEARTKQLLPLYTQIAIRFAELHDTSLRMAAKGVIKKVVDWEESRSFFYKRLRRRIAEDVLAKEIRQIVGDKFTHQLAMELIKEWYLASQATTGSTGWDDDDAFVAWKDSPENYKGHIQKLRAQKVSHSLSDLADSSSDLQAFSQGLSTLLDKMDPSQRAKFVQEVKKVLD

SEQ ID NO: 38476 - protein, 2325 aa, Zea mays subsp. mays
MSQLGLAAAASKALPLLPNRQRSSAGTTFSSSSLSRPLNRRKSHTRSLRDGGDGVSDAKKHSQSVRQGLAGIIDLPSEAPSEVDISHGSEDPRGPTDSYQMNGIINETHNGRHASVSKVVEFCAALGGKTPIHSILVANNGMAAAKFMRSVRTWANDTFGSEKAIQLIAMATPEDMRINAEHIRIADQFVEVPGGTNNNNYANVQLIVGMAQKLGVSAVWPGWGHASENPELPDALTAKGIVFLGPPASSMNALGDKVGSALIAQAAGVPTLAWSGSHVEVPLECCLDAIPEEMYRKACVTTTEEAVASCQVVGYPAMIKASWGGGGKGIRKVHNDDEVRALFKQVQGEVPGSPIFVMRLASQSRHLEVQLLCDQYGNVAALHSRDCSVQRRHQKIIEEGPVTVAPRETVKALEQAARRLAKAVGYVGAATVEYLYSMETGDYYFLELNPRLQVEHPVTEWIAEVNLPAAQVAVGMGIPLWQIPEIRRFYGMDYGGGYDIWRKTAALATPFNFDEVDSQWPKGHCVAVRITSEDPDDGFKPTGGKVKEISFKSKPNVWAYFSVKSGGGIHEFADSQFGHAFAYGLSRPAAITNMSLALKEIQIRGEIHSNVDYTVDLLNASDFRENKIHTGWLDTRIAMRVQAERPPWYISVVGGALYKTVTTNAATVSEYVSYLTKGHIPPKHISLVNSTVNLNIEGSKYTIETVRTGHGSYRLRMNDSTVEANVQSLCDGGLLMQLDGNSHVIYAEEEAGGTRLQIDGKTCLLQNDHDPSKLLAETPCKLLRFLVADGAHVDADVPYAEVEVMKMCMPLLSPASGVIHCMMSEGQALQAGDLIARLDLDDPSAVKRAEPFDGIFPQMELPVAVSSQVHKRYAASLNAARMVLAGYEHNINEVVQDLVCCLDNPELPFLQWDELMSVLATRLPRNLKSELEDKYKEYKLNFYHGKNEDFPSKLLRDIIEENLSYGSEKEKATNERLVEPLMNLLKSYEGGRESHAHFVVKSLFEEYLTVEELFSDGIQSDVIETLRHQHSKDLQKVVDIVLSHQGVRNKAKLVTALMEKLVYPNPGGYRDLLVRFSSLNHKRYYKLALKASELLEQTKLSELRASVARSLSDLGMHKGEMSIKDNMEDLVSAPLPVEDALISLFDYSDRTVQQKVIETYISRLYQPHLVKDSIQMKFKESGAITFWEFYEGHVDTRNGHGAIIGGKRWGAMVVLKSLESASTAIVAALKDSAQFNSSEGNMMHIALLSAENESNISGISSDDQAQHKMEKLSKILKDTSVASDLQAAGLKVISCIVQRDEARMPMRHTFLWLDDKSCYEEEQILRHVEPPLSTLLELDKLKVKGYNEMKYTPSRDRQWHIYTLRNTENPKMLHRVFFRTIVRQPNAGNKFTSAQISDAEVGCPEESLSFTSNSILRSLMTAIEELELHAIRTGHSHMYLCILKEQKLLDLIPFSGSTIVDVGQDEATACSLLKSMALKIHELVGARMHHLSVCQWEVKLKLDCDGPASGTWRVVTTNVTGHTCTIDIYREVEEIESQKLVYHSATSSAGPLHGVALNNPYQPLSVIDLKRCSARNNRTTYCYDFPLAFETALQKSWQSNGSTVSEGNENSKSYVKATELVFAEKHGSWGTPIIPMERPAGLNDIGMVAWIMEMSTPEFPNGRQIIVVANDITFRAGSFGPREDAFFETVTNLACERKLPLIYLAANSGARIGIADEVKSCFRVGWSDEGSPERGFQYIYLTEEDYARISSSVIAHKLELDSGEIRWIIDSVVGKEDGLGVENLHGSAAIASAYSRAYEETFTLTFVTGRTVGIGAYLARLGIRCIQRLDQPIILTGFSALNKLLGREVYSSHMQLGGPKIMATNGVVHLTVPDDLEGVSNILRWLSYVPANIGGPLPITKPLDPPDRPVAYIPENTCDPRAAICGVDDSQGKWLGGMFDKDSFVETFEGWAKTVVTGRAKLGGIPVGVIAVETQTMMQIIPADPGQLDSHERSVPRAGQVWFPDSATKTAQALLDFNREGLPLFILANWRGFSGGQRDLFEGILQAGSTIVENLRTYNQPAFVYIPMAGELRGGAWVVVDSKINPDRIECYAERTAKGNVLEPQGLIEIKFRSEELQDCMGRLDPELINLKAKLQDVNHGNGSLPDIEGIRKSIEARTKQLLPLYTQIAIRFAELHDTSLRMAAKGVIKKVVDWEESRSFFYKRLRRRIAEDVLAKEIRQIVGDKFTHQLAMELIKEWYLASQATTGSTGWDDDDAFVAWKDSPENYKGHIQKLRAQKVSHSLSDLADSSSDLQAFSQGLSTLLDKMDPSQRAKFVQEVKKVLD

SEQ ID NO: 38477 - protein, 2225 aa, Zea mays subsp. mays
MNGIINETHNGRHASVSKVVEFCAALGGKTPIHSILVANNGMAAAKFMRSVRTWANDTFGSEKAIQLIAMATPEDMRINAEHIRIADQFVEVPGGTNNNNYANVQLIVGMAQKLGVSAVWPGWGHASENPELPDALTAKGIVFLGPPASSMNALGDKVGSALIAQAAGVPTLAWSGSHVEVPLECCLDAIPEEMYRKACVTTTEEAVASCQVVGYPAMIKASWGGGGKGIRKVHNDDEVRALFKQVQGEVPGSPIFVMRLASQSRHLEVQLLCDQYGNVAALHSRDCSVQRRHQKIIEEGPVTVAPRETVKALEQAARRLAKAVGYVGAATVEYLYSMETGDYYFLELNPRLQVEHPVTEWIAEVNLPAAQVAVGMGIPLWQIPEIRRFYGMDYGGGYDIWRKTAALATPFNFDEVDSQWPKGHCVAVRITSEDPDDGFKPTGGKVKEISFKSKPNVWAYFSVKSGGGIHEFADSQFGHAFAYGLSRPAAITNMSLALKEIQIRGEIHSNVDYTVDLLNASDFRENKIHTGWLDTRIAMRVQAERPPWYISVVGGALYKTVTTNAATVSEYVSYLTKGHIPPKHISLVNSTVNLNIEGSKYTIETVRTGHGSYRLRMNDSTVEANVQSLCDGGLLMQLDGNSHVIYAEEEAGGTRLQIDGKTCLLQNDHDPSKLLAETPCKLLRFLVADGAHVDADVPYAEVEVMKMCMPLLSPASGVIHCMMSEGQALQAGDLIARLDLDDPSAVKRAEPFDGIFPQMELPVAVSSQVHKRYAASLNAARMVLAGYEHNINEVVQDLVCCLDNPELPFLQWDELMSVLATRLPRNLKSELEDKYKEYKLNFYHGKNEDFPSKLLRDIIEENLSYGSEKEKATNERLVEPLMNLLKSYEGGRESHAHFVVKSLFEEYLTVEELFSDGIQSDVIETLRHQHSKDLQKVVDIVLSHQGVRNKAKLVTALMEKLVYPNPGGYRDLLVRFSSLNHKRYYKLALKASELLEQTKLSELRASVARSLSDLGMHKGEMSIKDNMEDLVSAPLPVEDALISLFDYSDRTVQQKVIETYISRLYQPHLVKDSIQMKFKESGAITFWEFYEGHVDTRNGHGAIIGGKRWGAMVVLKSLESASTAIVAALKDSAQFNSSEGNMMHIALLSAENESNISGISSDDQAQHKMEKLSKILKDTSVASDLQAAGLKVISCIVQRDEARMPMRHTFLWLDDKSCYEEEQILRHVEPPLSTLLELDKLKVKGYNEMKYTPSRDRQWHIYTLRNTENPKMLHRVFFRTIVRQPNAGNKFTSAQISDAEVGCPEESLSFTSNSILRSLMTAIEELELHAIRTGHSHMYLCILKEQKLLDLIPFSGSTIVDVGQDEATACSLLKSMALKIHELVGARMHHLSVCQWEVKLKLDCDGPASGTWRVVTTNVTGHTCTIDIYREVEEIESQKLVYHSATSSAGPLHGVALNNPYQPLSVIDLKRCSARNNRTTYCYDFPLAFETALQKSWQSNGSTVSEGNENSKSYVKATELVFAEKHGSWGTPIIPMERPAGLNDIGMVAWIMEMSTPEFPNGRQIIVVANDITFRAGSFGPREDAFFETVTNLACERKLPLIYLAANSGARIGIADEVKSCFRVGWSDEGSPERGFQYIYLTEEDYARISSSVIAHKLELDSGEIRWIIDSVVGKEDGLGVENLHGSAAIASAYSRAYEETFTLTFVTGRTVGIGAYLARLGIRCIQRLDQPIILTGFSALNKLLGREVYSSHMQLGGPKIMATNGVVHLTVPDDLEGVSNILRWLSYVPANIGGPLPITKPLDPPDRPVAYIPENTCDPRAAICGVDDSQGKWLGGMFDKDSFVETFEGWAKTVVTGRAKLGGIPVGVIAVETQTMMQIIPADPGQLDSHERSVPRAGQVWFPDSATKTAQALLDFNREGLPLFILANWRGFSGGQRDLFEGILQAGSTIVENLRTYNQPAFVYIPMAGELRGGAWVVVDSKINPDRIECYAERTAKGNVLEPQGLIEIKFRSEELQDCMGRLDPELINLKAKLQDVNHGNGSLPDIEGIRKSIEARTKQLLPLYTQIAIRFAELHDTSLRMAAKGVIKKVVDWEESRSFFYKRLRRRIAEDVLAKEIRQIVGDKFTHQLAMELIKEWYLASQATTGSTGWDDDDAFVAWKDSPENYKGHIQKLRAQKVSHSLSDLADSSSDLQAFSQGLSTLLDKMDPSQRAKFVQEVKKVLD

SEQ ID NO: 38478 - DNA, 450 bp, Zea mays subsp. mays
gcttcatttaacgctgtcgctttcgctttcgcttccactcgcactccatgggtgcgcgggcgacgatgggatgttcgcccttgctgcccttccaagcgctctggctcacagcggccgttgtcgcggcgctcgcgctcgcggccggcgcgcagccgtcgccgtcgctgtcgccggggttctacgacgcgacgtgcccggggctgcagcccatcgtgcgccgcggcgtggcgcgcgccgtccgggcggagccgcgcatgggggcgtccctcctccgcctcttcttccacgactgcttcgtcaatggctgcgacgcctccgtcttgctggacgacgtgcccggtaacttcaccggggagaagaacgcggggcccaacgccaactcgctgcgcgggtacgaggtcatcgacgccatcaaggcccaggtggaggcgtcctgcaaggccaccgtct

SEQ ID NO: 38479 - protein, 150 aa, Zea mays subsp. mays
ASFNAVAFAFASTRTPWVRGRRWDVRPCCPSKRSGSQRPLSRRSRSRPARSRRRRCRRGSTTRRARGCSPSCAAAWRAPSGRSRAWGRPSSASSSTTASSMAATPPSCWTTCPVTSPGRRTRGPTPTRCAGTRSSTPSRPRWRRPARPPS

SEQ ID NO: 38480 - protein, 134 aa, Zea mays subsp. mays
MGARATMGCSPLLPFQALWLTAAVVAALALAAGAQPSPSLSPGFYDATCPGLQPIVRRGVARAVRAEPRMGASLLRLFFHDCFVNGCDASVLLDDVPGNFTGEKNAGPNANSLRGYEVIDAIKAQVEASCKATV

SEQ ID NO: 38481 - protein, 128 aa, Zea mays subsp. mays
MGCSPLLPFQALWLTAAVVAALALAAGAQPSPSLSPGFYDATCPGLQPIVRRGVARAVRAEPRMGASLLRLFFHDCFVNGCDASVLLDDVPGNFTGEKNAGPNANSLRGYEVIDAIKAQVEASCKATV

SEQ ID NO: 38482 - DNA, 2778 bp, Zea mays subsp. mays
ggctcgttcctcgaggtacataacgagcagatcaatgatctgttggaaccatctcagcgtgacctacagataagagagaacgctagcaatggtatccatgttgagaacttgactgatgaatacgtgtcaacagcagatgatatcagtcagatcttgatgaagggactgtcaaacagaaaagttggtaccaccagtatgaacttaaaaagttcccgctctcatgtgatattcacctgcgttattgaagcatggagcaagggttcatcaaatgggtttagcagctcaagaactagcagaatcacctttgttgacctcgctggtcctgacactgatgaacttggtgcagcaaagcattccacaaaggaagaaagacatcttaagaagtctctttcaaggcttgggaaactagttaacgttctttcagaaactccagagtcacataaagttgatttaccatatgagcaatcccgtttgacacatgtgctgaaggatacactaggtggcaactccagggttatatttttgtgttcgatttcttcagagcacagatgcagatctggaactttaagtacactaagatttggtgagcgagcaaagctaatgccaaacaaacctgtgataaatgagatatcagaagatgatgttaatggtttgagcgatcagatacgtcagttaaaggatgaactcataaagaacaaatctggagacaccacaacttgcaaggctaggtacttcagtgcacaaagtgcccgtgaaagtttgcatactttgcgagtgagcctcaaccgctctcttatctttcctcacatagaagttgattcagaggaagaaatggatgttgatgaagaagatgtgcaagacctgcgtgatcaaattagcaagattcactcttcatctgaagatacattggatgactttatggatgcagaaagtggagacgaaagcactccttgttctgtgggaagaagtgaagatgatcaagtaatcatagatgattttgaaggtccacaacaggaagagcaaaaagaagtatctaacaatacaaatgctaatgaagacctcggttctgacagaaaatctaatctatcaattattgcctccacacggttatcacctattcaggatccaacattgtgctcttctccaaagatccacaacaaggcaagaatgagcatcacttcactggggctatcaccaagcaagattagaatatcagacagcccaggtgatagaaatgttgaaatgtgtacaaatagtgcatttcgttcctctctacaatcaagcaagcttagccccactgactcactggctgcaagtcttcaacgtggcttgcacattatagagtaccatcaacagaatccagccccaagaaaatcatttattggtctttcatttgaccatttcgctcgtcagtcagtagcaaaaatcagttcagctgttcaggctctaccagaggaccaaggaaacaacctttgttcattctgcaagaagccaatgaacacaaatgataatcagacagaaaacgtaaatttagacaaacagattaaggatggcaacataactaaggaaattgcttccaagaaagaaactgagcttgaagctttatgcgaagaacaaagagcaaagatccaggagctgagcagtttgattgaccaatataagaacaggtcagaagaactaactagtgaaggcaaggtttctgtctcactcagtgtgaatgagagggaggtacttcttgctgaaatccagagtctgagggagcaactcaaaaaccagactactgtatcaactactggtagccttcttgaccagttaaggaacggcagcacagaccaggagtatgaacttgacaaagaaaggcagaaatggatggagtctgagagcaagtggatttcacttaccgaagagttgagggtcgatctagaatcaaacaggatgcacgcagagaagaccgagatggagctctgcaacgagaagaagtgcacagcagagctagatgacgctcttcaacgagcgatgtacggccacgccaggatggttgagcattatgttgagctgcaggagctgtataatgatcttctcgagaagcaccgccgagtgatggaggcgatctctgaggtgaagagggcggctgccagagcaggcaggaagggctgtgggacggccttcgctgctgccctcgccgccgagctctccacggtgagaatcgaccgagaaaaggagagggctcagctgaaagaacaaaacagaaggctccgcattcagctgcgagacactgccgaagctgttcatgctgctggagaactgctcgtcagattgagagaaaccgaggaagcatctacactagaaaaggagaggactgccgcgttgttgcaagagaacgagaagctgaagaagcagctggagaagctgaggaagaagcacgagatggagctggagacgatgaaggtgcaccttgcggagagccggctgccggagtcggctttgggtgccttctaccaccacgagaacgagaggacgccggacgacgatctgtcctggcgggccgccttcgcttctgcgtacagtgactgaagttacctgactggggattgcttgggagttgagtctcgtcaactgagacaggttgacaattggggcatgagcatttctacgaccttgtttgattttaagtacatgactcgattggggcatggggcaaagtttttatgtatactgcttgtatgggaactgaatttgaacgagttttatgtagtctttcgagtatttttttggtcg

SEQ ID NO: 38483 - protein, 857 aa, Zea mays subsp. mays
GSFLEVHNEQINDLLEPSQRDLQIRENASNGIHVENLTDEYVSTADDISQILMKGLSNRKVGTTSMNLKSSRSHVIFTCVIEAWSKGSSNGFSSSRTSRITFVDLAGPDTDELGAAKHSTKEERHLKKSLSRLGKLVNVLSETPESHKVDLPYEQSRLTHVLKDTLGGNSRVIFLCSISSEHRCRSGTLSTLRFGERAKLMPNKPVINEISEDDVNGLSDQIRQLKDELIKNKSGDTTTCKARYFSAQSARESLHTLRVSLNRSLIFPHIEVDSEEEMDVDEEDVQDLRDQISKIHSSSEDTLDDFMDAESGDESTPCSVGRSEDDQVIIDDFEGPQQEEQKEVSNNTNANEDLGSDRKSNLSIIASTRLSPIQDPTLCSSPKIHNKARMSITSLGLSPSKIRISDSPGDRNVEMCTNSAFRSSLQSSKLSPTDSLAASLQRGLHIIEYHQQNPAPRKSFIGLSFDHFARQSVAKISSAVQALPEDQGNNLCSFCKKPMNTNDNQTENVNLDKQIKDGNITKEIASKKETELEALCEEQRAKIQELSSLIDQYKNRSEELTSEGKVSVSLSVNEREVLLAEIQSLREQLKNQTTVSTTGSLLDQLRNGSTDQEYELDKERQKWMESESKWISLTEELRVDLESNRMHAEKTEMELCNEKKCTAELDDALQRAMYGHARMVEHYVELQELYNDLLEKHRRVMEAISEVKRAAARAGRKGCGTAFAAALAAELSTVRIDREKERAQLKEQNRRLRIQLRDTAEAVHAAGELLVRLRETEEASTLEKERTAALLQENEKLKKQLEKLRKKHEMELETMKVHLAESRLPESALGAFYHHENERTPDDDLSWRAAFASAYSD

SEQ ID NO: 38484 - protein, 805 aa, Zea mays subsp. mays
MKGLSNRKVGTTSMNLKSSRSHVIFTCVIEAWSKGSSNGFSSSRTSRITFVDLAGPDTDELGAAKHSTKEERHLKKSLSRLGKLVNVLSETPESHKVDLPYEQSRLTHVLKDTLGGNSRVIFLCSISSEHRCRSGTLSTLRFGERAKLMPNKPVINEISEDDVNGLSDQIRQLKDELIKNKSGDTTTCKARYFSAQSARESLHTLRVSLNRSLIFPHIEVDSEEEMDVDEEDVQDLRDQISKIHSSSEDTLDDFMDAESGDESTPCSVGRSEDDQVIIDDFEGPQQEEQKEVSNNTNANEDLGSDRKSNLSIIASTRLSPIQDPTLCSSPKIHNKARMSITSLGLSPSKIRISDSPGDRNVEMCTNSAFRSSLQSSKLSPTDSLAASLQRGLHIIEYHQQNPAPRKSFIGLSFDHFARQSVAKISSAVQALPEDQGNNLCSFCKKPMNTNDNQTENVNLDKQIKDGNITKEIASKKETELEALCEEQRAKIQELSSLIDQYKNRSEELTSEGKVSVSLSVNEREVLLAEIQSLREQLKNQTTVSTTGSLLDQLRNGSTDQEYELDKERQKWMESESKWISLTEELRVDLESNRMHAEKTEMELCNEKKCTAELDDALQRAMYGHARMVEHYVELQELYNDLLEKHRRVMEAISEVKRAAARAGRKGCGTAFAAALAAELSTVRIDREKERAQLKEQNRRLRIQLRDTAEAVHAAGELLVRLRETEEASTLEKERTAALLQENEKLKKQLEKLRKKHEMELETMKVHLAESRLPESALGAFYHHENERTPDDDLSWRAAFASAYSD

SEQ ID NO: 38485 - protein, 792 aa, Zea mays subsp. mays
MNLKSSRSHVIFTCVIEAWSKGSSNGFSSSRTSRITFVDLAGPDTDELGAAKHSTKEERHLKKSLSRLGKLVNVLSETPESHKVDLPYEQSRLTHVLKDTLGGNSRVIFLCSISSEHRCRSGTLSTLRFGERAKLMPNKPVINEISEDDVNGLSDQIRQLKDELIKNKSGDTTTCKARYFSAQSARESLHTLRVSLNRSLIFPHIEVDSEEEMDVDEEDVQDLRDQISKIHSSSEDTLDDFMDAESGDESTPCSVGRSEDDQVIIDDFEGPQQEEQKEVSNNTNANEDLGSDRKSNLSIIASTRLSPIQDPTLCSSPKIHNKARMSITSLGLSPSKIRISDSPGDRNVEMCTNSAFRSSLQSSKLSPTDSLAASLQRGLHIIEYHQQNPAPRKSFIGLSFDHFARQSVAKISSAVQALPEDQGNNLCSFCKKPMNTNDNQTENVNLDKQIKDGNITKEIASKKETELEALCEEQRAKIQELSSLIDQYKNRSEELTSEGKVSVSLSVNEREVLLAEIQSLREQLKNQTTVSTTGSLLDQLRNGSTDQEYELDKERQKWMESESKWISLTEELRVDLESNRMHAEKTEMELCNEKKCTAELDDALQRAMYGHARMVEHYVELQELYNDLLEKHRRVMEAISEVKRAAARAGRKGCGTAFAAALAAELSTVRIDREKERAQLKEQNRRLRIQLRDTAEAVHAAGELLVRLRETEEASTLEKERTAALLQENEKLKKQLEKLRKKHEMELETMKVHLAESRLPESALGAFYHHENERTPDDDLSWRAAFASAYSD

SEQ ID NO: 38486 - DNA, 1759 bp, Zea mays subsp. mays
agagagagaaatcggaatccaagcgcaaccaaaagagaagagggcagacacgagggagcgcgtggggggagagggcatggtctctctcgtcccggcagtcccgtctcaagcaaaagctctctcctcttcttccgctcagtgcaccaatcactgcaacatactggcctgaggtcattgagttggtgaaagggaaggagggggtatcatgggcatctcatccaagtggattaaatccttggttggcataaggaagcaagaaaaagcgcagaatgcagaaaagcaagaaaaagggtggaacgctgagagcagtgaaactaagagctctgctaatcaatcactgcacaaacggaaacattctttggatcccggagctgcacttgcagtcgaagaaattacagtacaaagtgaagcattgactgataacaaaagcgcacaaatggtttcaaattcatttttttcagacagtacaccgcttgatgtgcacatttctcaggctgaacatcatagtaacgaagatttggccgcaactgttgtccagtctgcgtttcgagcgttcttggctaggcgtgctttacgagctttgaaaggaatagttctacttcaagcccttattaggggccattctgttagaaggcagacagcagagacgcttcagtgtatgcaagcgctggtaaaagcaaaagctcgtgtccgagcaagacaagttcgtgttgccttagaaaatcaagtggcacggaaaaagattcctgaacaagatgatcatgagaaccatgtccgagaagtcgagggaggctggtgtggcagtattggttccatggaggaaatgcaagctaaagcactgaaaagacgagaagctgctgctaagcgtgagagggcaatggcatatgctttgactcatcagcggcaagctggttccaagcaacaaaattctttgagcctgcaaggtcttgaacttggtgagaaccactgggagtcaaattggttagacaggtggatggctgtacgtccatgggagaacaggttacttgactgtaatgccaaagagagtctgccaacgcatgaagataaggatgaggaagcaaattctcagatcacaccaaagggtaaagtgtcaacttcaaatactcctggtctgagcaagaagaaaggtgttaaccacaaaaagtcatattcagatgttagttgtacttcatttgcacgaccagcaaatgtattaccatccacatctttaggatcatccaaacagaaggcaaaggctgtgggtgaagtttttgaggaagtcagctcccagccaacagatataggttctaaggatgtgcacaattcaaaagataagcttgtgcaagtgaatggaccagccaagaagcggttatccctcccaaataatgttggcagagaatcagggaagggaccaacccgcaggaattcgcttaacaggtctgctccaaaagcacgggcggactctcctaaccagggtgatgagttagaggcctgataacacattcctccaatttgacgtcggcaagccatcctaaagtgtgcttctccaggttgcccataacgtaacattcccaaacgatatcatgcagctagatttgggttgtgattcatatttctgttgtgtaatgctgtggtgtgttgtgccttgtgtggccttttattccgcatcgccaattttcttatgtttccagcttccctgtaagttgttctaactgctgaaactaaaagaaggaaatgtgctgtattgtgtttatgtgtc

SEQ ID NO: 38487 - protein, 429 aa, Zea mays subsp. mays
MGISSKWIKSLVGIRKQEKAQNAEKQEKGWNAESSETKSSANQSLHKRKHSLDPGAALAVEEITVQSEALTDNKSAQMVSNSFFSDSTPLDVHISQAEHHSNEDLAATVVQSAFRAFLARRALRALKGIVLLQALIRGHSVRRQTAETLQCMQALVKAKARVRARQVRVALENQVARKKIPEQDDHENHVREVEGGWCGSIGSMEEMQAKALKRREAAAKRERAMAYALTHQRQAGSKQQNSLSLQGLELGENHWESNWLDRWMAVRPWENRLLDCNAKESLPTHEDKDEEANSQITPKGKVSTSNTPGLSKKKGVNHKKSYSDVSCTSFARPANVLPSTSLGSSKQKAKAVGEVFEEVSSQPTDIGSKDVHNSKDKLVQVNGPAKKRLSLPNNVGRESGKGPTRRNSLNRSAPKARADSPNQGDELEA

SEQ ID NO: 38488 - protein, 352 aa, Zea mays subsp. mays
MVSNSFFSDSTPLDVHISQAEHHSNEDLAATVVQSAFRAFLARRALRALKGIVLLQALIRGHSVRRQTAETLQCMQALVKAKARVRARQVRVALENQVARKKIPEQDDHENHVREVEGGWCGSIGSMEEMQAKALKRREAAAKRERAMAYALTHQRQAGSKQQNSLSLQGLELGENHWESNWLDRWMAVRPWENRLLDCNAKESLPTHEDKDEEANSQITPKGKVSTSNTPGLSKKKGVNHKKSYSDVSCTSFARPANVLPSTSLGSSKQKAKAVGEVFEEVSSQPTDIGSKDVHNSKDKLVQVNGPAKKRLSLPNNVGRESGKGPTRRNSLNRSAPKARADSPNQGDELEA

SEQ ID NO: 38489 - protein, 278 aa, Zea mays subsp. mays
MQALVKAKARVRARQVRVALENQVARKKIPEQDDHENHVREVEGGWCGSIGSMEEMQAKALKRREAAAKRERAMAYALTHQRQAGSKQQNSLSLQGLELGENHWESNWLDRWMAVRPWENRLLDCNAKESLPTHEDKDEEANSQITPKGKVSTSNTPGLSKKKGVNHKKSYSDVSCTSFARPANVLPSTSLGSSKQKAKAVGEVFEEVSSQPTDIGSKDVHNSKDKLVQVNGPAKKRLSLPNNVGRESGKGPTRRNSLNRSAPKARADSPNQGDELEA

SEQ ID NO: 38490 - DNA, 830 bp, Zea mays subsp. mays
cttgctccatatcccatccatcacagctagctagcgtacagacgaataatctcttcttcacctcactagctaacaccagctagcagctcgatcgctctgtcctgcaataatggccgctcgctcctcctcccagcagctggtcgcggcggcggtcctggcagcggcgctgctgctgctggcggcgggggccgggacggcgtcggcggcggtgagctgcggcgaggtgacgtcgtcggtggcgccgtgcctcgggtacgcgatgggcagcgcggcgtcgccctccgcggcgtgctgcagcggggtgcgctcgctcaacagccgcgcgtcgtcggcggcggaccggcaggccacctgcaactgcctcaagagcatgacgggccggctcggcggcggcgtcagcatggccaacgccgccaacatccccggcaagtgcggcgtctccgtcggcgtgcccatcagccccaccgtcgactgcaccaagatcaactgatcgatggaaccatagtggaggtagctcgctcgttggatggcagcgtacgtggccatcagcagcatgcagtcgtcgtcgtagcagagatgtcctagctacgtgtgtgtcatgcatcagactggcacataataaagaagtagatcatgcacccactagtgatcacttcgtctagtgtccctccgttcgctgttgtcgtcgtcgtcgtcgtggtgtacctcgtacgtgacatgccgtagcacgtacgctagcagagcagcacctcaatgtccttgggtttgctttgctggctctctgttttcgtctcgtgttgcttttaatctggcacaggtttctaaattat

SEQ ID NO: 38491 - protein, 126 aa, Zea mays subsp. mays
MAARSSSQQLVAAAVLAAALLLLAAGAGTASAAVSCGEVTSSVAPCLGYAMGSAASPSAACCSGVRSLNSRASSAADRQATCNCLKSMTGRLGGGVSMANAANIPGKCGVSVGVPISPTVDCTKIN

SEQ ID NO: 38492 - protein, 76 aa, Zea mays subsp. mays
MGSAASPSAACCSGVRSLNSRASSAADRQATCNCLKSMTGRLGGGVSMANAANIPGKCGVSVGVPISPTVDCTKIN

SEQ ID NO: 38493 - DNA, 535 bp, Zea mays subsp. mays
atccaccatcacacagcaatccacacaagcacttcgacgtcacacgggcgctgcgcacagacacaccaagcgtcggcaccaatggcttactaccaggaggtggactactgctcggaggaggtgaggtcggtggccccggccggcttcggccgccacggcggcggcgtccagcagcacgtcgtcaaggagaagttcgaggaggtcgacacggtctcacgcgccggcgccaaccaccaccaccaccatggtcaccacggcggccacgggcttcgtggtgcgcgagaccagggtcgaggaggacatcaacacctgcaccggcgaggtccacgagcgcagggagagcttcctcgccagggctaactgagcagcccgggcggccgggcatccacgcccgttcgtgcctgcctgcgtgccttatgtatgtctgtgattgtgcagggtcatcgtacttggctagcgtacgtacgtgcacgcactcagctcctgtacgaattacgacaataagctcgtgacctgaataaaacttcttcgtaat

SEQ ID NO: 38494 - protein, 169 aa, Zea mays subsp. mays
PPSHSNPHKHFDVTRALRTDTPSVGTNGLLPGGGLLLGGGEVGGPGRLRPPRRRRPAARRQGEVRGGRHGLTRRRQPPPPPWSPRRPRASWCARPGSRRTSTPAPARSTSAGRASSPGLTEQPGRPGIHARSCLPACLMYVCDCAGSSYLASVRTCTHSAPVRITTISS

SEQ ID NO: 38495 - protein, 119 aa, Zea mays subsp. mays
IHHHTAIHTSTSTSHGRCAQTHQASAPMAYYQEVDYCSEEVRSVAPAGFGRHGGGVQQHVVKEKFEEVDTVSRAGANHHHHHGHHGGHGLRGARDQGRGGHQHLHRRGPRAQGELPRQG

SEQ ID NO: 38496 - protein, 92 aa, Zea mays subsp. mays
MAYYQEVDYCSEEVRSVAPAGFGRHGGGVQQHVVKEKFEEVDTVSRAGANHHHHHGHHGGHGLRGARDQGRGGHQHLHRRGPRAQGELPRQG

SEQ ID NO: 38497 - DNA, 945 bp, Zea mays subsp. mays
atatagaacgctagctgccggccggtgcagaccacgggaggcgcgggcgcgcgctataaaagccgagccagtgggcgcggccagtgtcacaactcacaattcacatcgaggtctcagcttcaggaaagggaaggaagcatgttcgggcaccaccaccaccacggccacggcgggcaccaccaggccccgccgccgcacgagcagacgctgttcaggatcttctgccgcgccgacgaggcgtactgcctcaccgtgcgccacgacgccgtcgtcctcgcgcccaccaacccccgcgacgagtaccagcactggtacaaggacatgaggcacagcacgaaggtgagggacgcggagggcccagccggcgttcgcgctcatcaacagggccaccggcctcgccatcaagcactcgctcggccagtcccatcccgtgaagctagtgccctacaacgcggagtacctggacgagtcggtgctgtggacggagagccgcgacgtcgggcacggcttccgctgcgtgcgcatggtgaacaacatctacctcaacatggacgccttccacggcgacaaggaccacggcggcgtccacgacggcaccaccgtcgtcctctgggagtgggccaagggcgacaaccagcgctggaagatcctgccctggtgaacgtgaacagagacgagctagatgaatccaaggaaccttacctagctgctgccgccgccgcctaattcgtcctcctccgctctagctgttatctgtctgtgtcttcgcgtcctcggttcctgaatggacgaataatatatagcatgcatgtacggctagcgaccatgtctgaatgacatcttcgttgctgctgctgctgctactgctacctgtccgtttggtgttctaaaagactctgatgagtggttctgaatgtctgcatttcaagtttgctgtgtgatgtc

SEQ ID NO: 38498 - protein, 195 aa, Zea mays subsp. mays
MFGHHHHHGHGGHHQAPPPHEQTLFRIFCRADEAYCLTVRHDAVVLAPTNPRDEYQHWYKDMRHSTKVRDAEGPAGVRAHQQGHRPRHQALARPVPSREASALQRGVPGRVGAVDGEPRRRARLPLRAHGEQHLPQHGRLPRRQGPRRRPRRHHRRPLGVGQGRQPALEDPALVNVNRDELDESKEPYLAAAAAA

SEQ ID NO: 38499 - protein, 134 aa, Zea mays subsp. mays
MRHSTKVRDAEGPAGVRAHQQGHRPRHQALARPVPSREASALQRGVPGRVGAVDGEPRRRARLPLRAHGEQHLPQHGRLPRRQGPRRRPRRHHRRPLGVGQGRQPALEDPALVNVNRDELDESKEPYLAAAAAA

SEQ ID NO: 38500 - protein, 107 aa, Zea mays subsp. mays
YRTLAAGRCRPREARARAIKAEPVGAASVTTHNSHRGLSFRKGKEACSGTTTTTATAGTTRPRRRTSRRCSGSSAAPTRRTASPCATTPSSSRPPTPATSTSTGTRT

SEQ ID NO: 38501 - DNA, 1628 bp, Zea mays subsp. mays
actagctgctctggctcccccgaggcaatcgagtaatcgacgaaggccaccaccacctccacaccactttgcctcgagaaggttccaccaagcctctcggctagggtttggggactttgggggcgatcgcaatggagggacgcggcgcggaacaagcacccgaggcggcggcggaggtgaaaaatccgaggtgcttcatggacgtcaccatcggcggcgagatggaggggaggatcgttgtagagctctacgcttccgtggtaccgcggacggcggagaacttccgcgcgctctgcacaggggagaaaggcatcggcgccgccagcgggcaagccgcttcactttaagggctcatgcttccaccgtgttattaaagggtttatgattcaagggggagacacaactgctggagacggaactgggggatagtcaatttatgggtccaaatttgaggacgagaattttgttttaaagcatgagaggaaaggaatgctttcaatggctaattctggtcccaacacaaatggttctcagtttttcatcactactacacggacacctcatttagacgggaaacatgttgtttttggtagagtgatgaaaggaatgggggtagttcgctctattgagcatgtttctgtcggagaagctgactgccccactcttgaagttaaaattgttgattgtggggagcttcctgaaggtgctgatgatggagttgtaaactttttcaaagatggtgatacgtacccagattggcccaatgatcttgaagagaagcctgctgaggtttcatggtggatggatgctgtggagtctgctaaagcttatgggaatgacaatttcaagaaacaggactacaaggcagctctcagaaagtacaggaaagctctgcgctacttggatctttgctgggagaaagaagagatagatgaagataagagcacagcactgcggaagaccaagtcaataatactcactaatagctccgcatgcaaattaaagttaggagattcaagtggggctttattagacgcagattttgcactgcgtgaaagggagggaaatgctaaagcttttttccgacaaggacaggcacacattgcacttaatgacattgatgcagccgtggagagctttaaacaggcattggagttggagccaaatgatgctggaatcaaaagagagctggctgctgcaaagaagaagattgctgacagaagagatcaggagcggaaggcatttgctaggattttccaatcttctggaaagtctgacaagagcaacgaagagaataattgatctacagttcctttcccccgtctgaaactttgcttagcttaaatctggggcacattggaacaggagtctcatgggagtctgctctgcaaaaaaacgcagattactgatctttagatagaaggaaacatagtggggggaaaggaagcttttgttttcttgtactacagaagtagcaattcgtgcttttgtcccggtcttagtttattcaggaaacggacattgaatttaaatgtgcaatttttagacccaacctgacgattcacatcttttgtgggtagttcgcccgtttcactttcgtggtgttttcttgtagccttttgtctgct

SEQ ID NO: 38502 - protein, 270 aa, Zea mays subsp. mays
MLSMANSGPNTNGSQFFITTTRTPHLDGKHVVFGRVMKGMGVVRSIEHVSVGEADCPTLEVKIVDCGELPEGADDGVVNFFKDGDTYPDWPNDLEEKPAEVSWWMDAVESAKAYGNDNFKKQDYKAALRKYRKALRYLDLCWEKEEIDEDKSTALRKTKSIILTNSSACKLKLGDSSGALLDADFALREREGNAKAFFRQGQAHIALNDIDAAVESFKQALELEPNDAGIKRELAAAKKKIADRRDQERKAFARIFQSSGKSDKSNEENN

SEQ ID NO: 38503 - protein, 267 aa, Zea mays subsp. mays
MANSGPNTNGSQFFITTTRTPHLDGKHVVFGRVMKGMGVVRSIEHVSVGEADCPTLEVKIVDCGELPEGADDGVVNFFKDGDTYPDWPNDLEEKPAEVSWWMDAVESAKAYGNDNFKKQDYKAALRKYRKALRYLDLCWEKEEIDEDKSTALRKTKSIILTNSSACKLKLGDSSGALLDADFALREREGNAKAFFRQGQAHIALNDIDAAVESFKQALELEPNDAGIKRELAAAKKKIADRRDQERKAFARIFQSSGKSDKSNEENN

SEQ ID NO: 38504 - protein, 234 aa, Zea mays subsp. mays
MKGMGVVRSIEHVSVGEADCPTLEVKIVDCGELPEGADDGVVNFFKDGDTYPDWPNDLEEKPAEVSWWMDAVESAKAYGNDNFKKQDYKAALRKYRKALRYLDLCWEKEEIDEDKSTALRKTKSIILTNSSACKLKLGDSSGALLDADFALREREGNAKAFFRQGQAHIALNDIDAAVESFKQALELEPNDAGIKRELAAAKKKIADRRDQERKAFARIFQSSGKSDKSNEENN

SEQ ID NO: 38505 - DNA, 1396 bp, Zea mays subsp. mays
caattaaccctcactaaagggaacaaaagctggagctccaccgcggtggcggccgctctagaactagtggatcccccgggctgcaggaattcgcacgagaccattacctagaacatcctaatcgaaaaaagttccatatccaacacacacagcaacgctcgctcggcactgtcactagctagttgctctactagagggcgggtatagagctgcctgcaatccgccgctgagaagggaggatcggaagcgacgatgaggtcgtttgctcctgtctttctgtcggcggtcgtggcctggctggagctggcgggcaccgcgcagggcggcaacttctaccaggacacagagatgacctggggcgatggccgcggcaaggtagtggacggcgggcgcgggctggacctgacgctggaccgcacgtccggctccgggttccagtccaagagcgagtacctgttcggcaagatcgacatgcagatcaagctggtgccaggcaactccgctggcacggtcaccaccttctacctgtcgtccccagggcgacgcgcacgacgagatcgacttcgagttcctgggcaacgtgagcggggagccctacacgctgcacaccaacgtgttcacgcgcggacagggccagcgggagcagcagttccgcctctggttcgaccctaccactgccttccacacctactccatcctgtggaacccgcagcacgtgatcttcgcggtggacggcaccccggtgcgggacttcaagaaccacgaggcgcgcggggtggcgttcccgaggatgcagcccatgaggctgtacgccagcctgtggaacgccgacgactgggccacgcagggcgggcgcgtcaaggcggactggtccaaggcccccttcgtcgcctccttccgcggtttcagcgccgacgcctgcgtctgggacggcggcaggcagcgctgccctgagggcaccatggaggccgccgccgtcgcgggtgccggctccggccgcggctggtggaaccagcagctcagcgacatgagctaccgccgcatgcgctgggtgcagcgcaagttcatgatctacaactactgcgccgacgccaagcgcttcccgcagggcgtgcccgccgagtgcaagctccggtgagggagcgaggtttgttgggacgtccgtggggcatcaaaaccaagcacgatccctagtcgtggaaagtagaaaccaggcatcgattcgatcgtcgtcgacggtcttagtagtagctacttatttcgcagtgggcgatgaaagaatggtgtcatgtaaatgtagctctagtcgtgtcgcattctttgatttgttgtttcagcagcaccggatgtacaagtattgagtttgggctagcaagaataagtaatctttttcggc

SEQ ID NO: 38506 - protein, 233 aa, Zea mays subsp. mays
MRSFAPVFLSAVVAWLELAGTAQGGNFYQDTEMTWGDGRGKVVDGGRGLDLTLDRTSGSGFQSKSEYLFGKIDMQIKLVPGNSAGTVTTFYLSSPGRRARRDRLRVPGQRERGALHAAHQRVHARTGPAGAAVPPLVRPYHCLPHLLHPVEPAARDLRGGRHPGAGLQEPRGARGGVPEDAAHEAVRQPVERRRLGHAGRARQGGLVQGPLRRLLPRFQRRRLRLGRRQAALP

SEQ ID NO: 38507 - protein, 201 aa, Zea mays subsp. mays
MTWGDGRGKVVDGGRGLDLTLDRTSGSGFQSKSEYLFGKIDMQIKLVPGNSAGTVTTFYLSSPGRRARRDRLRVPGQRERGALHAAHQRVHARTGPAGAAVPPLVRPYHCLPHLLHPVEPAARDLRGGRHPGAGLQEPRGARGGVPEDAAHEAVRQPVERRRLGHAGRARQGGLVQGPLRRLLPRFQRRRLRLGRRQAALP

SEQ ID NO: 38508 - protein, 160 aa, Zea mays subsp. mays
MQIKLVPGNSAGTVTTFYLSSPGRRARRDRLRVPGQRERGALHAAHQRVHARTGPAGAAVPPLVRPYHCLPHLLHPVEPAARDLRGGRHPGAGLQEPRGARGGVPEDAAHEAVRQPVERRRLGHAGRARQGGLVQGPLRRLLPRFQRRRLRLGRRQAALP

SEQ ID NO: 38509 - DNA, 1931 bp, Zea mays subsp. mays
actactagtgatcagaccagtgagctagcgactgtaccatgcagcagctgtaggagagcctggtggtaggtaggataggagtagcgccagccgccaagtgcgcgtccgggctggctgcttcgacgagcaggagggagccgcaccgccgggctcccgcaatgtcgcctcctccgcccccgccgctgctgcgcaacgagctgtcgcgcaggacggcggtgctgggcctgcgcctgtgggtgctggtgggcatcgccgtcggggccgccttcgtgctgctcctcgtgctcatctccctccacctcgccgcggcgcggcggaggcggcccaggaagggcgtcgcgcacgcgccggcgggggcgccgccgctgtccccgtccaccatcccgcccgtgtccaaggagatccaggaggtggccgtccacgtcggctcgctccgccactacctggagacggggcacgcgttcctcaaggacggcggcgacggcgacggcgacggcgagtccgtggcgcacgggtcgcagcgcgtccacatcgaggccggcaagggccagcgcatggtcgcggcggcttccgacgcgctgtcggcggccgtgggccccgaggtgtcgcacctcggctggggccactggtacacgctgcgggagctggaggaggccaccgccgcgttcgctcccgagcacgtcgtcggcgagggcgggtacggcatcgtctaccgcggcgtcctcgccgacggctaccaggtcgccgtgaagaacctcctcaacaacaggggacaagccgagcgggagttcagggtggaggtggaggccatcggccgcgtccggcacaagaatctggtccggctactgggctactgcgccgagggcgcccaacggatacttgtgtacgagtacgtggacaacggcaacctcgagcagtggctgcacggcgacgtcggggcagtgagcccgctcacctgggacgtccggatgaacatcgtgctcggcatggccaaagggatcacgtacctgcacgaggggctggaacccaaggtggtgcacagggacatcaagtcgagcaacatcctgctggacaggaggtggaacccgaaggtctcggacttcggcctcgccaagctcctgggggcggacagcaactacgtcaccaccagagtgatgggaacgtttggctacggccccagagtacgctagcaccggcatgctgaacgagaggagcgacgtgtacagcttcgggatcctgatcatggagatcatctccggccgaagccccgtcgactacgccaggcctgccggagaggtaaaccttgtagagtggctcaagaacaaggtgaccaacagggactacgaggccatcgtggacccgaagctgccggagaagccgtcctccaaggcgctcaagaaggcgctcctggtcgcgctgaggtgcgtggatcccgactcgcagaaacggcccaagatggggcacgtaatccacatgctcgaagtcgacgacttcccgtatcgagaggatcgtcgaactcttcggccgggcaacggcagccccctggagaaggcgaggaatccggcggcggggtcatgcgacggcagcagctgctacgggggcgacacgaccaccgcgagcacgccgtccagactagtgcaggacatgtagtagtgatgtgtttgtagccagctgctgctggccttctgagctctgcctgcgggctgcggggcaacatggagatggacatgctgcaactctgctccgtcgttaattaaaggttcccttcctaggtgttgattttggactcaacagtgacttgacgtaagttttgccgcccgatggccaactgtttgtatagggaactgctgctcttcatctcaggccctaagtttgactgttctttgattcgcgtcatgatgtaaaaataaaagcgtgcgtctgtattggtc

SEQ ID NO: 38510 - protein, 343 aa, Zea mays subsp. mays
MSPPPPPPLLRNELSRRTAVLGLRLWVLVGIAVGAAFVLLLVLISLHLAAARRRRPRKGVAHAPAGAPPLSPSTIPPVSKEIQEVAVHVGSLRHYLETGHAFLKDGGDGDGDGESVAHGSQRVHIEAGKGQRMVAAASDALSAAVGPEVSHLGWGHWYTLRELEEATAAFAPEHVVGEGGYGIVYRGVLADGYQVAVKNLLNNRGQAEREFRVEVEAIGRVRHKNLVRLLGYCAEGAQRILVYEYVDNGNLEQWLHGDVGAVSPLTWDVRMNIVLGMAKGITYLHEGLEPKVVHRDIKSSNILLDRRWNPKVSDFGLAKLLGADSNYVTTRVMGTFGYGPRVR

SEQ ID NO: 38511 - protein, 211 aa, Zea mays subsp. mays
MVAAASDALSAAVGPEVSHLGWGHWYTLRELEEATAAFAPEHVVGEGGYGIVYRGVLADGYQVAVKNLLNNRGQAEREFRVEVEAIGRVRHKNLVRLLGYCAEGAQRILVYEYVDNGNLEQWLHGDVGAVSPLTWDVRMNIVLGMAKGITYLHEGLEPKVVHRDIKSSNILLDRRWNPKVSDFGLAKLLGADSNYVTTRVMGTFGYGPRVR

SEQ ID NO: 38512 - DNA, 1764 bp, Zea mays subsp. mays
aaccgaggcggtcaggctccctcctccttcctcctccctgcaaatcctgcaggcaccaccgctcgttttcctgtccgggggacaggagagaaggggagagaccgagagagggtgaggcgcggcgtccgcccgatctgctccgccccccgaagcagcctgtcacgtcgtcctcactctcagcaaccagcgaaaatgggtgccggaggcaggatgaccgagaaggagcgggagaagcatgagcaggagcaggtcgcccgtgctaccggcggtggcgcggcagtgcagcggtcgccggtggagaagccgccgttcacgttggggcagatcaagaaggcgatcccgccgcactgcttcgagcgctccgtgctgaggtccttctcgtacgtggcccacgacctgtcgctcgccgcggcgctcctctacctcgcggtggccgtgataccggcgctaccctgcccgctccgctacgcggcctggccgctgtactgggtggcccaggggtgcgtgtgcacgggcgtgtgggtgatcgcgcacgagtgcggccaccacgccttctccgaccacgcgctcctggacgacgccgtcggcctggcgctgcactcggcgctgctggtgccctacttctcgtggaagtacagccaccggcgccaccactccaacacggggtccctggagcgcgacgaggtgttcgtgccgaggaccaaggaggcgctgccgtggtacgccccgtacgtgcacggcagccccgcgggccggctggcgcacgtcgccgtgcagctcaccctgggctggccgctgtacctggccaccaacgcgtcggggcgcccgtacccgcgcttcgcctgccacttcgacccctacggcccgatctacggcgaccgggagcgcgcccagatcttcgtctcggacgccggcgtcgcggccgtggcgttcgggctgtacaagctggcggcggcgttcgggctctggtgggtggtgcgcgtgtacgccgtgccgctgctgatcgtcaacgcgtggctggtgctcatcacgtacctgcagcacacccacccggcgctgccccactacgactcgggcgagtgggactggctgcgcggcgcgctcgccaccgtcgaccgagactacggcgtcctcaaccgcgtgttccaccacatcacggacacgcacgtcgcgcaccacctcttctccaccatgccgcactaccacgccgtggaggccaccagggcgatcaggcccgtcctcggcgagtactaccagttcgacccgacccctgtcgccaaggccacctggcgcgaggccagggagtgcatctacgtcgagcctgagaaccgcaaccgcaagggcgtcttctggtacaacagcaagttctagccgccgcttgctttttccctaggaatgggaggagaaatcaggatgagaagatggtaatgtctgcatctacctgtctaatggttagtcaccagtctttagacaggaagagagcatttgggcttcagaaaaggaggcttactgcactactgcagtgccatcgctagatttaaggcaaattcagtgtgtctgtgcccatggctgtgagctttgggtactctcaagtagtcaagttctcttgtttttgtttttagtcgtcgctgttgtaggcttgccggcggcggtcgttgcgtggccgcgccttgtcgtgtgcgtcttgccatctcttcgtgctcccttcgtgttgttgtaaaacactagtctggtgtctttggcggaataacagatcgtcgaacg

SEQ ID NO: 38513 - protein, 456 aa, Zea mays subsp. mays
NRGGQAPSSFLLPANPAGTTARFPVRGTGEKGRDRERVRRGVRPICSAPRSSLSRRPHSQQPAKMGAGGRMTEKEREKHEQEQVARATGGGAAVQRSPVEKPPFTLGQIKKAIPPHCFERSVLRSFSYVAHDLSLAAALLYLAVAVIPALPCPLRYAAWPLYWVAQGCVCTGVWVIAHECGHHAFSDHALLDDAVGLALHSALLVPYFSWKYSHRRHHSNTGSLERDEVFVPRTKEALPWYAPYVHGSPAGRLAHVAVQLTLGWPLYLATNASGRPYPRFACHFDPYGPIYGDRERAQIFVSDAGVAAVAFGLYKLAAAFGLWWVVRVYAVPLLIVNAWLVLITYLQHTHPALPHYDSGEWDWLRGALATVDRDYGVLNRVFHHITDTHVAHHLFSTMPHYHAVEATRAIRPVLGEYYQFDPTPVAKATWREARECIYVEPENRNRKGVFWYNSKF

SEQ ID NO: 38514 - protein, 392 aa, Zea mays subsp. mays
MGAGGRMTEKEREKHEQEQVARATGGGAAVQRSPVEKPPFTLGQIKKAIPPHCFERSVLRSFSYVAHDLSLAAALLYLAVAVIPALPCPLRYAAWPLYWVAQGCVCTGVWVIAHECGHHAFSDHALLDDAVGLALHSALLVPYFSWKYSHRRHHSNTGSLERDEVFVPRTKEALPWYAPYVHGSPAGRLAHVAVQLTLGWPLYLATNASGRPYPRFACHFDPYGPIYGDRERAQIFVSDAGVAAVAFGLYKLAAAFGLWWVVRVYAVPLLIVNAWLVLITYLQHTHPALPHYDSGEWDWLRGALATVDRDYGVLNRVFHHITDTHVAHHLFSTMPHYHAVEATRAIRPVLGEYYQFDPTPVAKATWREARECIYVEPENRNRKGVFWYNSKF

SEQ ID NO: 38515 - protein, 386 aa, Zea mays subsp. mays
MTEKEREKHEQEQVARATGGGAAVQRSPVEKPPFTLGQIKKAIPPHCFERSVLRSFSYVAHDLSLAAALLYLAVAVIPALPCPLRYAAWPLYWVAQGCVCTGVWVIAHECGHHAFSDHALLDDAVGLALHSALLVPYFSWKYSHRRHHSNTGSLERDEVFVPRTKEALPWYAPYVHGSPAGRLAHVAVQLTLGWPLYLATNASGRPYPRFACHFDPYGPIYGDRERAQIFVSDAGVAAVAFGLYKLAAAFGLWWVVRVYAVPLLIVNAWLVLITYLQHTHPALPHYDSGEWDWLRGALATVDRDYGVLNRVFHHITDTHVAHHLFSTMPHYHAVEATRAIRPVLGEYYQFDPTPVAKATWREARECIYVEPENRNRKGVFWYNSKF

SEQ ID NO: 38516 - DNA, 788 bp, Zea mays subsp. mays
attcgcaccaccgccgcgccgcccaaaccctagccgccgccgccgccgccgccgccatggtcgccgtcaaccgccccctcgtctccgtgaaggccctagagggcgacatggtaaccgacgcccccggcatcgccttaccgcccgtcttcggggcgccgatccgccccgacgtggtcaggttcacccacaagctgctgtcctgcaacaagcgccagccctacgcagtctcccgccgcgccggccaccagacgtcggccgagtcctggggtaccggccgcgccgtgtctcgtatcccccgcgtcggcggcggcggcggtggacggggaagaggtagcaggcatgacaggtatgatgatggagcaggtagaggcggcaggcatgacaggtacgatgatggagcgggtagaggcggcaggtatgagaggtatgatgatggaggaaggcgtaggcatggtagccccccgaggcgtggaaggagcccggtcagggaaagcagcgaggagcgaagggccaagattgagcagtggaaccgtgagcgggagtcaaaacagtgagctctctgtggcaactgttctgagacgtgttattcggtggacttgttgcttagctcgtctttcactgctatattctaagtatgcttgtgtggctgatatgcttgagtgcaggactcagttcaattttgtggttaaatcggacatgtaaactctatttatttccttgtggattgtgttgaatcatttgccattatgttatgctgacaattggtatcaaatcttttgtgatgagct

SEQ ID NO: 38517 - protein, 183 aa, Zea mays subsp. mays
SHHRRAAQTLAAAAAAAAMVAVNRPLVSVKALEGDMVTDAPGIALPPVFGAPIRPDVVRFTHKLLSCNKRQPYAVSRRAGHQTSAESWGTGRAVSRIPRVGGGGGGRGRGSRHDRYDDGAGRGGRHDRYDDGAGRGGRYERYDDGGRRRHGSPPRRGRSPVRESSEERRAKIEQWNRERESKQ

SEQ ID NO: 38518 - protein, 165 aa, Zea mays subsp. mays
MVAVNRPLVSVKALEGDMVTDAPGIALPPVFGAPIRPDVVRFTHKLLSCNKRQPYAVSRRAGHQTSAESWGTGRAVSRIPRVGGGGGGRGRGSRHDRYDDGAGRGGRHDRYDDGAGRGGRYERYDDGGRRRHGSPPRRGRSPVRESSEERRAKIEQWNRERESKQ

SEQ ID NO: 38519 - protein, 148 aa, Zea mays subsp. mays
MVTDAPGIALPPVFGAPIRPDVVRFTHKLLSCNKRQPYAVSRRAGHQTSAESWGTGRAVSRIPRVGGGGGGRGRGSRHDRYDDGAGRGGRHDRYDDGAGRGGRYERYDDGGRRRHGSPPRRGRSPVRESSEERRAKIEQWNRERESKQ

SEQ ID NO: 38520 - DNA, 1174 bp, Zea mays subsp. mays
atagtaccattcactaatccaagacaaaacatggctgtgaatgtgagaaccatgtggtcgtcgatgcgggcacaggttgcgatggttgtggcgttggtgttcttggtgagaggcgcatggtgcggtcctcccaaagtccccccaggcaagaacatcacggccacctatggcaaggactggctggacgctaaagcgacatggtatggcaagccgacgggtgccggtcccgacgataacggtggcggctgcgggtacaaggacgtgaacaagccccccttcaatagcatgggcgcatgcggcaacatccccatcttcaaggatggtctgggttgtgggtcctgcttcgagatcaagtgcgataagcctgtggagtgctccggcaagcccgtggtggtgcacatcacggacatgaactatgagcctatcgcggcgtaccacttcgatttagcaggcacggcgttcggcgccatggccaagaagggcgagaggagaagctgcgcaaggcgggcatcatcgacatgcagttccgaagggttaagtgcaagtacgactccaaggtcaccttccaccttgaaaaggggtgcggccccaactacctggcgctgctggtcaagtacgtcgatggcgacggtgacattgtggcagtggacgtcaaggagaagggctctgacacgtacgagcccctgaagcactcctggggcgccatctggaggaaggacagcgacaaaccgcttaagggacccctcaccgtccgcctcactaccgagggaggcaccaagtccgtctacgacgatgtcatccctgccaactggaaggccaacaccgcctacaccgccaaataattaactttagtgctgacaatactttaagccggcctatgctagctatactagaattggttggatcccaagcaatgcattacacatgcatgcattggaccgtgatatctatttgctaccactaccctattacgacagtgatgctggcgccaacaatgatggtgtcatcctccttctccatcttcttcatctccatatatagctagagtgagacttcgctgttgtttaaaagagaagagttaagaaatggattgacaagttatataataagtgcctaatgaaatatttgataggccttcattttttatcaaaggatccatgaatgttgtgttgtc

SEQ ID NO: 38521 - protein, 228 aa, Zea mays subsp. mays
IVPFTNPRQNMAVNVRTMWSSMRAQVAMVVALVFLVRGAWCGPPKVPPGKNITATYGKDWLDAKATWYGKPTGAGPDDNGGGCGYKDVNKPPFNSMGACGNIPIFKDGLGCGSCFEIKCDKPVECSGKPVVVHITDMNYEPIAAYHFDLAGTAFGAMAKKGERRSCARRASSTCSSEGLSASTTPRSPSTLKRGAAPTTWRCWSSTSMATVTLWQWTSRRRALTRTSP

SEQ ID NO: 38522 - protein, 218 aa, Zea mays subsp. mays
MAVNVRTMWSSMRAQVAMVVALVFLVRGAWCGPPKVPPGKNITATYGKDWLDAKATWYGKPTGAGPDDNGGGCGYKDVNKPPFNSMGACGNIPIFKDGLGCGSCFEIKCDKPVECSGKPVVVHITDMNYEPIAAYHFDLAGTAFGAMAKKGERRSCARRASSTCSSEGLSASTTPRSPSTLKRGAAPTTWRCWSSTSMATVTLWQWTSRRRALTRTSP

SEQ ID NO: 38523 - protein, 211 aa, Zea mays subsp. mays
MWSSMRAQVAMVVALVFLVRGAWCGPPKVPPGKNITATYGKDWLDAKATWYGKPTGAGPDDNGGGCGYKDVNKPPFNSMGACGNIPIFKDGLGCGSCFEIKCDKPVECSGKPVVVHITDMNYEPIAAYHFDLAGTAFGAMAKKGERRSCARRASSTCSSEGLSASTTPRSPSTLKRGAAPTTWRCWSSTSMATVTLWQWTSRRRALTRTSP

SEQ ID NO: 38524 - DNA, 1555 bp, Zea mays subsp. mays
gaaaaaacaaagaaagtcgcggcggaggcaatgtgctgcaacgcgaaggtctcgccactgccggttgagatggacacctccgcctccaaagtgctcaccaacgacgatctccttcacgacatccttctccgcctaggatgcccgagctgcctcgtcagtgccgcgctcaccagcaagtgctggctgcgtggcgcctccgatcaggtcttcgcgcgcgacttctgcgcggaccaccagccgcgcctacttgggatctacgtctccagcggcggcatctctgggtcggagttcatcccattcaggcaacctgctggtggctctaggccggaggtgagtactgtcctcaaccatgccgatttcggtttgggcgacctgccggcgccgagcgtttgggactgccggaacggcatggtcctcttccagttcggtggcgagacctttaaccccgctggtctcgctgcgcgttccccgctgctgtatcctaacatgcacgagagcgtggtgctcccgccgtcgccgcagccgtcctacttcccggagtaccctcacgcgatgctcctccctaccgacaaaggcgacgacgccttgtgctaccgcgtcgacgtccgcatctgggagtcgcacaacaaggccgcggcactggtgtgggtcctgcggtccggctcctggcacatccgctgcatagccgcgggtgttctcgccaagtcgccggcccagatcctgccgactaccgtgctcgacggcggcaagatctacatggcgacccaggcggggtacatcctgggactggacctcgccacggcgagattcttcatcgtcgatctccctcggggtgtggagcttgaccagtacccaggcaaccttgtccactgccgcggggacgactctgtcctctacctcttccatgtggacggggacaacaggctcaacgtctggctccgcaggatggaagacgaccagaaggggcacggcggccctggtgctgctggcggcagcgccggcgccaccaaggggtgggtgctcagggacaccatttccgtgcgtgagacctgtggccatctcgtggagcagggttgggagaaggcaggtgacggggacgaggacgctgctgcagtgatgatagtgggcgccggggacaacgccgagttcgtgttcttggagctcggtgtgactggcgtcgttgcgtacatgcacgtcaagaccagagaggtgaagcaggtgtaccagaggcagccagacgacgaccacttcatcagtgttcgtccgttcatgctcgtcaagccttctgttttcccagtactggaggatgctcatgaaggcgaggccgcagccgcactgcatcaggagtaatcatcccagcagtgccagcagtatcttctctagtatttatttacttatattaaactgcataaggtttgttaaatgttatagattccaggagacagaaatcgagcgttcgatcggcgcgtcctgtgatttctgtcattctgagctatgaacatgtttgctttaatcatgttatcggattcagatgcattaattaatcagtttggtg

SEQ ID NO: 38525 - protein, 449 aa, Zea mays subsp. mays
EKTKKVAAEAMCCNAKVSPLPVEMDTSASKVLTNDDLLHDILLRLGCPSCLVSAALTSKCWLRGASDQVFARDFCADHQPRLLGIYVSSGGISGSEFIPFRQPAGGSRPEVSTVLNHADFGLGDLPAPSVWDCRNGMVLFQFGGETFNPAGLAARSPLLYPNMHESVVLPPSPQPSYFPEYPHAMLLPTDKGDDALCYRVDVRIWESHNKAAALVWVLRSGSWHIRCIAAGVLAKSPAQILPTTVLDGGKIYMATQAGYILGLDLATARFFIVDLPRGVELDQYPGNLVHCRGDDSVLYLFHVDGDNRLNVWLRRMEDDQKGHGGPGAAGGSAGATKGWVLRDTISVRETCGHLVEQGWEKAGDGDEDAAAVMIVGAGDNAEFVFLELGVTGVVAYMHVKTREVKQVYQRQPDDDHFISVRPFMLVKPSVFPVLEDAHEGEAAAALHQE

SEQ ID NO: 38526 - protein, 439 aa, Zea mays subsp. mays
MCCNAKVSPLPVEMDTSASKVLTNDDLLHDILLRLGCPSCLVSAALTSKCWLRGASDQVFARDFCADHQPRLLGIYVSSGGISGSEFIPFRQPAGGSRPEVSTVLNHADFGLGDLPAPSVWDCRNGMVLFQFGGETFNPAGLAARSPLLYPNMHESVVLPPSPQPSYFPEYPHAMLLPTDKGDDALCYRVDVRIWESHNKAAALVWVLRSGSWHIRCIAAGVLAKSPAQILPTTVLDGGKIYMATQAGYILGLDLATARFFIVDLPRGVELDQYPGNLVHCRGDDSVLYLFHVDGDNRLNVWLRRMEDDQKGHGGPGAAGGSAGATKGWVLRDTISVRETCGHLVEQGWEKAGDGDEDAAAVMIVGAGDNAEFVFLELGVTGVVAYMHVKTREVKQVYQRQPDDDHFISVRPFMLVKPSVFPVLEDAHEGEAAAALHQE

SEQ ID NO: 38527 - protein, 426 aa, Zea mays subsp. mays
MDTSASKVLTNDDLLHDILLRLGCPSCLVSAALTSKCWLRGASDQVFARDFCADHQPRLLGIYVSSGGISGSEFIPFRQPAGGSRPEVSTVLNHADFGLGDLPAPSVWDCRNGMVLFQFGGETFNPAGLAARSPLLYPNMHESVVLPPSPQPSYFPEYPHAMLLPTDKGDDALCYRVDVRIWESHNKAAALVWVLRSGSWHIRCIAAGVLAKSPAQILPTTVLDGGKIYMATQAGYILGLDLATARFFIVDLPRGVELDQYPGNLVHCRGDDSVLYLFHVDGDNRLNVWLRRMEDDQKGHGGPGAAGGSAGATKGWVLRDTISVRETCGHLVEQGWEKAGDGDEDAAAVMIVGAGDNAEFVFLELGVTGVVAYMHVKTREVKQVYQRQPDDDHFISVRPFMLVKPSVFPVLEDAHEGEAAAALHQE

SEQ ID NO: 38528 - DNA, 2090 bp, Zea mays subsp. mays
caaaaagttcgcgccgccgactcgcctcgcgtcgcctcactagggtttgcagttcccgtcgcgggcgaaggcggcgtcgtctcgtggcggcgccgtctccgtgtgccttcccgctcccaagcaatggccttggaagatgggagcccagctacttttactccacaagtgattgctaatgcatttgtcaaacaatactatcaaactcttcgatatgccagagaggatgcctataaattctataatgacaaaagtattcttggtcgaacagattctaatgggaaaatgatttgtgtaaccacaattgatgatatcaaggagcaacttgtgtctacagattgtgctgactgtttgatagagatcgagactgttgatgcacagccatcccatgtggatggtgtgatcattttggttgctggatattttacaacggctgttgtgaaacagaagtttatacaatcattttttctcgctccacaggaaaatagtggctattatgttttgaatgatacattcagacttactgggatttcattcgaggtgaaggtagttgcagctaaccatgataacaaaagcacacaaattaccaccctgcccaatgagccagaaatagattcatttaaggagattgaagtgccaggtgtaccacctgcaggaaacattctcgtcaatgatggagttatcagcacctctgcaaatgttgtttctccagttaagaatgaccctgttgttgagacatgtgtgaaagtggttaacgaggatgttgtgaagatacctgtagccgctccagcttcaactcctgttacagctgaggaagttgttaacaaggattttgtgaagattcctgagtctgctccggctctcccttcatcagttgagaaggctgctccagcacctcccgcatcagttgagaaggctgctgcagcacctcccgcatcagttgagaaaggtgctccagctcctcgcacaccagttgagaaggctgatccagctcctagtgcacctgttgagaaaggtgctccagctcttcgcgcaccagttgagaaggctgatccagctcctcgtgcaccagttgagaaggaagtaactaggaagacttatgcatcagttgttaaaatcccgagggaggacacacagcctgccccagctgccagaccctccaagcccaacctaaatataaagatggttcaaaatacggagaaaaatgtgtcctcaccatcgaaacctgctcatgctactgttaatgccctaccgggcgataagggtgttcctaaaaacaaatcacctgatgagccagggtactcaatttttgttaagaatttaccttttgaagcaactgttgaaatggtcgaacaagagttcagcaagtttggtgctattaaatctggtggtgtacaagtcaaatgccagcctgatcagttttgctttggctttgtcgaatttgagtctcagcaatccatgctagcagcaatcgaggcttctagggtttatttcggcacaagagaatcatatgttgaggagaaaagaaccaaaacacgagttgttgatggtgttatcacccgtggggatgacaatggcaacggcggtggcggtcggttccattctggcagaggtggtggttactatggggacggctacaagcggcagtggggcggtcagaacaacggctactacaacggcgcggataacatgaggaacgactactcaggtcgtgtccgtggaccgcaagggaacggccaccctcagaacggccacggctaccatcagaacggccacggctactactctgggaatggctaccaacagcgacgccccaacagcaatgggaacggactgagggtcgagcgcaacaatggcttcaggcagcaaggccctgcatctgcctagaccttgtcatttttgcagtccatccttgatacgaaagcagtggggatattttgatgtctataggtagatactttgtcatggctgaattttgttgtcgcggttgataagagcaatcgtgcgtcctttgactggaactgtaatgaggagtggagtcagtcgtgtcgcaaaggggaaaaaaacatctatcgaaatccctgctactcttt

SEQ ID NO: 38529 - protein, 627 aa, Zea mays subsp. mays
QKVRAADSPRVASLGFAVPVAGEGGVVSWRRRLRVPSRSQAMALEDGSPATFTPQVIANAFVKQYYQTLRYAREDAYKFYNDKSILGRTDSNGKMICVTTIDDIKEQLVSTDCADCLIEIETVDAQPSHVDGVIILVAGYFTTAVVKQKFIQSFFLAPQENSGYYVLNDTFRLTGISFEVKVVAANHDNKSTQITTLPNEPEIDSFKEIEVPGVPPAGNILVNDGVISTSANVVSPVKNDPVVETCVKVVNEDVVKIPVAAPASTPVTAEEVVNKDFVKIPESAPALPSSVEKAAPAPPASVEKAAAAPPASVEKGAPAPRTPVEKADPAPSAPVEKGAPALRAPVEKADPAPRAPVEKEVTRKTYASVVKIPREDTQPAPAARPSKPNLNIKMVQNTEKNVSSPSKPAHATVNALPGDKGVPKNKSPDEPGYSIFVKNLPFEATVEMVEQEFSKFGAIKSGGVQVKCQPDQFCFGFVEFESQQSMLAAIEASRVYFGTRESYVEEKRTKTRVVDGVITRGDDNGNGGGGRFHSGRGGGYYGDGYKRQWGGQNNGYYNGADNMRNDYSGRVRGPQGNGHPQNGHGYHQNGHGYYSGNGYQQRRPNSNGNGLRVERNNGFRQQGPASA

SEQ ID NO: 38530 - protein, 586 aa, Zea mays subsp. mays
MALEDGSPATFTPQVIANAFVKQYYQTLRYAREDAYKFYNDKSILGRTDSNGKMICVTTIDDIKEQLVSTDCADCLIEIETVDAQPSHVDGVIILVAGYFTTAVVKQKFIQSFFLAPQENSGYYVLNDTFRLTGISFEVKVVAANHDNKSTQITTLPNEPEIDSFKEIEVPGVPPAGNILVNDGVISTSANVVSPVKNDPVVETCVKVVNEDVVKIPVAAPASTPVTAEEVVNKDFVKIPESAPALPSSVEKAAPAPPASVEKAAAAPPASVEKGAPAPRTPVEKADPAPSAPVEKGAPALRAPVEKADPAPRAPVEKEVTRKTYASVVKIPREDTQPAPAARPSKPNLNIKMVQNTEKNVSSPSKPAHATVNALPGDKGVPKNKSPDEPGYSIFVKNLPFEATVEMVEQEFSKFGAIKSGGVQVKCQPDQFCFGFVEFESQQSMLAAIEASRVYFGTRESYVEEKRTKTRVVDGVITRGDDNGNGGGGRFHSGRGGGYYGDGYKRQWGGQNNGYYNGADNMRNDYSGRVRGPQGNGHPQNGHGYHQNGHGYYSGNGYQQRRPNSNGNGLRVERNNGFRQQGPASA

SEQ ID NO: 38531 - protein, 533 aa, Zea mays subsp. mays
MICVTTIDDIKEQLVSTDCADCLIEIETVDAQPSHVDGVIILVAGYFTTAVVKQKFIQSFFLAPQENSGYYVLNDTFRLTGISFEVKVVAANHDNKSTQITTLPNEPEIDSFKEIEVPGVPPAGNILVNDGVISTSANVVSPVKNDPVVETCVKVVNEDVVKIPVAAPASTPVTAEEVVNKDFVKIPESAPALPSSVEKAAPAPPASVEKAAAAPPASVEKGAPAPRTPVEKADPAPSAPVEKGAPALRAPVEKADPAPRAPVEKEVTRKTYASVVKIPREDTQPAPAARPSKPNLNIKMVQNTEKNVSSPSKPAHATVNALPGDKGVPKNKSPDEPGYSIFVKNLPFEATVEMVEQEFSKFGAIKSGGVQVKCQPDQFCFGFVEFESQQSMLAAIEASRVYFGTRESYVEEKRTKTRVVDGVITRGDDNGNGGGGRFHSGRGGGYYGDGYKRQWGGQNNGYYNGADNMRNDYSGRVRGPQGNGHPQNGHGYHQNGHGYYSGNGYQQRRPNSNGNGLRVERNNGFRQQGPASA

SEQ ID NO: 38532 - DNA, 1958 bp, Zea mays subsp. mays
  misc_feature (208)..(208): n is a, c, g, or t
  misc_feature (247)..(247): n is a, c, g, or t
aaccaacaaatcgacctagctaggcacaagagcgctagacgccgcagcgcagcacgcaccacccaccgagcggcggcggaggcagggcaatccgcaggaagcagaggccgcgcgcgcaggcatgggcgcgccggtgcacggcgccctcgacttgttcctcctgctcctggtgggggcaggggcggcgcccgaggtgacggcgccgcangaacccacattgccagccaccggctccggcgctaccggngcagcggcggtcggagtcaactccaactccgtgctggtggcgctgctggattcgcactacacggagctggcggaactggtggagaaggcgctgctcctgcagacgctggaggacgccgtcgggaagcacaacgtcaccatcttcgcgccgcggaacgaggcgctggagcgggacctggatccggagttcaagcgcttcctgctggagccgcgcaacctcaggtcgctgcaggcgctgctgctctaccacgtcctcccctcgcgcctgccctccgactcctggcccgcggcgtcccaccccacgctgtccggcgaggaggtcgagctcgcccccgccgccggcgccggcatgcgcgtcggccacgccgccgtcacgcgcccggacgccgtgctcaggcccgacggggtcatccacggcatcgagcgcctcctcgtgcccgcgctccgtgcaggaggacttcaaccgccgccgcagcctcgcggcgatctcggccgtgctgcccacgggcgcgcccgaggtggacccgcggacgcaccgcctcaagaagcccgcgccgccggttccccccggcgcgccccccgtgctccccgtctgggacgccatggcgcccggcccctccatcgcccccgcgccggcgcctggcccgggctccgggaagcaccacttcgacgggcacagccaggtcaaggacttcatccagacgctgctcctctacggcggctacaacgagctcgccgacatcctcgtcaacctcacctccctcgccaccgagatgggccgcctcgtctccgagggctacgtcctcaccgtgctcgcccccaacgacgaggccatggcgcgcctcaccacggaccagctcagcgagcccggctcgcccgagaacatcctctactaccacatgatccccgagtaccagaccgaggagtccatgtacaacgccgtgcgccgcttcggcaaggtgcgctacgacacgctgcgcctgccgcacaaggtcgtggcgcgggaggccgacggctccgtcaagttcggccagggcgagggctccgcctacctcttcgacccggacatctacaccgacgggaggatctccgtgcagggcatcgacgccgtgctgttcgcgccggacgacaccaaggccacgcagacagccgaccctaacaggaagcctcccgccatcgtcacccacaagaagaagatcaagctccggcgaggcaagttgttagaggcgacgtgccagatggccgggctcttcggtcagcgatcgcgattcgcgagctgccagtagacggagaaaggatctgttgatctccacgacaccgaaagacgaacgaacgaactgatgggctgccgcaggaggagggggagccgtccacattattgcttgtattttttttcactcttttgtttattgttgagaataataatgaatcaggtgggggatgtaaactctgtgggttgttgttggtgtgtcgtccagatggggaaaaaaatgagaaaaagaaaggcagccaaaaaaaattgtccatacatgaatgaagaagcccaggatcgttgtctttgtataggagaaggaattgaaaccttttgttttttctttttctgccattctttgcttctgttcccgttttgacaatgagaaatatcgggtaaacacacaatcattcttacttattatccattttccttcttttttatatatggtttttcgtcg

SEQ ID NO: 38533 - protein, 427 aa, Zea mays subsp. mays
  misc_feature (29)..(29): Xaa can be any naturally occurring amino acid
  misc_feature (42)..(42): Xaa can be any naturally occurring amino acid
MGAPVHGALDLFLLLLVGAGAAPEVTAPXEPTLPATGSGATXAAAVGVNSNSVLVALLDSHYTELAELVEKALLLQTLEDAVGKHNVTIFAPRNEALERDLDPEFKRFLLEPRNLRSLQALLLYHVLPSRLPSDSWPAASHPTLSGEEVELAPAAGAGMRVGHAAVTRPDAVLRPDGVIHGIERLLVPALRAGGLQPPPQPRGDLGRAAHGRARGGPADAPPQEARAAGSPRRAPRAPRLGRHGARPLHRPRAGAWPGLREAPLRRAQPGQGLHPDAAPLRRLQRARRHPRQPHLPRHRDGPPRLRGLRPHRARPQRRGHGAPHHGPAQRARLAREHPLLPHDPRVPDRGVHVQRRAPLRQGALRHAAPAAQGRGAGGRRLRQVRPGRGLRLPLRPGHLHRREDLRAGHRRRAVRAGRHQGHADSRP

SEQ ID NO: 38534 - protein, 382 aa, Zea mays subsp. mays
  misc_feature (70)..(70): Xaa can be any naturally occurring amino acid
  misc_feature (83)..(83): Xaa can be any naturally occurring amino acid
NQQIDLARHKSARRRSAARTTHRAAAEAGQSAGSRGRARRHGRAGARRPRLVPPAPGGGRGGARGDGAAXTHIASHRLRRYRXSGGRSQLQLRAGGAAGFALHGAGGTGGEGAAPADAGGRRREAQRHHLRAAERGAGAGPGSGVQALPAGAAQPQVAAGAAALPRPPLAPALRLLARGVPPHAVRRGGRARPRRRRRHARRPRRRHAPGRRAQARRGHPRHRAPPRARAPCRRTSTAAAASRRSRPCCPRARPRWTRGRTASRSPRRRFPPARPPCSPSGTPWRPAPPSPPRRRLARAPGSTTSTGTARSRTSSRRCSSTAATTSSPTSSSTSPPSPPRWAASSPRATSSPCSPPTTRPWRASPRTSSASPARPRTSSTTT

SEQ ID NO: 38535 - protein, 269 aa, Zea mays subsp. mays
MRVGHAAVTRPDAVLRPDGVIHGIERLLVPALRAGGLQPPPQPRGDLGRAAHGRARGGPADAPPQEARAAGSPRRAPRAPRLGRHGARPLHRPRAGAWPGLREAPLRRAQPGQGLHPDAAPLRRLQRARRHPRQPHLPRHRDGPPRLRGLRPHRARPQRRGHGAPHHGPAQRARLAREHPLLPHDPRVPDRGVHVQRRAPLRQGALRHAAPAAQGRGAGGRRLRQVRPGRGLRLPLRPGHLHRREDLRAGHRRRAVRAGRHQGHADSRP

SEQ ID NO: 38536 - DNA, 1806 bp, Zea mays subsp. mays
ctattccctctcaagtctcgagacccaccaccgcaccccgcgctcggcggactcttttgcttgctgcacctgccatcgtcacgcaccggtgtgtggagcaaagccagcgagcgagaagtagccacagagcggcctgtgcgtgcgtgcagatcgagagagagacgtgcagatcgagagagagagacgaacagagagagcgattcatggtaggtgcgatgcgcggcggagccatggagttggaggaccgcctggccacccttcctcgcttccgcggcgatcacgatgacgacggcaaggaaaggaggacagggacggtatggacggcaacggcgcacatcatcacggcggtgatcggctccggcgtgctgtcgctggcgtgggcgatggcgcagctggggtgggtggccgggccgttgaccctggtgctcttcgcggcgatcaccttctacacctgcggcctcctcgcagactgctaccgcgtgggcgaccccgtgacgggcaagcgcaactacacctacaccgaggccgtcaagagcaacctgggcggctggtacgtctggttctgcggcttctgccagtacgtcaacatgttcggcacaggcatcggctacaccatcacagcctccatcagtgcagcggccatcaacaagtccaactgcttccactggcacggccacgatgccgactgcagccagaacaccagcgcctacatcatcggcttcggcgtggtgcaggtcatcttcagcccagctccacaacttccacaagctgtggtggctctccatcatcgcggccatcatgtcgttctcctactccgccatcgccgtgggcctgtccctggcgcagatcgtcatgggccccacggggaagaccaccatgaccggcaccctggtcggggtggacgtggacgctgcgcagaaggtgtggatgacgttccaggcgctgggcaacgtggccttcgcgtactcgtacgccatcatcctcatcgagatccaggacacgctgcgctccccgcccgccgagaacaagaccatgcgccgcgccaccatgatgggcatctccaccaccaccggcttctacatgctgtgtggctgcctcggatacgccgcgttcggcaacgccgcgtcggggaacatcctcaccggcttcggcttctacgagcccttctggctcgtcgacttcgccaacgcctgcatcgtcgtgcacctcgtcggcggcttccaggtcttctgccaaccgctgttcgcggccgtcgagggcgccgtggcggcgcggtaccccgggtcgacgcgcgagtacggcgccgcgggcctcaacgtcttccgcctcgtgtggcgcacggcgttcgtggctgtcatcacgctgctggccatcctcatgcccttcttcaacagcatcctgggcatcctcggcagcatcgccttctggccgctcaccgtcttcttccccgtcgagatgtacatccggcagcggcaggtgcggaggttcagcaccaagtggatagcgctgcagagcctcagcttcgtctgcttcctcgtcaccgccgcctcctgcgcggcctccgtgcagggcgtggtcgactcgctcaagacctacgtgccgttcaagacgaggtcgtgagctcctgctgcttagttattatacatgtagcatacatactactcgtgcctcctttgtagtggcaccgaaacaaactgagcaaactcagccaaattagttatgcgggagtttaattttgaactactagtatgttgctgtcgaatgcaacaaaactaataacgtttacagtttttctatttggcatcg

SEQ ID NO: 38537 - protein, 558 aa, Zea mays subsp. mays
IPSQVSRPTTAPRARRTLLLAAPAIVTHRCVEQSQRARSSHRAACACVQIERETCRSRERDEQRERFMVGAMRGGAMELEDRLATLPRFRGDHDDDGKERRTGTVWTATAHIITAVIGSGVLSLAWAMAQLGWVAGPLTLVLFAAITFYTCGLLADCYRVGDPVTGKRNYTYTEAVKSNLGGWYVWFCGFCQYVNMFGTGIGYTITASISAAAINKSNCFHWHGHDADCSQNTSAYIIGFGVVQVIFSPAPQLPQAVVALHHRGHHVVLLLRHRRGPVPGADRHGPHGEDHHDRHPGRGGRGRCAEGVDDVPGAGQRGLRVLVRHHPHRDPGHAALPARREQDHAPRHHDGHLHHHRLLHAVWLPRIRRVRQRRVGEHPHRLRLLRALLARRLRQRLHRRAPRRRLPGLLPTAVRGRRGRRGGAVPRVDARVRRRGPQRLPPRVAHGVRGCHHAAGHPHALLQQHPGHPRQHRLLAAHRLLPRRDVHPAAAGAEVQHQVDSAAEPQLRLLPRHRRLLRGLRAGRGRLAQDLRAVQDEVVSSCCLVIIHVAYILLVPPL

SEQ ID NO: 38538 - protein, 491 aa, Zea mays subsp. mays
MVGAMRGGAMELEDRLATLPRFRGDHDDDGKERRTGTVWTATAHIITAVIGSGVLSLAWAMAQLGWVAGPLTLVLFAAITFYTCGLLADCYRVGDPVTGKRNYTYTEAVKSNLGGWYVWFCGFCQYVNMFGTGIGYTITASISAAAINKSNCFHWHGHDADCSQNTSAYIIGFGVVQVIFSPAPQLPQAVVALHHRGHHVVLLLRHRRGPVPGADRHGPHGEDHHDRHPGRGGRGRCAEGVDDVPGAGQRGLRVLVRHHPHRDPGHAALPARREQDHAPRHHDGHLHHHRLLHAVWLPRIRRVRQRRVGEHPHRLRLLRALLARRLRQRLHRRAPRRRLPGLLPTAVRGRRGRRGGAVPRVDARVRRRGPQRLPPRVAHGVRGCHHAAGHPHALLQQHPGHPRQHRLLAAHRLLPRRDVHPAAAGAEVQHQVDSAAEPQLRLLPRHRRLLRGLRAGRGRLAQDLRAVQDEVVSSCCLVIIHVAYILLVPPL

SEQ ID NO: 38539 - protein, 487 aa, Zea mays subsp. mays
MRGGAMELEDRLATLPRFRGDHDDDGKERRTGTVWTATAHIITAVIGSGVLSLAWAMAQLGWVAGPLTLVLFAAITFYTCGLLADCYRVGDPVTGKRNYTYTEAVKSNLGGWYVWFCGFCQYVNMFGTGIGYTITASISAAAINKSNCFHWHGHDADCSQNTSAYIIGFGVVQVIFSPAPQLPQAVVALHHRGHHVVLLLRHRRGPVPGADRHGPHGEDHHDRHPGRGGRGRCAEGVDDVPGAGQRGLRVLVRHHPHRDPGHAALPARREQDHAPRHHDGHLHHHRLLHAVWLPRIRRVRQRRVGEHPHRLRLLRALLARRLRQRLHRRAPRRRLPGLLPTAVRGRRGRRGGAVPRVDARVRRRGPQRLPPRVAHGVRGCHHAAGHPHALLQQHPGHPRQHRLLAAHRLLPRRDVHPAAAGAEVQHQVDSAAEPQLRLLPRHRRLLRGLRAGRGRLAQDLRAVQDEVVSSCCLVIIHVAYILLVPPL

SEQ ID NO: 38540 - DNA, 1635 bp, Zea mays subsp. mays
actttctttttaccacttgatagatagtcggttactcttcacggtaacacgccgcagcggcgaacaaatcttgcgccgcacgccgaaccctacataaacacaacaccggcggtggtacggtccagccaaataccaattgccaaaaactcccccctctccctttctctcgatcggaatgggggtgccggacccggagaaatggttcatcctgggccgcgtcgtcgtcgtgaggcactacaaaaaagccttggatagctctagccttgacctcaggctgccgctcaccaggacgccgccgcgcatctccaggctcgccgcggtcacgagggaccaagtcgaacgcggccagctctccatcgtcgccaccagcaacagtgtcctcctcctccacgagctcgagaggccctccgagcccaacagcccgaacatcttcttcctggcgctcgaccccatgcttgatgagcgggccttcgccgccggacgcagagtgttcgaagtcgccgccacgcgcctcctcgaccggcatccggaattgccccacttctccggcgtcaggaacgtcggcttcatcgagctctgccgtggaggcacgtgcgtgctcgtggtcgcggagctccaggccaccaatcgccaagcgaacaacagcgtccccttcatcacctgctgcttctctggcgatgggaacgacacgtgggaccagatggaactcgtctggcccgtcctcgatgacgaagcccacccgcagtggattaaccacgccgtgatcgcccacgacaagaagctctggtgggtcaacctctcgcgcggcctggtcgcctgggacccggtccctgtccaacatgcagagccgaggctggagttcgtgccgctcccggtcctcgacgggttcgaggacaggcaggagccgccggagcaaatcgacaggtaccgcaccgtaggggtgagcgccggccagatgcggtttgtggacatcgttcgcaggcgcaacgatcccctcgaagatacgctggtggtcgtctggacgctggacttgccacagatgaggtggcggggctaccccagggtgacgacgctggcgaacatctggaacaacgccagctacgtgccgatgccgaggggggtcgtccccgtggtggcgcttttgcaccccaacgagcccgacgttgtctacttcttcctgggcaagtacgtcttctccgtcgacgtgaatcgaagcgccgtcgtgcacttcgcggtgatgccgaaccagcaggacggcgtgccacggccgatcaaccagcgagacgttctctcttggaagcaagcgccctttcttgaaaacgcccagcaaggatgagtaactgaggatcctgctggaaggatcggatgaaaacacacatgatgcaggccgtcgtgacgaagtgtgaaggtcgcgcgcaaagcctttgctgttgttttgtttccgatgttggccgtgagcagacaagagcgtagacggggattcaagtcttttctgatcacaaactaccatatatgctttctactgtagtactttgtattctgtgttgttgatgggttatcaactactggatctacttgtggtctcagaccttttattgttgatggtgggcgaaagaaattttcagcccaaacatg

SEQ ID NO: 38541 - protein, 386 aa, Zea mays subsp. mays
MGVPDPEKWFILGRVVVVRHYKKALDSSSLDLRLPLTRTPPRISRLAAVTRDQVERGQLSIVATSNSVLLLHELERPSEPNSPNIFFLALDPMLDERAFAAGRRVFEVAATRLLDRHPELPHFSGVRNVGFIELCRGGTCVLVVAELQATNRQANNSVPFITCCFSGDGNDTWDQMELVWPVLDDEAHPQWINHAVIAHDKKLWWVNLSRGLVAWDPVPVQHAEPRLEFVPLPVLDGFEDRQEPPEQIDRYRTVGVSAGQMRFVDIVRRRNDPLEDTLVVVWTLDLPQMRWRGYPRVTTLANIWNNASYVPMPRGVVPVVALLHPNEPDVVYFFLGKYVFSVDVNRSAVVHFAVMPNQQDGVPRPINQRDVLSWKQAPFLENAQQG

SEQ ID NO: 38542 - protein, 294 aa, Zea mays subsp. mays
MLDERAFAAGRRVFEVAATRLLDRHPELPHFSGVRNVGFIELCRGGTCVLVVAELQATNRQANNSVPFITCCFSGDGNDTWDQMELVWPVLDDEAHPQWINHAVIAHDKKLWWVNLSRGLVAWDPVPVQHAEPRLEFVPLPVLDGFEDRQEPPEQIDRYRTVGVSAGQMRFVDIVRRRNDPLEDTLVVVWTLDLPQMRWRGYPRVTTLANIWNNASYVPMPRGVVPVVALLHPNEPDVVYFFLGKYVFSVDVNRSAVVHFAVMPNQQDGVPRPINQRDVLSWKQAPFLENAQQG

SEQ ID NO: 38543 - protein, 211 aa, Zea mays subsp. mays
MELVWPVLDDEAHPQWINHAVIAHDKKLWWVNLSRGLVAWDPVPVQHAEPRLEFVPLPVLDGFEDRQEPPEQIDRYRTVGVSAGQMRFVDIVRRRNDPLEDTLVVVWTLDLPQMRWRGYPRVTTLANIWNNASYVPMPRGVVPVVALLHPNEPDVVYFFLGKYVFSVDVNRSAVVHFAVMPNQQDGVPRPINQRDVLSWKQAPFLENAQQG

SEQ ID NO: 38544 - DNA, 668 bp, Zea mays subsp. mays
agtatccggtagggttttcctctcgcgccgccgcggaacacaacaccgcaccacactacccagcggaatccgcccacccgcacctgcacccggagcagaggagatatgtcgcaggggaagggaggagcggcgaggaaggaggaggtggtcaccagggagtacaccatcaacctccacaagcgcctccacggctgcacattcaagaagaaggcacccaacgccatcaaggagatcaggaagtttgcgcagaaggccatgggcaccacggacattaggatcgatgtgaagctcaacaagcacatctggagcagcgggatcaggagcgtgccgcggagggttcgtgtgaggatcgcccgcaagaggaacgacgaggaggatgccaaggaggagctctactcccttgtcaccgtcgcagagatccccgccgagggcttgaaagggctggggaccaaggtcgttgacgaaaccgattaagctgtcgcgttatctacatctttagagagttcctagtttgtatttgcaacagcaaaaccttttgtattcacaaagttgtctatttccgcaacagaattgcatggctagttttcttttcattgctgctggcatccttttcttcattatcgccccctgggaagtcgctgctcatgggacaagtttggaaatctcct

SEQ ID NO: 38545 - protein, 122 aa, Zea mays subsp. mays
MSQGKGGAARKEEVVTREYTINLHKRLHGCTFKKKAPNAIKEIRKFAQKAMGTTDIRIDVKLNKHIWSSGIRSVPRRVRVRIARKRNDEEDAKEELYSLVTVAEIPAEGLKGLGTKVVDETD

SEQ ID NO: 38546 - protein, 94 aa, Zea mays subsp. mays
VSGRVFLSRRRGTQHRTTLPSGIRPPAPAPGAEEICRRGREERRGRRRWSPGSTPSTSTSASTAAHSRRRHPTPSRRSGSLRRRPWAPRTLGSM

SEQ ID NO: 38547 - protein, 90 aa, Zea mays subsp. mays
YPVGFSSRAAAEHNTAPHYPAESAHPHLHPEQRRYVAGEGRSGEEGGGGHQGVHHQPPQAPPRLHIQEEGTQRHQGDQEVCAEGHGHHGH

SEQ ID NO: 38548 - DNA, 724 bp, Zea mays subsp. mays
attccacaacaccaagaagcaagaaaactagaaaaggctcctcccgaccgcaacgcccctcatctccctcgaccccgacatccccgacccgatggcgcccaaggcggagaagaagccagcggagaagaagccggcggccgaggagaaggcggagaagacgaccgcagggaaaagcccaaggccgagaagcggctgcccgcgtccaagtcctccggcaaggagggcggcgagaagaaggggaagaagaaggccaagaagagcgtggagacctacaagatctacatcttcaaggtgctgaagcaggtgcaccccgacatcggcatatcctccaaggccatgtccatcatgaactccttcatcaacgacatctttgagaagctggccggcgaggccgccaagctggcgcggtacaacaagaagcccaccatcacgtcccgcaagatccagacctccgtgcgcctagtcctccccggagagctcgccaagcacgccgtctccgagggaaccaaggccgtcaccaagttcaccagcaactgagcgcgctgcgggatccgcggatctgttagaagggttctttgctgtgtcctttccccagtcccccaccctacccgcctagtagctagcttgcctgctctataaatccggcgcgccggattgtaatggtcctcttagatttgatgtccctgttgtggaatatagttgtatctctccgcttgctattttc

SEQ ID NO: 38549 - protein, 178 aa, Zea mays subsp. mays
IPQHQEARKLEKAPPDRNAPHLPRPRHPRPDGAQGGEEASGEEAGGRGEGGEDDRREKPKAEKRLPASKSSGKEGGEKKGKKKAKKSVETYKIYIFKVLKQVHPDIGISSKAMSIMNSFINDIFEKLAGEAAKLARYNKKPTITSRKIQTSVRLVLPGELAKHAVSEGTKAVTKFTSN

SEQ ID NO: 38550 - protein, 123 aa, Zea mays subsp. mays
STTPRSKKTRKGSSRPQRPSSPSTPTSPTRWRPRRRRSQRRRSRRPRRRRRRRPQGKAQGREAAARVQVLRQGGRREEGEEEGQEERGDLQDLHLQGAEAGAPRHRHILQGHVHHELLHQRHL

SEQ ID NO: 38551 - DNA, 1869 bp, Zea mays subsp. mays
gcttaaaattcgattccacgaagcagcaatcgcaagttcgaagctctaaaataatctcttccggacgcctctggaaggtcagcatctgaacccaggtagcctccagcgctggagacgtgccgtactcaaaccctagccaccaatggcagccggcggcggggctccgtgggcggagcgcgcgcgggtggtggggacgcagatccgcaacaggttccgcgtggcgcccgtggaccaccggtcgctgtggctgcgggcggacggtcgtgtcgccactgaggcggtccggcggtggtcggatcgcgttcgggccctgctgcagaggggccggagcgcggatcggaactccacatcgacggagacatcacctgaggcggtggcaaagccttcgtccagcgttttgagattctacagaaagagagtgggcaaagaagttaatgggattgaagactctgttattttccgttcgcttcaagcattggctgttcctcttattggcaatgcatgctatgtttttatgcatggtcttaactcagttcaggtttatggtgtagagaagcttcatcaggcattacatgggagacctaaaggcaaggctcttctaacggtcagcaatcatgtggcagcgatggatgaccctttcgtaattgcctcccttctcccaccatctgttatgctggaagcacaaaagctgagatggacactgtgtgccactgatcggtgctttacaaatccagttttgtctacattcttcaggtctgttaaggtgttacctgtttctcgtggtgatggcatctaccaaaagggaatggacatggcactttcaaagcttaacagtggtggatgggttcatatattccctgaaggaagccgttcaagggatggagggaaaaccattgctcctgccaagagaggtgttggaagattggtaatggatgctgacagtcttccagttgtaataccctttgtccatactgggatgcaggatataatgcctgttggaaaacgaatccccagagcaggaaaaagggtgattgtggtcgtgggtgacccaatcaactttgatgacctgctcatcgacaactgtggtgacacccaagatatccctagagggatcttgtacgacaaagtgacacagagaattgggcagcgattgcaggaactcaaggtcgaagtcgacagactggctgcagagcaggaacctgaactccaaaaccgcaatgtgggtgatgatggataccggctgtggcagcaggtcgattgggaaggatttgggatagggagttccatgttgccatcagaaccttcagctgctgcgcaagtgccatcaagggaagccgggcctgaaccgcacctggaagtggagcaaagcgtgtctccagccccaagtgcagcaacctcatacgatgttgctgttccacactggttccagcgccatgcggacccttctgagctcatggggttcgcttcccgtggcctgatcaaggccccgtttgtttccgcttttgagcggcttctggcggccataatctgcccgggtcatccaaacgcgcagattccatgccgactgcgagacgaagcgctttaaggagaagtggatatgcagctgttggagaaaagcggtcactccatcgcgtctccaggaatcccaaccgcttctcggtcgtcagtcaccccgcagtgcagtacagtgccaccatgccgaacctgacagacggttgctttgtgccatgcgatgtatctagtgacttgttgaattagtgatgcatgattcctttgttaacaaagctaacgcttcaacttcgacttgagcattactttgattttttgttgaatcgtgcatatctgtatcaatttatttattttgggttt

SEQ ID NO: 38552 - protein, 480 aa, Zea mays subsp. mays
MAAGGGAPWAERARVVGTQIRNRFRVAPVDHRSLWLRADGRVATEAVRRWSDRVRALLQRGRSADRNSTSTETSPEAVAKPSSSVLRFYRKRVGKEVNGIEDSVIFRSLQALAVPLIGNACYVFMHGLNSVQVYGVEKLHQALHGRPKGKALLTVSNHVAAMDDPFVIASLLPPSVMLEAQKLRWTLCATDRCFTNPVLSTFFRSVKVLPVSRGDGIYQKGMDMALSKLNSGGWVHIFPEGSRSRDGGKTIAPAKRGVGRLVMDADSLPVVIPFVHTGMQDIMPVGKRIPRAGKRVIVVVGDPINFDDLLIDNCGDTQDIPRGILYDKVTQRIGQRLQELKVEVDRLAAEQEPELQNRNVGDDGYRLWQQVDWEGFGIGSSMLPSEPSAAAQVPSREAGPEPHLEVEQSVSPAPSAATSYDVAVPHWFQRHADPSELMGFASRGLIKAPFVSAFERLLAAIICPGHPNAQIPCRLRDEAL

SEQ ID NO: 38553 - protein, 356 aa, Zea mays subsp. mays
MHGLNSVQVYGVEKLHQALHGRPKGKALLTVSNHVAAMDDPFVIASLLPPSVMLEAQKLRWTLCATDRCFTNPVLSTFFRSVKVLPVSRGDGIYQKGMDMALSKLNSGGWVHIFPEGSRSRDGGKTIAPAKRGVGRLVMDADSLPVVIPFVHTGMQDIMPVGKRIPRAGKRVIVVVGDPINFDDLLIDNCGDTQDIPRGILYDKVTQRIGQRLQELKVEVDRLAAEQEPELQNRNVGDDGYRLWQQVDWEGFGIGSSMLPSEPSAAAQVPSREAGPEPHLEVEQSVSPAPSAATSYDVAVPHWFQRHADPSELMGFASRGLIKAPFVSAFERLLAAIICPGHPNAQIPCRLRDEAL

SEQ ID NO: 38554 - protein, 319 aa, Zea mays subsp. mays
MDDPFVIASLLPPSVMLEAQKLRWTLCATDRCFTNPVLSTFFRSVKVLPVSRGDGIYQKGMDMALSKLNSGGWVHIFPEGSRSRDGGKTIAPAKRGVGRLVMDADSLPVVIPFVHTGMQDIMPVGKRIPRAGKRVIVVVGDPINFDDLLIDNCGDTQDIPRGILYDKVTQRIGQRLQELKVEVDRLAAEQEPELQNRNVGDDGYRLWQQVDWEGFGIGSSMLPSEPSAAAQVPSREAGPEPHLEVEQSVSPAPSAATSYDVAVPHWFQRHADPSELMGFASRGLIKAPFVSAFERLLAAIICPGHPNAQIPCRLRDEAL

SEQ ID NO: 38555 - DNA, 1600 bp, Zea mays subsp. mays
acgggtcaccagtcaccacatccctccctcactgccatttgtttggttgttcctctcgctcgccagtcgccaccaggcagcaggcatcccaatctcgcgagagccagtagcggcggcggcgcttccggcttcccttcccattggcctccgggatggcgctccgcctccacgacgtcgcgctctgcctctccccgccgctcgccgcccgccgccgcagcggcggcagtttcgtcgccgtcgcctccatgacgtccgccgccgtctccaccagggtggagaacaagaagccatttgctcctccgagggaggtacatgtccaggttacacattcaatgccatctcacaagattgaaattttcaagtcacttgatgattgggctagagataatatcttgacacatctcaagccagtcgagaagtgttggcagccacaggatttcctccctgacccagcatctgaaggatttcatgatgaagttaaggagctcagagaacgtgccaaggagatccctgatgattattttgtttgtttggttggagacatgattactgaggaagctctaccaacataccagactatgcttaacaccctcgacggtgtcagagatgagacaggtgcaagccccactgcctgggctgtttggacgagggcatggactgctgaggagaacaggcatggtgatctgctcaacaagtatatgtacctcactgggagggtggatatgaggcagattgagaagacaattcagtatcttattggctctggaatggatcctaggactgagaataatccttatcttggtttcatctacacctccttccaagagcgggcgaccttcatctcgcatgggaacactgctcgtcatgccaaggactttggcgacttaaagctcgcacaaatctgtggcatcatcgcctcagatgagaagcgacatgaaactgcgtacaccaagatcgtggagaagttgtttgagatcgaccctgatggtacagtggttgctctggctgacatgatgaagaagaagatctcaatgcctgcccacctgatgtttgacggtcaggacgacaagctgtttgagcacttctccatggtcgcgcagaggcttggcgtttacactgctagggactacgccgacattcttgagttccttgttgacaggtggaaggtggcggacctgactggtctgtcgggtgaggggaacaaggcgcaggactacctctgcacccttgcttcaaggatccggaggctagacgagagggcccagagcagagccaagaaagcaggcacgctgcctttcagctgggtatatggtagggaagtccaactgtgaaatcggaaacccattgcgactgcttgagttggagcatagtctatcatgcaccctatgacgcatcgcgacgacaagacctggtgtgtcgcgtgacatagttgttcaggttttgaccaaatggtctgggagcatttgttttgccttgtgccgtctcatagagcgttaggatagtgtacgtctgtgttctagctttgttttgtctgctgctttgatgtacaacttgtggccatgaggctggacatggagtgaacatgttgtacattgtcgct

SEQ ID NO: 38556 - protein, 392 aa, Zea mays subsp. mays
MALRLHDVALCLSPPLAARRRSGGSFVAVASMTSAAVSTRVENKKPFAPPREVHVQVTHSMPSHKIEIFKSLDDWARDNILTHLKPVEKCWQPQDFLPDPASEGFHDEVKELRERAKEIPDDYFVCLVGDMITEEALPTYQTMLNTLDGVRDETGASPTAWAVWTRAWTAEENRHGDLLNKYMYLTGRVDMRQIEKTIQYLIGSGMDPRTENNPYLGFIYTSFQERATFISHGNTARHAKDFGDLKLAQICGIIASDEKRHETAYTKIVEKLFEIDPDGTVVALADMMKKKISMPAHLMFDGQDDKLFEHFSMVAQRLGVYTARDYADILEFLVDRWKVADLTGLSGEGNKAQDYLCTLASRIRRLDERAQSRAKKAGTLPFSWVYGREVQL

SEQ ID NO: 38557 - protein, 361 aa, Zea mays subsp. mays
MTSAAVSTRVENKKPFAPPREVHVQVTHSMPSHKIEIFKSLDDWARDNILTHLKPVEKCWQPQDFLPDPASEGFHDEVKELRERAKEIPDDYFVCLVGDMITEEALPTYQTMLNTLDGVRDETGASPTAWAVWTRAWTAEENRHGDLLNKYMYLTGRVDMRQIEKTIQYLIGSGMDPRTENNPYLGFIYTSFQERATFISHGNTARHAKDFGDLKLAQICGIIASDEKRHETAYTKIVEKLFEIDPDGTVVALADMMKKKISMPAHLMFDGQDDKLFEHFSMVAQRLGVYTARDYADILEFLVDRWKVADLTGLSGEGNKAQDYLCTLASRIRRLDERAQSRAKKAGTLPFSWVYGREVQL

SEQ ID NO: 38558 - protein, 332 aa, Zea mays subsp. mays
MPSHKIEIFKSLDDWARDNILTHLKPVEKCWQPQDFLPDPASEGFHDEVKELRERAKEIPDDYFVCLVGDMITEEALPTYQTMLNTLDGVRDETGASPTAWAVWTRAWTAEENRHGDLLNKYMYLTGRVDMRQIEKTIQYLIGSGMDPRTENNPYLGFIYTSFQERATFISHGNTARHAKDFGDLKLAQICGIIASDEKRHETAYTKIVEKLFEIDPDGTVVALADMMKKKISMPAHLMFDGQDDKLFEHFSMVAQRLGVYTARDYADILEFLVDRWKVADLTGLSGEGNKAQDYLCTLASRIRRLDERAQSRAKKAGTLPFSWVYGREVQL

SEQ ID NO: 38559 - DNA, 662 bp, Zea mays subsp. mays
agtccaaagacccaagggcacaagcagaagttgcggttgtactcttcctcctccgccgtcggctcagatctctgcgtgcgggctagcgatggcgtcgttctcggaggctccccctgggaacccgaaggcgggcgagaagatcttcaagaccaagtgcgcgcagtgccacacagtcgacaagggcgccggccacaagcaaggtccaaacttgaatggtctttttgggaggcagtcgggtaccaccgcaggctactcctattctgcgggaaacaaaaacaaggctgtggtctgggaggagaacactctgtatgactacctgcttaaccctaagaagtacattcctggaaccaagatggtcttccctgggctgaagaagccgcaggaacgtgctgatctcattgcgtacctgaaggaagcaactgcgtagtataatgacacgcctttgccatgaagagaaaattcgttttgcagtttaataataaacatttttagacaatttgggacactctggttggacagggtacacaatccacgtctcagtatttttgttcttatggtctcggtattgaatgcctaggtgagttttttttagctgtgcacaaaaaaacagttaaactcgatggtatctcaactgctggagaaatgctagtgccctatttttg

SEQ ID NO: 38560 - protein, 141 aa, Zea mays subsp. mays
VQRPKGTSRSCGCTLPPPPSAQISACGLAMASFSEAPPGNPKAGEKIFKTKCAQCHTVDKGAGHKQGPNLNGLFGRQSGTTAGYSYSAGNKNKAVVWEENTLYDYLLNPKKYIPGTKMVFPGLKKPQERADLIAYLKEATA

SEQ ID NO: 38561 - protein, 112 aa, Zea mays subsp. mays
MASFSEAPPGNPKAGEKIFKTKCAQCHTVDKGAGHKQGPNLNGLFGRQSGTTAGYSYSAGNKNKAVVWEENTLYDYLLNPKKYIPGTKMVFPGLKKPQERADLIAYLKEATA

SEQ ID NO: 38562 - protein, 103 aa, Zea mays subsp. mays
SPKTQGHKQKLRLYSSSSAVGSDLCVRASDGVVLGGSPWEPEGGREDLQDQVRAVPHSRQGRRPQARSKLEWSFWEAVGYHRRLLLFCGKQKQGCGLGGEHSV

SEQ ID NO: 38563 - DNA, 2065 bp, Zea mays subsp. mays
ctttaaatgggacgcgcacctccgcctgggtctgtctgcgcagggacgcggacgcggcggcaccggcaagcaattgtctcatctgctccactccatctccatttaacgcactctccactccttcgcggcgggggtttaggcgcacggcggcaggccaattaacgccgctgcggcgagcgccgggggggaaatgggcggcgacggcacgagggcgctggaccagacgccgacgtgggccgtggccgccgtctgcgctgtcatcgtcgcggcgtccatactcctcgagggcttcctccaccacctcggtcagttgctcaacaagaagcggaagaaggcgctgtttgacgctctggagaaggttaaatcggagctgatgactctggggttcatatcgcctctgctgaccgtgacgggaaggtacatcgcgcgcatctgcatcccggagggagccgcaaacaccatgctgccctgccgcctgtccggtcactcggtggcggaagagcccaagggccatggccgacggcacctatctgaagatccaaccaaccttttttcctgccgcaaaggcatggtgtcgcttgtttcagccgacggcatgcatcagctgcacattttcgtgttcttcttggccgtcttccatgttaccttcagtttcttcacaatgtccttgggtagagcaaagactcgtatatggaaggtgtgggaaaaggaaacttgctcccctcagtataattatttaaatgacccctcaaagttcaggcttacgcaccaaacatcttttgtgaggcaacatgcaagttgttggagcaaaagcacaatcacgctctattttgtgagcttctttaggcagttcttcagatccgtccgtaagacagactactttactttgcgacatggattcatttcagctcatttatctccggggactaggttcaattttcgaaagtacattaaaaggtccttggaggatgatttcaagacagttgttggcattagtccaccactatgggcttctgctttggctgtcatgctgttcaatgttcatggatggcacaacttattctggttctctgcaattccccttgtagttattctagcagttggaacaaagctgcaggctataattgctatgatggctattgaaattgcagagaggcatacagttatccaaggcatgccggtggtaaaactaagtgatgatcatttctggttcgggaagcctcgtttggttctccacctcattcatttcgcatcatttcagaacgcatttgaaattacatatttcttttggatctggtacgaatttggcctgaggtcctgcttccatgacaactttgagtttatcattgcaagagtctgccttggggctatcgtccagtttatgtgcagctacatcacccttccactctatgcccttgtttctcagatgggttcagaaatgaagcgaacaattttcgacgagcagacagcgaaggccctgaagaaatggcacaaggccgtggtgaagaagaaacaccacaaggattcctcacacaattcttccgagactcctagcactgacacaacaggacctgcaggggaagcgggtgagtggcagcggctgcacgaggtgccggtccggcacctccaccggtacaagaccatcgcgcacgtcggcggcgtgaggagcccgttgtcggacccggactacagcgacacggacgacaccgagccgctgtcgttgcagactaggcacctgataccgccggcgaagcagcggagcctcgacaccgagcgcgcggaggtgcgcgtgaacgtcgtagagacagcggcggcgccaagcgacgtcctccaagacagcttctcgttcccaaggctgcttcctcctcgccatgtgccggacaagtaaagtggccagcagtctgcttagtactacagactgtcctatatagagatagtagaatagtagtttcaagttataagtcgatttggctagttatacaacttttgttatttatttagataaaggctatgtctatatagcaaaagttgtaaaactagaaaaatcaaaatgatttataatttg

SEQ ID NO: 38564 - protein, 565 aa, Zea mays subsp. mays
MGGDGTRALDQTPTWAVAAVCAVIVAASILLEGFLHHLGQLLNKKRKKALFDALEKVKSELMTLGFISPLLTVTGRYIARICIPEGAANTMLPCRLSGHSVAEEPKGHGRRHLSEDPTNLFSCRKGMVSLVSADGMHQLHIFVFFLAVFHVTFSFFTMSLGRAKTRIWKVWEKETCSPQYNYLNDPSKFRLTHQTSFVRQHASCWSKSTITLYFVSFFRQFFRSVRKTDYFTLRHGFISAHLSPGTRFNFRKYIKRSLEDDFKTVVGISPPLWASALAVMLFNVHGWHNLFWFSAIPLVVILAVGTKLQAIIAMMAIEIAERHTVIQGMPVVKLSDDHFWFGKPRLVLHLIHFASFQNAFEITYFFWIWYEFGLRSCFHDNFEFIIARVCLGAIVQFMCSYITLPLYALVSQMGSEMKRTIFDEQTAKALKKWHKAVVKKKHHKDSSHNSSETPSTDTTGPAGEAGEWQRLHEVPVRHLHRYKTIAHVGGVRSPLSDPDYSDTDDTEPLSLQTRHLIPPAKQRSLDTERAEVRVNVVETAAAPSDVLQDSFSFPRLLPPRHVPDK

SEQ ID NO: 38565 - protein, 504 aa, Zea mays subsp. mays
MTLGFISPLLTVTGRYIARICIPEGAANTMLPCRLSGHSVAEEPKGHGRRHLSEDPTNLFSCRKGMVSLVSADGMHQLHIFVFFLAVFHVTFSFFTMSLGRAKTRIWKVWEKETCSPQYNYLNDPSKFRLTHQTSFVRQHASCWSKSTITLYFVSFFRQFFRSVRKTDYFTLRHGFISAHLSPGTRFNFRKYIKRSLEDDFKTVVGISPPLWASALAVMLFNVHGWHNLFWFSAIPLVVILAVGTKLQAIIAMMAIEIAERHTVIQGMPVVKLSDDHFWFGKPRLVLHLIHFASFQNAFEITYFFWIWYEFGLRSCFHDNFEFIIARVCLGAIVQFMCSYITLPLYALVSQMGSEMKRTIFDEQTAKALKKWHKAVVKKKHHKDSSHNSSETPSTDTTGPAGEAGEWQRLHEVPVRHLHRYKTIAHVGGVRSPLSDPDYSDTDDTEPLSLQTRHLIPPAKQRSLDTERAEVRVNVVETAAAPSDVLQDSFSFPRLLPPRHVPDK

SEQ ID NO: 38566 - protein, 475 aa, Zea mays subsp. mays
MLPCRLSGHSVAEEPKGHGRRHLSEDPTNLFSCRKGMVSLVSADGMHQLHIFVFFLAVFHVTFSFFTMSLGRAKTRIWKVWEKETCSPQYNYLNDPSKFRLTHQTSFVRQHASCWSKSTITLYFVSFFRQFFRSVRKTDYFTLRHGFISAHLSPGTRFNFRKYIKRSLEDDFKTVVGISPPLWASALAVMLFNVHGWHNLFWFSAIPLVVILAVGTKLQAIIAMMAIEIAERHTVIQGMPVVKLSDDHFWFGKPRLVLHLIHFASFQNAFEITYFFWIWYEFGLRSCFHDNFEFIIARVCLGAIVQFMCSYITLPLYALVSQMGSEMKRTIFDEQTAKALKKWHKAVVKKKHHKDSSHNSSETPSTDTTGPAGEAGEWQRLHEVPVRHLHRYKTIAHVGGVRSPLSDPDYSDTDDTEPLSLQTRHLIPPAKQRSLDTERAEVRVNVVETAAAPSDVLQDSFSFPRLLPPRHVPDK

SEQ ID NO: 38567 - DNA, 1394 bp, Zea mays subsp. mays
aaatttggatcattccaaacgagactgtgaaccctcccagctcaagcccacctccctgctcaagcccagccgtccactgcctggctccctcgtccggtcgttcccgtctccctcctcgcgtcgcgtccaccattgttcctgtcgacgctgcgccgcacggctcacaccgccgacagtgcctcagtcctatcgagcctccctcttcccagatcaggccctagctgggctacagccgccgccgccgctgccgcatccgtcaccttcacaccgcgtgcgcgcgcgcgctctctctctctctctgcgacgactggacgggctaccgcagtcgcccccataggcaccacgcccttcgctgatctattcgctggcgaagaacgctctcaatgtattcgcattctcacccccttcttctctctacccgctgtgcgaaaacgagttcccgaactctaacctaactatttgatgtctactaacttctaattttgttttttactgccatactggtccacccctgatacacatataacaaatccactaacgtgattcttttttttttgggtgcaaaatcattgtgggacagtagaagatcgatggagtgcgtggtgcagggaatcatcgagaaccagcatgtcgatgctcttgaggttcttctccagggactctctggtgtcccgaaagagcgttttagggtgcatgagctctgccttaaaagtgggcccaatctaggtgttgtcccatcggaggttcgtttgttgtgtgacttagctcagcccacaccatcctggaccataagacatgttggtggtgccatgagaggtgctggtgcggagcaaatctcagttctggttcgtacagttgtggagagcaaagctagcaagaacgtcttgcactacttctacaccctagggtacaagctagaccatgaactcttgaagagcggttttgcatttcgtttccaccgaggtgcccaaatcactgtcactgttacatctgctaacaagatgtcaaggctccatgcaaccgatgaagctacgtcagtcactcctgccatacagctagtggaaatcacagctcctgctgctgctgataattacaatgatgttgtttcagctgtcactgcgttctgtgaatatcttgccccgctgctgcatctgtcaaaaccaggacactcgacaggaatcgttccaacagcagccgctgctgctgcctcactcatgtcaagtggcggtggcaaaaccttgtaatgctgctaggacagccaaagtccgttctttgagatgagtgggcgtggctaatgaggtggccttcttcgtgccgagcatttgagcagtcagttttgcctgctagtgttgtccatgtctgacacatcgttgtgccaaccttgctcttggttt

SEQ ID NO: 38568 - protein, 217 aa, Zea mays subsp. mays
MECVVQGIIENQHVDALEVLLQGLSGVPKERFRVHELCLKSGPNLGVVPSEVRLLCDLAQPTPSWTIRHVGGAMRGAGAEQISVLVRTVVESKASKNVLHYFYTLGYKLDHELLKSGFAFRFHRGAQITVTVTSANKMSRLHATDEATSVTPAIQLVEITAPAAADNYNDVVSAVTAFCEYLAPLLHLSKPGHSTGIVPTAAAAAASLMSSGGGKTL

SEQ ID NO: 38569 - protein, 144 aa, Zea mays subsp. mays
MRGAGAEQISVLVRTVVESKASKNVLHYFYTLGYKLDHELLKSGFAFRFHRGAQITVTVTSANKMSRLHATDEATSVTPAIQLVEITAPAAADNYNDVVSAVTAFCEYLAPLLHLSKPGHSTGIVPTAAAAAASLMSSGGGKTL

SEQ ID NO: 38570 - protein, 111 aa, Zea mays subsp. mays
NLDHSKRDCEPSQLKPTSLLKPSRPLPGSLVRSFPSPSSRRVHHCSCRRCAARLTPPTVPQSYRASLFPDQALAGLQPPPPLPHPSPSHRVRARALSLSLRRLDGLPQSPP

SEQ ID NO: 38571 - DNA, 1637 bp, Zea mays subsp. mays
cacctttccctttcccttccacctcccctcccctccgtctctcgtccccattaatatctagccgcctctccccccgtctcttctccaaaactgtgagcgagaggcagggagtgcgctcgacggccgccgccattagtgatttagtgttgagagagggagagaatctaaagtgaccggacgctgtccttccttgctgatcggcgacacggtccatccctccctcgctcgctagggttccttttcgtccatggatcagagcttcgggaatctcggggccggagctgggagcagcagcgggggctccaactccaaggcggcggcaaccgccgtgtcctcctcgtctttcctgcagctgccgctgtcgacggcgtcccccgcgtactacggcgcgccgctcgcgctcctgcaccacgccgccgcggccccgtcgtcgtcgcagcagcaccagcagcagcagcaccaccaccactacgccaggcacggcgccgagatgtcggcagcggaggccgaggccatcaaggccaagatcgtggcgcacccgcagtactcggcgctcctcgccgcctacctcgactgccagaaagtgggcgcgccgccggacgtgctggagaggctgacggccatggcggcaaagctggacgcgcgcccgccgggccgccacgagccgcgcgacccggagctggaccagttcatggaggcgtactgtaacatgctcgtcaagtaccgggaggagctcacccggccgatcgacgaggccatggagttcctcaagcgggtggaggcgcagctcgactgcatctccggcggcggcggctcctcctcagcgcgcctctcgctcgccgatggtaaatcagaaggggttggctcttctgaagatgacatggacccgaatggtcgcgagaacgatccgccggagattgacccacgagcggaggacaaggagctcaagtaccagctgctgaagaagtacagtggctacctgagcagcctcaggcaggagttttccaagaagaagaagaaagggaagctcccaaaggaggccaggcagaaactcctccactggtgggagctgcactacaagtggccgtacccttcagagacggagaagattgcgctcgcagaatcaacgggcctagaccagaagcagatcaacaactggttcatcaaccagaggaaacggcactggaagccatcggaggacatgcctttcgtgatgatggaaggcttccacccgcagaacgccgctgctctgtacatggacgggccgttcatgcgcgacggtatgtaccgcctcggttcatgaactacacttccatggacacgactgtggggcctatccaatcgtcggacagtgggagtatattcagtgtaccaggaccaggatgcgttgcagtgcaaggacattgttgtggaatttttgttgctgattgccaaggggtgggtcggtcgatgtagcgtctatgcatggcttgtagttctcctgtaatgttgttgttaatttcgcttggcttgtaatctaggtgtatctggaacttgaatcctgggtgattaatccggcaagcagctgcctgtttgtatgattgtatggttcgggttggtggaacatgatgcatgctaaggcgtggcctgtctggatc

SEQ ID NO: 38572 - protein, 351 aa, Zea mays subsp. mays
MDQSFGNLGAGAGSSSGGSNSKAAATAVSSSSFLQLPLSTASPAYYGAPLALLHHAAAAPSSSQQHQQQQHHHHYARHGAEMSAAEAEAIKAKIVAHPQYSALLAAYLDCQKVGAPPDVLERLTAMAAKLDARPPGRHEPRDPELDQFMEAYCNMLVKYREELTRPIDEAMEFLKRVEAQLDCISGGGGSSSARLSLADGKSEGVGSSEDDMDPNGRENDPPEIDPRAEDKELKYQLLKKYSGYLSSLRQEFSKKKKKGKLPKEARQKLLHWWELHYKWPYPSETEKIALAESTGLDQKQINNWFINQRKRHWKPSEDMPFVMMEGFHPQNAAALYMDGPFMRDGMYRLGS

SEQ ID NO: 38573 - protein, 270 aa, Zea mays subsp. mays
MSAAEAEAIKAKIVAHPQYSALLAAYLDCQKVGAPPDVLERLTAMAAKLDARPPGRHEPRDPELDQFMEAYCNMLVKYREELTRPIDEAMEFLKRVEAQLDCISGGGGSSSARLSLADGKSEGVGSSEDDMDPNGRENDPPEIDPRAEDKELKYQLLKKYSGYLSSLRQEFSKKKKKGKLPKEARQKLLHWWELHYKWPYPSETEKIALAESTGLDQKQINNWFINQRKRHWKPSEDMPFVMMEGFHPQNAAALYMDGPFMRDGMYRLGS

SEQ ID NO: 38574 - protein, 226 aa, Zea mays subsp. mays
MAAKLDARPPGRHEPRDPELDQFMEAYCNMLVKYREELTRPIDEAMEFLKRVEAQLDCISGGGGSSSARLSLADGKSEGVGSSEDDMDPNGRENDPPEIDPRAEDKELKYQLLKKYSGYLSSLRQEFSKKKKKGKLPKEARQKLLHWWELHYKWPYPSETEKIALAESTGLDQKQINNWFINQRKRHWKPSEDMPFVMMEGFHPQNAAALYMDGPFMRDGMYRLGS

SEQ ID NO: 38575 - DNA, 577 bp, Zea mays subsp. mays
aaagctggactgctccatcagactcgcctcctcggctgctgtctgtttgttgtgttagggtttcgtctcgtgtataaggcgttcggagctcgcaaatcctttcctctctcgcgttcgaggctaggtagccgtcaccatgagccgctcggggcagcctccggatctcaagaagtacatggacaagaagcttcagattaagatgaatgcaaaccgtgttgttatcggcacacttcgtgggttcgaccagttcatgaatctggtggtggacaacactgtggaggtcaatggaaatgacaaaacagatattggaatggtggttatcaggggaaacagtgttgtaatgatcgaggcactggagccagttgcgaggtcacagtgaatcattgttctttagcactagcagcgtgaaaactgatgtaaaagatatcagtggaccctgttgtatttgactaatgcttttgcacagcaacataacttcggaggtggaatgtctatccctttttctatgggatgcttgtagctatacaatcatcgagctcttaaattacatgatctaacgcatgctcatcgagctctt

SEQ ID NO: 38576 - protein, 80 aa, Zea mays subsp. mays
MSRSGQPPDLKKYMDKKLQIKMNANRVVIGTLRGFDQFMNLVVDNTVEVNGNDKTDIGMVVIRGNSVVMIEALEPVARSQ

SEQ ID NO: 38577 - protein, 67 aa, Zea mays subsp. mays
MDKKLQIKMNANRVVIGTLRGFDQFMNLVVDNTVEVNGNDKTDIGMVVIRGNSVVMIEALEPVARSQ

SEQ ID NO: 38578 - protein, 65 aa, Zea mays subsp. mays
KAGLLHQTRLLGCCLFVVLGFRLVYKAFGARKSFPLSRSRLGSRHHEPLGAASGSQEVHGQEASD

SEQ ID NO: 38579 - DNA, 1493 bp, Zea mays subsp. mays
gaagaaaaacacaccccggatggtcgggcacgtaagccccgtctcgtcctccagatatcggccgccaccttcacctccaccgccccggcgcacgtgcgcgtctccatcgtcgccgcctctcctccttcggacacgactgaccttccactggcgccgacgaagaagacacataggaagaagctcaccgccaaacctcatccagatccagtcgctaccctccgaaagccgcatacggaacgtctcgtctcttcctttggatccggcagccggtgctcctcctccggatccggtggtcaactccatcacccccagctccacctcccttagtccccctccatccgccctcacccaccgcttctatatcgccacctctctcgttgtagaagacactgaggatctgggaagtgaagccgttccgccgtgaagcagcgccaccccttgccatccgcccgaccgctgggaagcagggcccacgtctccaagcttcctacaggaagagcctgcgcccctcccaaaggacaaagatattaggatggatgaagtcacacaagctgttgaaaatctgaagaaagaatggagccaagctgtttcacagcttgaggagagcattgctgcaattgaatcatgtggaaaaacagggaaaggaacagaggaagcaacttctcttccaaggttgaatggttctgcacaggatgctctgcagttgctcaagtccctgcagttccggcttgatcttctagctcagcagctacctacttttgatgaagtgcagtctgggcaagcaaccttagggtcgtgggatgaacaatacaagaagttgcgtgctagcctgaggaatgctaacttacaagcgaaagagaacattagaaaagctgctcaggaggagagggagcttcttctagggggtggagaagagtcaacaatccgtaggcgtaatctccagacaaaggttgggatgacatctgctgctgaaagtatcaccgagagcctccgacggtctcgccagatgatggttcaggaagtggaaaggagtgcaagtaccttggcaacatttgatgaatcaacaagtgttctccggaaggctgaaggtgaatatcaaggacaccgctctttgctaatgcgtacccgtggtttgctctccacgatgcaacagcaagatgttcttgataggatcatcctgaccatcggctttatcattttctccttggcggttctttatgttgtctcaagacgtattggtctattgacgctgcaaaggaaactggccgatgccatcagatccggttcattatcagccgatgacatcgtagcgaatgcccaacgtggacctgccccagcaaatgttcctgctcccatctacgatgaactgtgattcgtttgtcctctgtattgttaaggttagttttgcatgtggctattgggattttgtccagtgtgtggtggtcatgtaccgatctgcgattcattaaaataatttcaaatgaaaaatagtt

SEQ ID NO: 38580 - protein, 279 aa, Zea mays subsp. mays
MDEVTQAVENLKKEWSQAVSQLEESIAAIESCGKTGKGTEEATSLPRLNGSAQDALQLLKSLQFRLDLLAQQLPTFDEVQSGQATLGSWDEQYKKLRASLRNANLQAKENIRKAAQEERELLLGGGEESTIRRRNLQTKVGMTSAAESITESLRRSRQMMVQEVERSASTLATFDESTSVLRKAEGEYQGHRSLLMRTRGLLSTMQQQDVLDRIILTIGFIIFSLAVLYVVSRRIGLLTLQRKLADAIRSGSLSADDIVANAQRGPAPANVPAPIYDEL

SEQ ID NO: 38581 - protein, 140 aa, Zea mays subsp. mays
KKNTPRMVGHVSPVSSSRYRPPPSPPPPRRTCASPSSPPLLLRTRLTFHWRRRRRHIGRSSPPNLIQIQSLPSESRIRNVSSLPLDPAAGAPPPDPVVNSITPSSTSLSPPPSALTHRFYIATSLVVEDTEDLGSEAVPP

SEQ ID NO: 38582 - DNA, 1837 bp, Zea mays subsp. mays
aaaaaatcgatcagtcgcgtgtctaggtttcctctctcaccatagcgcccgctctgtcgcccttcgttcacctctccttcctctcgtccctgcctgccagggagaggggaagtcagaggcacggagtggcgcagagcagacgcacgtgaaccattgtagctgtccctgtcgtcgtcgtcgtcgtcaacgaatccacacaaggaaaggatggagaagaagccgaccatcctcatgaacaggtacgagctcgggcgcacgctcgggcagggcaccttcgccaaggtgtaccacggccggaacctcgcgtccggcgaaagcgtggccatcaaggtcatcgacaaggagaaggtgatgcgcgtcggcatgatcgaccagatcaagcgcgagatctccgtcatgcgcctcgtccgccaccccaacgtcgtgcagctgcacgaggtgatggccagcaagagcaagatatacttcgccatggagtacgtccggggcggcgagctcttcgcccgcgtcgcccgcggccggctcaaggaggacgccgcgagaaggtacttccaccagctcgtcggcgccgtcgacttctgccacagccgcggcgtctaccaccgcgacctcaagcccgagaacctcctcgtcgacgagcacggcaacctcaaggtctccgacttcggcctcagcgcgctcagggagtgccagaagcaggacggcctgctgcacaccacctgcggcacccccgcgtacgtcgcgccggagatcatcaacaagaagggctacgacggggccaaggccgacatctggtcctgcggcgtcatcctcttcgtgctcctcgccggctacctcccgttccacgacgccaacctggtggagatgtaccgcaagatcagcagagccgacgtcaagtacccgcagtggttctcccctgagctccggcggttgatgcccaagctcctcgaaccgaacccaaacaacaggatcacgatcgagaagctggtcgagcacccctggttcaagaaggggtacaggccggccgtcatgctggcacagccgcacggctccagcagcctcaaggatgtccaggtcgccttcagcaacgccgaccacaaggacagcagcaccaaggtggaacagccggcggacagctccttgaagccggcgagcctgaacgcgttcgacatcatctcccactccagagggttcgacctgtcaagcctgttcgaggtggaccaagagcagaaggccagcaactcgcggttcatgacccagaaaccggcgtcggcgatagtgtcaaagctggagcagatcgctgagacagagcgcttcatggtgaagaaacaggacgggctggtgaagctgcaggggtccaagcaagggaggaaggggcagctcgcgatcgacgccgagatcttcgaggtgacaccggcctttcacgtcgtcgaggtgaagaagtcggcaggcgacacgctggagtatgagatgttctgcagcaagggcctaagaccttcactcagcgacatctgctggagcagccgatctgaggagaacatggctccttcagtggttcagccatcacaattggagccatcctcttagaccgtctccgacagtttactcacccctcttagtcgattgttatttaagtgcagtctcttcggagatgcaattacagtccatcctctctttcttttcccctttctcaaagagctaggaccttgctcgactgagcatcaggctgtagggctctttgtgatcatcttttgccagttttcttcttgtagcagaagttgttgggcatggaactcctgttcctttcaccaatagaagcataatgatcagcactgtg

SEQ ID NO: 38583 - protein, 459 aa, Zea mays subsp. mays
MEKKPTILMNRYELGRTLGQGTFAKVYHGRNLASGESVAIKVIDKEKVMRVGMIDQIKREISVMRLVRHPNVVQLHEVMASKSKIYFAMEYVRGGELFARVARGRLKEDAARRYFHQLVGAVDFCHSRGVYHRDLKPENLLVDEHGNLKVSDFGLSALRECQKQDGLLHTTCGTPAYVAPEIINKKGYDGAKADIWSCGVILFVLLAGYLPFHDANLVEMYRKISRADVKYPQWFSPELRRLMPKLLEPNPNNRITIEKLVEHPWFKKGYRPAVMLAQPHGSSSLKDVQVAFSNADHKDSSTKVEQPADSSLKPASLNAFDIISHSRGFDLSSLFEVDQEQKASNSRFMTQKPASAIVSKLEQIAETERFMVKKQDGLVKLQGSKQGRKGQLAIDAEIFEVTPAFHVVEVKKSAGDTLEYEMFCSKGLRPSLSDICWSSRSEENMAPSVVQPSQLEPSS

SEQ ID NO: 38584 - protein, 451 aa, Zea mays subsp. mays
MNRYELGRTLGQGTFAKVYHGRNLASGESVAIKVIDKEKVMRVGMIDQIKREISVMRLVRHPNVVQLHEVMASKSKIYFAMEYVRGGELFARVARGRLKEDAARRYFHQLVGAVDFCHSRGVYHRDLKPENLLVDEHGNLKVSDFGLSALRECQKQDGLLHTTCGTPAYVAPEIINKKGYDGAKADIWSCGVILFVLLAGYLPFHDANLVEMYRKISRADVKYPQWFSPELRRLMPKLLEPNPNNRITIEKLVEHPWFKKGYRPAVMLAQPHGSSSLKDVQVAFSNADHKDSSTKVEQPADSSLKPASLNAFDIISHSRGFDLSSLFEVDQEQKASNSRFMTQKPASAIVSKLEQIAETERFMVKKQDGLVKLQGSKQGRKGQLAIDAEIFEVTPAFHVVEVKKSAGDTLEYEMFCSKGLRPSLSDICWSSRSEENMAPSVVQPSQLEPSS

SEQ ID NO: 38585 - protein, 411 aa, Zea mays subsp. mays
MRVGMIDQIKREISVMRLVRHPNVVQLHEVMASKSKIYFAMEYVRGGELFARVARGRLKEDAARRYFHQLVGAVDFCHSRGVYHRDLKPENLLVDEHGNLKVSDFGLSALRECQKQDGLLHTTCGTPAYVAPEIINKKGYDGAKADIWSCGVILFVLLAGYLPFHDANLVEMYRKISRADVKYPQWFSPELRRLMPKLLEPNPNNRITIEKLVEHPWFKKGYRPAVMLAQPHGSSSLKDVQVAFSNADHKDSSTKVEQPADSSLKPASLNAFDIISHSRGFDLSSLFEVDQEQKASNSRFMTQKPASAIVSKLEQIAETERFMVKKQDGLVKLQGSKQGRKGQLAIDAEIFEVTPAFHVVEVKKSAGDTLEYEMFCSKGLRPSLSDICWSSRSEENMAPSVVQPSQLEPSS

SEQ ID NO: 38586 - DNA, 897 bp, Zea mays subsp. mays
acctcctagattaataggtaatccatcaaccatattattgagaccaacaagcaacatagaaagtggaatccagtagcaacaactagaggaacaatggcgaccaagatattttccctccttatgctccttgctctttctacatgtgttgacgcgacaattttccctcaatgctcacaagctcctttagcttcccttcttcccccataccttccatcaatgatagcttcagtatgtgaaaacccagctcttcagccctataggctccaacaagcaatcgcagcaagcaacatacctttatcacccttgtttcaacaatcgccagccctatctttggtgcagtcattggtacaaaccatcagggcacagcagctacagcaactcgtgctacctttgatcaaccaagtagctctggcaaacctttctccctactctcaacaacaacaatttcttccattcaaccaactgtctacactgaaccttgctgcttatttgcagcaacaactattaccattcagccagctagctactgcctactctcagcaacaacaacttcttccatttaaccaattggccgcactgaaccccgctgcttatttgcagcagcaaatactactaccatttagccagctagctgcagcaagccgtgcttccttcttgacacagcaacagttgctgcctttctaccagcagtttgcggctaaccccgcaaccctcttacaactacaacaattgttgccctttgtccaacttgctttgacacacccagcagcctcctaccaacaacacatcattggtggtgccctcttttagattgcttattagttgtaattcaataataaaggtttttggatgatgtatgtggccaaccagaaataagaagttacatttgcagattct

SEQ ID NO: 38587 - protein, 238 aa, Zea mays subsp. mays
MATKIFSLLMLLALSTCVDATIFPQCSQAPLASLLPPYLPSMIASVCENPALQPYRLQQAIAASNIPLSPLFQQSPALSLVQSLVQTIRAQQLQQLVLPLINQVALANLSPYSQQQQFLPFNQLSTLNLAAYLQQQLLPFSQLATAYSQQQQLLPFNQLAALNPAAYLQQQILLPFSQLAAASRASFLTQQQLLPFYQQFAANPATLLQLQQLLPFVQLALTHPAASYQQHIIGGALF

SEQ ID NO: 38588 - protein, 229 aa, Zea mays subsp. mays
MLLALSTCVDATIFPQCSQAPLASLLPPYLPSMIASVCENPALQPYRLQQAIAASNIPLSPLFQQSPALSLVQSLVQTIRAQQLQQLVLPLINQVALANLSPYSQQQQFLPFNQLSTLNLAAYLQQQLLPFSQLATAYSQQQQLLPFNQLAALNPAAYLQQQILLPFSQLAAASRASFLTQQQLLPFYQQFAANPATLLQLQQLLPFVQLALTHPAASYQQHIIGGALF

SEQ ID NO: 38589 - protein, 197 aa, Zea mays subsp. mays
MIASVCENPALQPYRLQQAIAASNIPLSPLFQQSPALSLVQSLVQTIRAQQLQQLVLPLINQVALANLSPYSQQQQFLPFNQLSTLNLAAYLQQQLLPFSQLATAYSQQQQLLPFNQLAALNPAAYLQQQILLPFSQLAAASRASFLTQQQLLPFYQQFAANPATLLQLQQLLPFVQLALTHPAASYQQHIIGGALF

SEQ ID NO: 38590 - DNA, 1747 bp, Zea mays subsp. mays
ggattgggctttcccctccgcctccctcccctcacaaaaaggcggcagcacagcgccacccctcctgtcccgccgagttcggagcgcagcgcaaggcggggggaggagcaagaagccgccggcctccctcctccggctcaccaccaggcttactccgcaccgcgctgccacgggtaggagcggcgtcaaattcgggattcccaagcggcttcagcccggaggttgagccaaagctattttctaagaaaaatggcggcaatgatggtggcgatgactgcgaggagcaagaacagcatattaaccgtggagaagaagcagggctggtctattcagctaccagagctccggttcccttgggattcacatgaagacaagggtttctctctaagtctgcaaggctctggaccttctcatggcggcctgtttgctagtgtgggtcttaaagtgtcgacaggtgcgccagcagtggcgcccggaccggggtgacaaggatattaagattccattcactgatcattgtatgaagtacgtgtccgaggcagttgggtaccaggttattagcactgaagctgagccagtggaggaggtggtggatgctaaggcaaagaaggcagccaagaaacgtgggctgcagctgaaaattaagattgggaacccacatttgaggaggctggttagtggagctattgcaggtgctgtttccaggacttgtgtggcaccactggagacgatcaggactcacttgatggttgggagcaacggtgactccatgacagaggtgttccagtcaatcatgaacactgaggggtggactgggcttttccgtgggaattttgtcaatgttatccgagttgcgccaagcaaagcaattgagctttttgcttttgatactgccaagaaattcttgactccaaaggctgatgagtctccaaagaccttcctacctccatcacttattgctggagcacttgcaggagtcagctcaaccctgtgcacatatcctttggagttgattaagaccagattgacgatagagaaagatgtctataacaacttcctccatgctttcgtcaagattttacgagaagaaggtccatcagagctctaccgtggtctgacaccaagtctgataggagtggtgccatatgccgcgactaattactacgcctatgacaccctaaagaagctctataggaagacgttcaagcaggaggagatcagcaacatcgcaactctcctaattggttcagccgctggcgccatctccagcactgccacattccctctcgaggtggcccgcaagcaaatgcaggtaggagcagtaggagggaggcaggtctacaagaatgtgttccatgcgctctactgcataatggagaaggaaggggttggcggcctgtacaaggggctcggaccgagctgcatcaagttgatgcctgcagcaggcatctcgttcatgtgctacgaggcctgtaagaagatcctggtcgaagacaatgaggatagtgagtgaagctgaagcatgtatgcccctgaggaggggtatgactgatgtgccaggctagaagaggtttgggttgggttgggttggggagtataccctagtattatcaactgatgaaaatgtagatccaagatatttgaacgccctttagatcataatttggttcagttttgtgctgaaatccataaacaatacactcacttgatggtgcatgttgcaaaggggcaattttgtcatgtggcc

SEQ ID NO: 38591 - protein, 366 aa, Zea mays subsp. mays
MAACLLVWVLKCRQVRQQWRPDRGDKDIKIPFTDHCMKYVSEAVGYQVISTEAEPVEEVVDAKAKKAAKKRGLQLKIKIGNPHLRRLVSGAIAGAVSRTCVAPLETIRTHLMVGSNGDSMTEVFQSIMNTEGWTGLFRGNFVNVIRVAPSKAIELFAFDTAKKFLTPKADESPKTFLPPSLIAGALAGVSSTLCTYPLELIKTRLTIEKDVYNNFLHAFVKILREEGPSELYRGLTPSLIGVVPYAATNYYAYDTLKKLYRKTFKQEEISNIATLLIGSAAGAISSTATFPLEVARKQMQVGAVGGRQVYKNVFHALYCIMEKEGVGGLYKGLGPSCIKLMPAAGISFMCYEACKKILVEDNEDSE

SEQ ID NO: 38592 - protein, 330 aa, Zea mays subsp. mays
MKYVSEAVGYQVISTEAEPVEEVVDAKAKKAAKKRGLQLKIKIGNPHLRRLVSGAIAGAVSRTCVAPLETIRTHLMVGSNGDSMTEVFQSIMNTEGWTGLFRGNFVNVIRVAPSKAIELFAFDTAKKFLTPKADESPKTFLPPSLIAGALAGVSSTLCTYPLELIKTRLTIEKDVYNNFLHAFVKILREEGPSELYRGLTPSLIGVVPYAATNYYAYDTLKKLYRKTFKQEEISNIATLLIGSAAGAISSTATFPLEVARKQMQVGAVGGRQVYKNVFHALYCIMEKEGVGGLYKGLGPSCIKLMPAAGISFMCYEACKKILVEDNEDSE

SEQ ID NO: 38593 - protein, 255 aa, Zea mays subsp. mays
MVGSNGDSMTEVFQSIMNTEGWTGLFRGNFVNVIRVAPSKAIELFAFDTAKKFLTPKADESPKTFLPPSLIAGALAGVSSTLCTYPLELIKTRLTIEKDVYNNFLHAFVKILREEGPSELYRGLTPSLIGVVPYAATNYYAYDTLKKLYRKTFKQEEISNIATLLIGSAAGAISSTATFPLEVARKQMQVGAVGGRQVYKNVFHALYCIMEKEGVGGLYKGLGPSCIKLMPAAGISFMCYEACKKILVEDNEDSE

SEQ ID NO: 38594 - DNA, 1703 bp, Zea mays subsp. mays
cccttggccccttctccctttctctctctcctcctctcccccctgtcttcccccattccccactcccccacctctccagctccgtcgctagggctccatttcccctgcacctccgccgccgccgccgcttcaacatcagaagcaccggattcggtggtgtttctcggctgcctcagcttccgccgccgggaggcccctggcggcgttcgccgccgccctccggcctttgctgagtcctctagacttgacaaggctgctgctgagtatatggtatctgcgggccattgtgctgtccatgcgagcggagagcatgcgtggcagctgtgcttcgggtgatgcccctgaccagagtagctgccgatgcattcggtgtgttgacgatcggactgttggcgctgcttgccgctctgggcctcttctgcatcttccaatcggtctacttcaggtgtcagatccggagaggaccctccttcctcccgctcggctactttaacggcccatgggtgacccgcgtcgcctctggttctgatcaccatctggtggggagtaggcgaggtagcgagactgagcttcttgaagcaaaagctgttctccagcttgacatggcagaggaacatatgcgatgcgtacatactttccaacctagggttcgcggagccggggatcttcttcgcattcgctttcctgctccatggctcgttgcagaagaaggagctgggcactttaaaccagagatggaactggaagagcatggcctacacgctggttttctgcgttccagtgttctccgtgcaggcagtcctggtgttcgtcgtcgggcccaggcttgttagagactcgaaccatgatctcgggaggaggaagatcgcgaaatacttcgtacggacgcacacgccggttggagacaccagcgtctgcacctacccgttgttgggcaccatctttctcgggctcgtggatgccttcctgatgagctacgtgtcgtacgtcggatcacgggcgctgtccttggtcatcaacaagtcgctgcgaaggagggtgtacctgctgatgctgtcggtgctctgcttcctcccgaccagggtgcttctcctcggcttctcggtgctgcccaggccaggagacgctgccttcgagggcatcgtgttcctgtcgttcttgacgatgctgtcctgcacggccgtcgggatactcttgctggtctactaccctgtggccgattcgctggccctcagagacatgggccagagggacacggcggcagagatggtgccatacgatgactactactgctacgaaggcgcgtcgctcgtggccaaccggagtttccgagaactcgagcgcaactccgacacctcgacgaagccgggatccatatcgttccgcactatgatcagggaagaccagcttcagcaggacggcaccgccgacgagatcggcttctcttctcgcagcggtgcccatatcggatcaccatcacccgcaggctcttcgccgagcgcggcaatgccgatgctccctgtcaaggagatccctagatactaaggagtattcagctgtgctgtgcgttttgcccctctgtgctatgtcctctccttcaccctctttttttcccccttctcttcctcttactaccttgatgataacagttttgtggcaatcaaaaggtttttttttgtaaagttttcgaagtagcttaactc

SEQ ID NO: 38595 - protein, 264 aa, Zea mays subsp. mays
MAYTLVFCVPVFSVQAVLVFVVGPRLVRDSNHDLGRRKIAKYFVRTHTPVGDTSVCTYPLLGTIFLGLVDAFLMSYVSYVGSRALSLVINKSLRRRVYLLMLSVLCFLPTRVLLLGFSVLPRPGDAAFEGIVFLSFLTMLSCTAVGILLLVYYPVADSLALRDMGQRDTAAEMVPYDDYYCYEGASLVANRSFRELERNSDTSTKPGSISFRTMIREDQLQQDGTADEIGFSSRSGAHIGSPSPAGSSPSAAMPMLPVKEIPRY

SEQ ID NO: 38596 - protein, 191 aa, Zea mays subsp. mays
MSYVSYVGSRALSLVINKSLRRRVYLLMLSVLCFLPTRVLLLGFSVLPRPGDAAFEGIVFLSFLTMLSCTAVGILLLVYYPVADSLALRDMGQRDTAAEMVPYDDYYCYEGASLVANRSFRELERNSDTSTKPGSISFRTMIREDQLQQDGTADEIGFSSRSGAHIGSPSPAGSSPSAAMPMLPVKEIPRY

SEQ ID NO: 38597 - protein, 165 aa, Zea mays subsp. mays
MPLTRVAADAFGVLTIGLLALLAALGLFCIFQSVYFRCQIRRGPSFLPLGYFNGPWVTRVASGSDHHLVGSRRGSETELLEAKAVLQLDMAEEHMRCVHTFQPRVRGAGDLLRIRFPAPWLVAEEGAGHFKPEMELEEHGLHAGFLRSSVLRAGSPGVRRRAQAC

SEQ ID NO: 38598 - DNA, 1573 bp, Zea mays subsp. mays
aaaaagtcgttcgggattcaaacccttcgatcccaaatctgccctgcacgcctcgccgccggccacacccccggcggtcgtcgccctacccgctcgacccttctccttacctctaaccccgccggagcccaacacctccccaccatgccgcgaaacttccgcaagcggggcatcgagcaggacactgacgaccgctccgacgacgaggacactcgccgcatcgccctcgagggagatcaagtacatgcagaagctccgggagaggaagctgggtatccccgccgacctcgccgccgcatccactaacgggtcctccgcccgtggtctattgggcaccggggcagcggtcgccggtgaggccgagaaggaggacctcgtcctccaggacaccttcgctcaggagaccgccgtcactatcgaggaccccaacatgttgaggtacgtggagaccgagctggcgaagaagaggggtaagatggttgatgtgggacacaaggaagagatggaccatgtggacgagctctataccgtgccagaccacctcaaggtaaagaagaagaactcagaggagagctcgacacaatggacaactggcattgctgaagttcagctgcctattgagtacaaattaagaaacatcgaagaaaccgaggcggctaaaaagttgctgcaagagaaaaggcttgcaagaaaaccaaaaccagatgcaaacattccatcaagttatagtgctgattatttccaccgtggcaaagaatatgatgaaaaactgcgaagagagaatcctgggttgtacaaagataatgattctcggccaagtggaaatccaggaggcaaagcaacagatactaaaaatccagatggtgttggtgcaggacggagagaagctgcgagtgatgaactcatgcttcagcgtttccgcaaacgagaaaaattccgcgcccttcgaagataagccagagctgacaggttgctagattgtgccagttgcctttgaagctcaaaaatatagttgtggctgcataaagtcccaacatatcatgtccttttagtgagaaacttactgtaaattcatccttggttattgagtctgcttctgcagctgctaagggcaaggagcagattaaccttattacagaggcgatttggggcaatatatttgagctgagggatatctgaattttgtgtcagctctgaggctcatatattaagaggggccgcagtggttcaggacataggagctcataactttccagatgctcagatcgtgccatgttcatctgcaatggaagaaaggaaggtgtgttctccgtacaaatataaatgaactgcttcgacatcttgagcaaactccaaggggtagtgcgaatgtctgatctcattttctttggagtgaatggcaaagcctgcaaattcatctttctagtctagaatgtattgtttctctgaattatttgcagtttgctgcagtagcatcagttatctagatttctagggacgagcaatctgtgagttgtttttgttgcactattgctgcttgctttgcctttactagttcaagtatcaattcttt

SEQ ID NO: 38599 - protein, 317 aa, Zea mays subsp. mays
KSRSGFKPFDPKSALHASPPATPPAVVALPARPFSLPLTPPEPNTSPPCRETSASGASSRTLTTAPTTRTLAASPSREIKYMQKLRERKLGIPADLAAASTNGSSARGLLGTGAAVAGEAEKEDLVLQDTFAQETAVTIEDPNMLRYVETELAKKRGKMVDVGHKEEMDHVDELYTVPDHLKVKKKNSEESSTQWTTGIAEVQLPIEYKLRNIEETEAAKKLLQEKRLARKPKPDANIPSSYSADYFHRGKEYDEKLRRENPGLYKDNDSRPSGNPGGKATDTKNPDGVGAGRREAASDELMLQRFRKREKFRALRR

SEQ ID NO: 38600 - protein, 236 aa, Zea mays subsp. mays
MQKLRERKLGIPADLAAASTNGSSARGLLGTGAAVAGEAEKEDLVLQDTFAQETAVTIEDPNMLRYVETELAKKRGKMVDVGHKEEMDHVDELYTVPDHLKVKKKNSEESSTQWTTGIAEVQLPIEYKLRNIEETEAAKKLLQEKRLARKPKPDANIPSSYSADYFHRGKEYDEKLRRENPGLYKDNDSRPSGNPGGKATDTKNPDGVGAGRREAASDELMLQRFRKREKFRALRR

SEQ ID NO: 38601 - protein, 174 aa, Zea mays subsp. mays
MLRYVETELAKKRGKMVDVGHKEEMDHVDELYTVPDHLKVKKKNSEESSTQWTTGIAEVQLPIEYKLRNIEETEAAKKLLQEKRLARKPKPDANIPSSYSADYFHRGKEYDEKLRRENPGLYKDNDSRPSGNPGGKATDTKNPDGVGAGRREAASDELMLQRFRKREKFRALRR

SEQ ID NO: 38602 - DNA, 980 bp, Zea mays subsp. mays
  misc_feature (769)..(769): n is a, c, g, or t
  misc_feature (910)..(910): n is a, c, g, or t
  misc_feature (966)..(966): n is a, c, g, or t
ctctccgtcgcatttcccgtccggtctttccgttacccggcggcttaaaccctagttcccattccatcttcgtttccgctccgccgccgtcgatggagttctggggtctcgaggtcaaacctggatccactgtcaagtgtgagcctggacatggctttatcctgcacgtttcccaggctgcccttggggaatcaaagaaaagtgacagtgccttaatgtatgtcaaagttgatgacaagaagcttgccattggaacgctctctatcgacaaatacccacagatacaattcgatttggttttcaataaagagtttgagctgtcacacacatcgaaaactaccagtgtatttttctctggttacaaggttgagcagccaattgagggagatgaaatggatcttgattctgaggatgaagaggaggagctaaacattccagtaatcaaggaaaatggcaaaggtgatgggaaggaggagcagaaaaatcaagagaaggcagtagctgctacagcttcaaaatcaagtcttggccttgaaaagaaaagcaaggatgactctgatgattctgatgaggatgagtctgatgattctgatgaggatgattctgatgattctgatgagggcgagggattatctcctgacgaaggcgatgatgattcaagtgatgaggatgataccagtgatgatgacgaggaagaaaccccaactcctaaaaagccagaggcaggcaagaagagaggtgctgaaaatgctctgaaaacgcctctttntgataagaaagcaaaggttgccacaccgccagcccagaaaacaggtggcaagaagggtgccacccatgtggcaactccacacccagcaaaaggcaagacccctgcaaacaatgacaaatcaacggagaagtctccaaaatntggtgggtcagtcccttgcaaatcatgcaacaagacattcaatagtgagatggctntgcaggctcagctc

SEQ ID NO: 38603 - protein, 326 aa, Zea mays subsp. mays
  misc_feature (256)..(256): Xaa can be any naturally occurring amino acid
  misc_feature (303)..(303): Xaa can be any naturally occurring amino acid
  misc_feature (322)..(322): Xaa can be any naturally occurring amino acid
LRRISRPVFPLPGGLNPSSHSIFVSAPPPSMEFWGLEVKPGSTVKCEPGHGFILHVSQAALGESKKSDSALMYVKVDDKKLAIGTLSIDKYPQIQFDLVFNKEFELSHTSKTTSVFFSGYKVEQPIEGDEMDLDSEDEEEELNIPVIKENGKGDGKEEQKNQEKAVAATASKSSLGLEKKSKDDSDDSDEDESDDSDEDDSDDSDEGEGLSPDEGDDDSSDEDDTSDDDEEETPTPKKPEAGKKRGAENALKTPLXDKKAKVATPPAQKTGGKKGATHVATPHPAKGKTPANNDKSTEKSPKXGGSVPCKSCNKTFNSEMAXQAQL

SEQ ID NO: 38604 - protein, 296 aa, Zea mays subsp. mays
  misc_feature (226)..(226): Xaa can be any naturally occurring amino acid
  misc_feature (273)..(273): Xaa can be any naturally occurring amino acid
  misc_feature (292)..(292): Xaa can be any naturally occurring amino acid
MEFWGLEVKPGSTVKCEPGHGFILHVSQAALGESKKSDSALMYVKVDDKKLAIGTLSIDKYPQIQFDLVFNKEFELSHTSKTTSVFFSGYKVEQPIEGDEMDLDSEDEEEELNIPVIKENGKGDGKEEQKNQEKAVAATASKSSLGLEKKSKDDSDDSDEDESDDSDEDDSDDSDEGEGLSPDEGDDDSSDEDDTSDDDEEETPTPKKPEAGKKRGAENALKTPLXDKKAKVATPPAQKTGGKKGATHVATPHPAKGKTPANNDKSTEKSPKXGGSVPCKSCNKTFNSEMAXQAQL

SEQ ID NO: 38605 - protein, 255 aa, Zea mays subsp. mays
  misc_feature (185)..(185): Xaa can be any naturally occurring amino acid
  misc_feature (232)..(232): Xaa can be any naturally occurring amino acid
  misc_feature (251)..(251): Xaa can be any naturally occurring amino acid
MYVKVDDKKLAIGTLSIDKYPQIQFDLVFNKEFELSHTSKTTSVFFSGYKVEQPIEGDEMDLDSEDEEEELNIPVIKENGKGDGKEEQKNQEKAVAATASKSSLGLEKKSKDDSDDSDEDESDDSDEDDSDDSDEGEGLSPDEGDDDSSDEDDTSDDDEEETPTPKKPEAGKKRGAENALKTPLXDKKAKVATPPAQKTGGKKGATHVATPHPAKGKTPANNDKSTEKSPKXGGSVPCKSCNKTFNSEMAXQAQL

SEQ ID NO: 38606 - DNA, 640 bp, Zea mays subsp. mays
ggtcttctttgggcccgtcgccggcgacgagcacccaccaggggcgtccgagtctggaatcctatctgatcggaaaatggttaaggtcgaagatcaggccgaggacggcggcgcagatgctgatgccaggggtctcagggagtctgctctggatccgctgcctgtctcggtgcatgccagcttgaaggaggaggaaggtcaaccaagttcttcatctggtaaactaagatcacagtttattggaatggggttttcatccaagctggtagacaaggttctccagagacatggtgatgatgattctaacacaattttggaatctcttctgtcctattctgaccttcagcagtctggatcagagtcatcagattctttcggaagtttttttgataatgataatgaagagaacaattctccttcagagtctaggaaaggaatctaccaagacatcaagagcttgattctttctcagagaagtggtcatttttactcagaacaatgaacttttcacaacaagaagttgatttagccttcaagcaactaggtgatgaagcgccattagaacagctcgttgacttcattgtcagtgctcaatcaggagtaccctctggaggactgcaaactggtgacgctacaaatg

SEQ ID NO: 38607 - protein, 166 aa, Zea mays subsp. mays
VFFGPVAGDEHPPGASESGILSDRKMVKVEDQAEDGGADADARGLRESALDPLPVSVHASLKEEEGQPSSSSGKLRSQFIGMGFSSKLVDKVLQRHGDDDSNTILESLLSYSDLQQSGSESSDSFGSFFDNDNEENNSPSESRKGIYQDIKSLILSQRSGHFYSEQ

SEQ ID NO: 38608 - protein, 141 aa, Zea mays subsp. mays
MVKVEDQAEDGGADADARGLRESALDPLPVSVHASLKEEEGQPSSSSGKLRSQFIGMGFSSKLVDKVLQRHGDDDSNTILESLLSYSDLQQSGSESSDSFGSFFDNDNEENNSPSESRKGIYQDIKSLILSQRSGHFYSEQ

SEQ ID NO: 38609 - protein, 85 aa, Zea mays subsp. mays
MGFSSKLVDKVLQRHGDDDSNTILESLLSYSDLQQSGSESSDSFGSFFDNDNEENNSPSESRKGIYQDIKSLILSQRSGHFYSEQ

SEQ ID NO: 38610 - DNA, 555 bp, Zea mays subsp. mays
tccacaccaccccgatttacccacggcccacgccttctccctctcatctccccgctcactcccgtccccatcccacgcgatggccttccgcctcgccgtcgccgtctccgtcgcagcgcctgcgtcgtggccttccccggtcgccaccgtcgccccgccccgcctcgccctccgccgaggcctcccgccgacgtggcgcgcagttcgcgccctcccgcgttcccgtggcgccgtcgtggtgcggcgacgtggcgcgccggagagcgaggcggacatgatggcgtacgtggcggggcgcgttgcgtcgtacaagaagctccggctgctgcgcttcgtggacgccatccccaagtcggtgtccggcaagatcctgcggaggcagctcagggacgagttcgtcaagaagacggcagcagcgtaataatgcacatcatcctgtgggtgggtgcttgcttataccagtgcaagatcctgcattcgccacttgatgaagacaataatacaattagggtacagtcagatgttccaagctactgatacaattgttgtttctgc

SEQ ID NO: 38611 - protein, 178 aa, Zea mays subsp. mays
STPPRFTHGPRLLPLISPLTPVPIPRDGLPPRRRRLRRSACVVAFPGRHRRPAPPRPPPRPPADVARSSRPPAFPWRRRGAATWRAGERGGHDGVRGGARCVVQEAPAAALRGRHPQVGVRQDPAEAAQGRVRQEDGSSVIMHIILWVGACLYQCKILHSPLDEDNNTIRVQSDVPSY

SEQ ID NO: 38612 - protein, 139 aa, Zea mays subsp. mays
PHHPDLPTAHAFSLSSPRSLPSPSHAMAFRLAVAVSVAAPASWPSPVATVAPPRLALRRGLPPTWRAVRALPRSRGAVVVRRRGAPESEADMMAYVAGRVASYKKLRLLRFVDAIPKSVSGKILRRQLRDEFVKKTAAA

SEQ ID NO: 38613 - protein, 113 aa, Zea mays subsp. mays
MAFRLAVAVSVAAPASWPSPVATVAPPRLALRRGLPPTWRAVRALPRSRGAVVVRRRGAPESEADMMAYVAGRVASYKKLRLLRFVDAIPKSVSGKILRRQLRDEFVKKTAAA

SEQ ID NO: 38614 - DNA, 1215 bp, Zea mays subsp. mays
accggccaccgcgaatccagagccccacgccccgtccgaaccccagagcagagcaaagcctcctcgacctccctgtccccagccttccccgatggcccgcacgaagcagacggcgcgcaagtcgacgggcgggccatcggggagggctggtcagggattcaaacagaggcttctcagcatatgggggttctacaagcatcatcaatgggctggaatggtgctcctgtacttgctgccactcctgttgtcaagaaagtcatgaggctggatgttccagtagacaagtatcctaactacaactttgttggtcgtttattggggccgcgaggtaactccctgaaaagggttgaagcttcaacccaatgtagagtttacattcgaggacggggttctgtgaaagactctgttaaggaagacaagctgagggataaacctgggtatgaacaccttaatgaacaactgcatgtgcttgtggaagcagagtttccagcagatatggttgatgtgcgtcttaatcaagctgtgtccatcctagaggatcttcttaaaccaattgacgagtccatggactactacaagaagcagcagctgagggagctggcgattctaaatggcacactgagagaggaaagcccaagccctcacctcagccctagtgtgtcccccttcaactccaccgggatgaagcgcgcaaaaacagggcggtaatctctgttccgaaagccttcatccccccaaatcaatcatggttcaatgcccaattattacacaagctactgctggagatgattggtgatgcatatgctgggatcatcagtgatggcctatgcctgtcatgatctgtgcgctttatcgacaagcacacaaacatgcctgtgctgtgcttggacgaatggtctccgggcttgttgtttgactctactattatttattctttgtgcttctgactgcctaagtattattaacattattggtttgggaaagtgttaacaaggcccggttggccagtcgctgtagaaagcttggggagaggaggggggggtgtcaatgtgacggacaataataaggtttcgttggtgtacctgagatagttgtaatatgtcatgtgctgatgcttttgtgtggtgctagtacaagacaaccagacagctatagttgaggcaatgattattttgcgttcataaaatgcatgtcggtgtgctttcttcatggttc

SEQ ID NO: 38615 - protein, 235 aa, Zea mays subsp. mays
TGHRESRAPRPVRTPEQSKASSTSLSPAFPDGPHEADGAQVDGRAIGEGWSGIQTEASQHMGVLQASSMGWNGAPVLAATPVVKKVMRLDVPVDKYPNYNFVGRLLGPRGNSLKRVEASTQCRVYIRGRGSVKDSVKEDKLRDKPGYEHLNEQLHVLVEAEFPADMVDVRLNQAVSILEDLLKPIDESMDYYKKQQLRELAILNGTLREESPSPHLSPSVSPFNSTGMKRAKTGR

SEQ ID NO: 38616 - protein, 175 aa, Zea mays subsp. mays
MGVLQASSMGWNGAPVLAATPVVKKVMRLDVPVDKYPNYNFVGRLLGPRGNSLKRVEASTQCRVYIRGRGSVKDSVKEDKLRDKPGYEHLNEQLHVLVEAEFPADMVDVRLNQAVSILEDLLKPIDESMDYYKKQQLRELAILNGTLREESPSPHLSPSVSPFNSTGMKRAKTGR

SEQ ID NO: 38617 - protein, 167 aa, Zea mays subsp. mays
MGWNGAPVLAATPVVKKVMRLDVPVDKYPNYNFVGRLLGPRGNSLKRVEASTQCRVYIRGRGSVKDSVKEDKLRDKPGYEHLNEQLHVLVEAEFPADMVDVRLNQAVSILEDLLKPIDESMDYYKKQQLRELAILNGTLREESPSPHLSPSVSPFNSTGMKRAKTGR

SEQ ID NO: 38618 - DNA, 612 bp, Zea mays subsp. mays
aaaaaaaacaaagatatatataagattcgccacaccgacacctagatgtcacacgccagcccgcaggtggtatataataatagtgaaaaaaagagaagctgcttctgggatggctgcatttatgcaggcacactgctgccggcagccacgactggttggaaggagggaggggtagtagtaaaaccaggtaggtgtggctggctcgtgcagcggcggcaggcggcagtgagagcgatgagcgcggcggcggcgagctcggtcaccaagttcatcaagtgcgtcacggtcggcgatggggccgtcgggaagacctgcatgctcatctgctacacctgcaacaagttccccacggattatatccccaccgtattcgacaacttcagcgccaatgtctccgtgggtgggagcatcgtcaacttgggcctctgggacacggcaggccaggaggattacagcaagttgaggcctctgcagctacaggggtgctgcttagccaataatgtttcatgggcgaccatataggcatatatgtacacacttcacatcccattgcatggcagtgtcttcccttccctagttcaacaactagctttctgctggaataaggtgttc

SEQ ID NO: 38619 - protein, 158 aa, Zea mays subsp. mays
MSHASPQVVYNNSEKKRSCFWDGCIYAGTLLPAATTGWKEGGVVVKPGRCGWLVQRRQAAVRAMSAAAASSVTKFIKCVTVGDGAVGKTCMLICYTCNKFPTDYIPTVFDNFSANVSVGGSIVNLGLWDTAGQEDYSKLRPLQLQGCCLANNVSWATI

SEQ ID NO: 38620 - protein, 95 aa, Zea mays subsp. mays
MSAAAASSVTKFIKCVTVGDGAVGKTCMLICYTCNKFPTDYIPTVFDNFSANVSVGGSIVNLGLWDTAGQEDYSKLRPLQLQGCCLANNVSWATI

SEQ ID NO: 38621 - DNA, 666 bp, Zea mays subsp. mays
aatcaaaagcaaaaaccctaatcgcatctgcttccagagccccccgccgccgctgcgccctcctctcggtcctgccgtccgtcgaggtaaaaggacagcatggtgagggtcagcgtgctcaatgatgctctcaagtccatgtacaatgctgaaaagatagggaaacgtcaggtcatgatcaggccgtcatccaaggtgatcatcaagttcctgacggtcatgcagcgccatggctacattggcgagttcgagtacgtggatgaccacagagctgggaagatcgtggtggagctgaatggaagactgaataaatgtggtgttattagcccacgttttgatgtaggtgttaaggagatcgagggatggacggcgaggcttcttccatctcgccagtttggctacatcgtcctaacaacttctgctggaattatggaccatgaggaggcccgccgtaagaatgttggtggcaaggttctaggtttcttttattgaaaatgtgtttttttgagccacagatgcgtccaagaactcgtctgatgttttgaggtttgttaagactgggtgtctgagcctttgcggtttgttaagacagcgatgtgtcatgtatttcagaaattgggatttttatgagatgtacctgctagagccctgtctgtttcgattttc

SEQ ID NO: 38622 - protein, 130 aa, Zea mays subsp. mays
MVRVSVLNDALKSMYNAEKIGKRQVMIRPSSKVIIKFLTVMQRHGYIGEFEYVDDHRAGKIVVELNGRLNKCGVISPRFDVGVKEIEGWTARLLPSRQFGYIVLTTSAGIMDHEEARRKNVGGKVLGFFY

SEQ ID NO: 38623 - protein, 117 aa, Zea mays subsp. mays
MYNAEKIGKRQVMIRPSSKVIIKFLTVMQRHGYIGEFEYVDDHRAGKIVVELNGRLNKCGVISPRFDVGVKEIEGWTARLLPSRQFGYIVLTTSAGIMDHEEARRKNVGGKVLGFFY

SEQ ID NO: 38624 - protein, 105 aa, Zea mays subsp. mays
MIRPSSKVIIKFLTVMQRHGYIGEFEYVDDHRAGKIVVELNGRLNKCGVISPRFDVGVKEIEGWTARLLPSRQFGYIVLTTSAGIMDHEEARRKNVGGKVLGFFY

SEQ ID NO: 38625 - DNA, 1096 bp, Zea mays subsp. mays
agtcccccccccccccaagggtggtgtcataagcgtttactgtgagtctctcaaagaaaccaaaggcagagaaaagagataacacacacaaaaaaaaatggcatcaacctcactcctcaaggcttctccggtgttggacaaatccgaatgggtcaagggacaaagcgttctcttccgtcagccttcttccgcttctgtcgtcctccgcaaccgtgccacctccctcaccgtccgtgccgcttcctcctacgccgatgagcttgttaagacagcgaaaactattgcgtctcccggacgtggaatcttggcgatggacgagtcgaacgcgacttgcgggaaacgtttggattcgatagggctagagaacactgaggcaaatcgtcaagctttccggactttgctggtctctgcaccgggactcggacagtacgtctccggcgcaattctatttgaggagacttgtaccagtctaccaccgaaggcaagaaaatggtcgacgtcctcgtcgagcagaacattgtccctggtatcaaagtcgacaagggtttggtgccacttgttggatccaacaatgagtcatggtgccaaggactagatggtctatcagagagagctcactagtcccccccccccccggacactgtccggtggtgcaccggacagtccggtgaattatagcgaagcgcctctgaaaattcccgaaggtgaagagttcagcttggagtcccctggtgcaccggacactgtccggtggtgcaccggacagtctggtgcgccagatcagggtgccttcagttatcccttgctctctttgtttgaacccttttcttggtctttttattggcttagtgtgaacctttggcgcctgtataacttatagactagagcaaaactagttagtccaattatttgtgttgggcaattcaaccaccaaaatcaattaggaaataggtgtaagcctaattccctttcagaggggcgggagtcaagagagtgcatggtcaccactcaccacctacctttcattcaacgggcggtgcttagaccgaccttagtgtgagcattccggagccagacgcttaccgtgacccatggc

SEQ ID NO: 38626 - protein, 165 aa, Zea mays subsp. mays
MASTSLLKASPVLDKSEWVKGQSVLFRQPSSASVVLRNRATSLTVRAASSYADELVKTAKTIASPGRGILAMDESNATCGKRLDSIGLENTEANRQAFRTLLVSAPGLGQYVSGAILFEETCTSLPPKARKWSTSSSSRTLSLVSKSTRVWCHLLDPTMSHGAKD

SEQ ID NO: 38627 - protein, 94 aa, Zea mays subsp. mays
MDESNATCGKRLDSIGLENTEANRQAFRTLLVSAPGLGQYVSGAILFEETCTSLPPKARKWSTSSSSRTLSLVSKSTRVWCHLLDPTMSHGAKD

SEQ ID NO: 38628 - protein, 94 aa, Zea mays subsp. mays
MVYQRELTSPPPPRTLSGGAPDSPVNYSEAPLKIPEGEEFSLESPGAPDTVRWCTGQSGAPDQGAFSYPLLSLFEPFSWSFYWLSVNLWRLYNL

SEQ ID NO: 38629 - DNA, 701 bp, Zea mays subsp. mays
  misc_feature (601)..(602): n is a, c, g, or t
agaagcaggaaccgaaagttcgacaaatggtcaccaagctgggaaggcccttacaggatcacacaggtaatagctggtaatgcctacatgcttcaaactttgcaaggtgaggacctacctaagacgctaaatggtcgtttcttgaagcaataccatcctagtatgtggcaagatgcttaagaaagctgatgttgtcatatcgagttgattccaaccgcaccagtgcttttgtttcgctcagcgtccccaaaaggcagagggcatgtgttgagcacctattgtggcactgggcgcagtcggacggttcggccttgaggcccggacggtctgcaataggattagatcatgcggttaagctcctttctcctcgtgtgtttatccttctaaactcgtgggagctgttggagaacgcataggaacgggttcagacctccccttatatatttgaaggggtacggctgattgcgggcatccacaatcgaaccaatcaatatacttgtcgttcttctacctttcatgccctaggagtagcagtaacttagccttcgcatctctactttcacctctgtgcgactctacgtcgtatggagacgtcttgggnngtattgttgatcccaagaaaatcctaggatctctcctccctgactagggatggcagcaagtcgggttgtgttcgggtatgataataccgacccgatatc

SEQ ID NO: 38630 - protein, 75 aa, Zea mays subsp. mays
MLSYRVDSNRTSAFVSLSVPKRQRACVEHLLWHWAQSDGSALRPGRSAIGLDHAVKLLSPRVFILLNSWELLENA

SEQ ID NO: 38631 - protein, 59 aa, Zea mays subsp. mays
RSRNRKFDKWSPSWEGPYRITQVIAGNAYMLQTLQGEDLPKTLNGRFLKQYHPSMWQDA

SEQ ID NO: 38632 - DNA, 1011 bp, Zea mays subsp. mays
  misc_feature (849)..(849): n is a, c, g, or t
ccccccccccccacccccggcgaggccggagagatggaggagcccgtcactggagatgtccagattttcctctcctccaaggagaactgcctgtccatgagatctgttggggcggattacatgtcgaagctggttaagatagcgggaatagcaattgctgcatcgagagtaaaagctaaggccacccatgtaactcttatctgcaagaattgccggagtgtgaggacagtgccttgcagaccaggcctcggcggggctattgttccacgttcgtgtgaccatgttcctcagcctggagaggagccatgccctctggacccttggattgccgttccagataagagcaagtatgtggatctccagaccctcaaattgcaagagaatcctgaggatgttccaactggtgagcttccaaggaatgtgctgctttctgtagataggcacctagttcagactattgttccagggactagattaactgttgttggcatctacagcgtgtaccaagcatccacaacccagaagggtgctgttggtgttaagcagccttacattagagttgtgggtttagagcaatctcgagacaataactcaaatggcccctcaaacttcactcttgatgaggaaatggaattcaaagaatttgcacagaggccagatgcatatgccaagctatgctcaatgattggtccttcaatttatggtcattctgatgtcaagaaagctattgcatgcttgttatttgggggatctaagaagaggctacctgatggtgtacgtttaagaggggacattcatgtcttgcttctcggtgatccctccacagcaaaatcacagttcctaaaattngtagagaagactgcacctattgcagtatatacatctggcaaaggatcgtctgcagctggtcttacagcatctgtaactcgtgatagtagctcgcgtgagttttattggaaggaggagccatgtgtttaaacacaataaagtgggaactggaggggggaaagg

SEQ ID NO: 38633 - protein, 325 aa, Zea mays subsp. mays
  misc_feature (283)..(283): Xaa can be any naturally occurring amino acid
PPPPTPGEAGEMEEPVTGDVQIFLSSKENCLSMRSVGADYMSKLVKIAGIAIAASRVKAKATHVTLICKNCRSVRTVPCRPGLGGAIVPRSCDHVPQPGEEPCPLDPWIAVPDKSKYVDLQTLKLQENPEDVPTGELPRNVLLSVDRHLVQTIVPGTRLTVVGIYSVYQASTTQKGAVGVKQPYIRVVGLEQSRDNNSNGPSNFTLDEEMEFKEFAQRPDAYAKLCSMIGPSIYGHSDVKKAIACLLFGGSKKRLPDGVRLRGDIHVLLLGDPSTAKSQFLKXVEKTAPIAVYTSGKGSSAAGLTASVTRDSSSREFYWKEEPCV

SEQ ID NO: 38634 - protein, 314 aa, Zea mays subsp. mays
  misc_feature (272)..(272): Xaa can be any naturally occurring amino acid
MEEPVTGDVQIFLSSKENCLSMRSVGADYMSKLVKIAGIAIAASRVKAKATHVTLICKNCRSVRTVPCRPGLGGAIVPRSCDHVPQPGEEPCPLDPWIAVPDKSKYVDLQTLKLQENPEDVPTGELPRNVLLSVDRHLVQTIVPGTRLTVVGIYSVYQASTTQKGAVGVKQPYIRVVGLEQSRDNNSNGPSNFTLDEEMEFKEFAQRPDAYAKLCSMIGPSIYGHSDVKKAIACLLFGGSKKRLPDGVRLRGDIHVLLLGDPSTAKSQFLKXVEKTAPIAVYTSGKGSSAAGLTASVTRDSSSREFYWKEEPCV

SEQ ID NO: 38635 - protein, 293 aa, Zea mays subsp. mays
  misc_feature (251)..(251): Xaa can be any naturally occurring amino acid
MRSVGADYMSKLVKIAGIAIAASRVKAKATHVTLICKNCRSVRTVPCRPGLGGAIVPRSCDHVPQPGEEPCPLDPWIAVPDKSKYVDLQTLKLQENPEDVPTGELPRNVLLSVDRHLVQTIVPGTRLTVVGIYSVYQASTTQKGAVGVKQPYIRVVGLEQSRDNNSNGPSNFTLDEEMEFKEFAQRPDAYAKLCSMIGPSIYGHSDVKKAIACLLFGGSKKRLPDGVRLRGDIHVLLLGDPSTAKSQFLKXVEKTAPIAVYTSGKGSSAAGLTASVTRDSSSREFYWKEEPCV

SEQ ID NO: 38636 - DNA, 2150 bp, Zea mays subsp. mays
cactagtcccccccccccccccccttttcagagatggggcttaaactgcgggttgacatgcctcagcaggctatggatattgccacagtattctttcgtcagtcaaccacagcaagtgaagcaaaggagaacataaaaacacttaatgaccaaagagagagaaatgtcaaagctcttcaagaaaagatgaaattgaacaagaaggaggttcaacgctttaatcctgttgatgctttccccggggatgccataatatttatgagggtcttgaatctcctcagaggtctttcagcttcactaaatgttaggatagtttatctggacatcatgaggccatctgctgaatcaactttgttagggagtttgacacacggacaaatacctaacagtcagtggatttttgactcacctgctaactctgatgtggagtctaaactgagaaattatctgcttgagttgggaagcgacaaaattttaggaatacaagtctgcgcatataaagatggaaaggtcataatagatactgctgctggtatgctggggaagtatatccccgacctgttcaacctgattctctttttcctgttttctcagtgactaagggtatcactgctgggatggtacattggcttgtggacaaagggaagctgaagtacgaggaaacagttgccaacatatggccgaattttggaactaacggaaaggagttaataaaggtccatcatcttctaaatcacacatccggtttgcacaatgcactgggtgatgtggtaaagaatgatcctttgttggtatgtgactgggaggagacactaaaccagattacgaagagtacacctgagaccgaacctggttcagcacaaatttaccattacctctccttcggttggctgtgtgggggagtcatagagcatgcatctgggaagaagtttcaagagattctagaagaggctattgttcgtcctcttcacattgagggggagttgtatgttggcattccaccaggtgtcgagtctcggctggcagcgctgacagttgacaccgaggagctccagaagctatcaggaatcagggcaggtgcagatgtgccagcagctctgctgaacaacatcgcgcagatggcgtccggtgtgcccgctattttcaacacgctaaacgtccgtcgggccatcatccctgccgccaacggccactgctctgcccgcgcgctcgctcgatactacgcggcgctagcggccggcggttctgttcccccgccgcactcttcgggcgccatgccgcccctcggcagccacgtgcacacccccaagttcccgaccgcgccgctcaagaagaagaagaagggcgccggaaagaagaagggcgccggcggcggctccatgggagacctcaaggtccaggatataagcggcggcagcagcgacaggaacgggtactgccagctgcgcaccagcgacgccgacagcgaggcggggagcggcagcggcggaggcggcaggatgttcggcagcgacaggatcctcgacgcgttcatgggcgtcggcgagtacgagggcatggcgcaccgggacggcaagttcgggctcgggttcaggaggtacgacgacgccggcagcggcagaggcaggctgaggtgcttcgggcactccgggatgggcggctcgaccgggttctgcgacgtggagaacggcttcgccatcgcggtgacggtgaacaagctgtctctgggcagcgtcacgcgcggcgtcgtccggctcgtcctcgaggaactgggcctgcccgtgccggacgagtactcggccaccggggagaaggggcctgacatgatgctcaacctgacgacaacgacgacgactacgccgccgcaactgagatgacgacggcgaaactgagattaccaggttgggttcgtaataatctgtggaacgagatatatagcgagcagaaggaaggtggggtacagggatttggtggacagtatatatacgcgtgccattttgattttgacgtggcatgtaaaactcggcaaattctggtatattacgaagcaagctgggtgctgggaattgtggccagcagtacaagaaatggacatgctagtttgttgaccaaaaaaaaaaaaaaaaaaaactcgagggggggcccggtac

SEQ ID NO: 38637 - protein, 419 aa, Zea mays subsp. mays
MVHWLVDKGKLKYEETVANIWPNFGTNGKELIKVHHLLNHTSGLHNALGDVVKNDPLLVCDWEETLNQITKSTPETEPGSAQIYHYLSFGWLCGGVIEHASGKKFQEILEEAIVRPLHIEGELYVGIPPGVESRLAALTVDTEELQKLSGIRAGADVPAALLNNIAQMASGVPAIFNTLNVRRAIIPAANGHCSARALARYYAALAAGGSVPPPHSSGAMPPLGSHVHTPKFPTAPLKKKKKGAGKKKGAGGGSMGDLKVQDISGGSSDRNGYCQLRTSDADSEAGSGSGGGGRMFGSDRILDAFMGVGEYEGMAHRDGKFGLGFRRYDDAGSGRGRLRCFGHSGMGGSTGFCDVENGFAIAVTVNKLSLGSVTRGVVRLVLEELGLPVPDEYSATGEKGPDMMLNLTTTTTTTPPQLR

SEQ ID NO: 38638 - protein, 252 aa, Zea mays subsp. mays
MASGVPAIFNTLNVRRAIIPAANGHCSARALARYYAALAAGGSVPPPHSSGAMPPLGSHVHTPKFPTAPLKKKKKGAGKKKGAGGGSMGDLKVQDISGGSSDRNGYCQLRTSDADSEAGSGSGGGGRMFGSDRILDAFMGVGEYEGMAHRDGKFGLGFRRYDDAGSGRGRLRCFGHSGMGGSTGFCDVENGFAIAVTVNKLSLGSVTRGVVRLVLEELGLPVPDEYSATGEKGPDMMLNLTTTTTTTPPQLR

SEQ ID NO: 38639 - DNA, 725 bp, Zea mays subsp. mays
gcacgagaccattacctagaacatcctaatcgaaaaatcctaatcgaaaaatccaatccatcagtacccaaccttcccctacaccagaaaaatccccagttctttggtccgcgtcagagaggcggcggcgatgtctgggcgcggcaagggcggcaagggtctgggcaagggcggcgcgaagcgccaccggaaggtgctccgcgacaacatccagggcatcaccaagccggcgatccggaggctggctaggaggggtggcgtgaagcgcatctcggggctcatctacgaggagacccgcggcgtgctcaagatctttctcgagaacgtcatccgcgacgccgtcacctacaccgagcacgcgcgccgcaagaccgtgaccgccatggacgtcgtctacgcgctcaagcgccagggccgcaccctctacggcttcggaggctaggctaggcgcctcttcgtagtcggggactggttaggggacatgtctctgtgtgatgctttctgaggtagtattgctgcaatagctgtgtaatccatcgcttctgcaatgaagcgctttgaagcatgctacgtatgttgtgtctgtgggtgattgtatttctggtagtaacagtgattcttcctgaattttggataatacaagctcattcgcagtagtttctgatgtaatcatgtcttatcgtttgagagatgaattgcttttggcagcctttgctggtattctc

SEQ ID NO: 38640 - protein, 103 aa, Zea mays subsp. mays; identical to SEQ ID NO: 71

SEQ ID NO: 38641 - protein, 82 aa, Zea mays subsp. mays
ARDHYLEHPNRKILIEKSNPSVPNLPLHQKNPQFFGPRQRGGGDVWARQGRQGSGQGRREAPPEGAPRQHPGHHQAGDPEAG

SEQ ID NO: 38642 - DNA, 1207 bp, Zea mays subsp. mays
ccccccccggtggataagcttctcactttcagttcaattggatagccggaaaggctctcctccaagtggcgtttatatggaggtgacaaatacgagcagcatcatgtggttcttcagggacaaaggtttcgatgatccgagtatcgacaagatgttgagaaaatgcaaacagttggaaaaggctcaaagcgatgtggcatcagaaaactgggactacctgagtaacattgttggtatccaagagagaaaactcccttacatcgtctcccgatgccccaaaatcctgactttacgcctcgatgagagactcatccccatggtcgagtgcctctccagtcttggaaggaatcctcgtgaagttgcttccgccattaccaaatttcctccaatactctctcatagcgtggaggagaaactctgtccccttcttgctttctttcaagcgttgggtgtgcctgagactcaacttggcaaaatgatactttttaacccaaggcttatcagctacagcatcgacaccaagctgacagtgatcgtcagcttacttgctagccttggccttgatcaagatgggatgattggcaaagttctggtgaagaacccatttcttatggggtacagtgttgataaaaggttacggcctaccactgaattcttgaaatcatccgttggcctgagtgaggatggcattaagtcggtggtcatgaatttcccacaacttttgtgcagagacgttaacaagattctcaaaccaaattatgattatttgaaggagtgtgggtttggagattcccagatagcaaccatggtcactggttatccccaaatcttgattaagagtgttaagaattcactacagcctaggatcagattcctcgtccaggtgatgggaagaggcatggatgaagtggcttcttatcctgaattctttcaccatggattgaagaagaaggtcgaatcgaggtttaaacttgtcaaaaagaacaacattgactgcagccttagagaaatgctggactgtaacacaaagaaattccatgagaagtttggcttttcggaggtaactgcaagctcctagcttttatatctctctctagttttttccttcatcaggctctctctgtaagctgttttcagcttgtgcaccaatttctagcacgagctttaccttgagtgattgtgatatcaatagagtgttttcttcccg

SEQ ID NO: 38643 - protein, 358 aa, Zea mays subsp. mays
PPRWISFSLSVQLDSRKGSPPSGVYMEVTNTSSIMWFFRDKGFDDPSIDKMLRKCKQLEKAQSDVASENWDYLSNIVGIQERKLPYIVSRCPKILTLRLDERLIPMVECLSSLGRNPREVASAITKFPPILSHSVEEKLCPLLAFFQALGVPETQLGKMILFNPRLISYSIDTKLTVIVSLLASLGLDQDGMIGKVLVKNPFLMGYSVDKRLRPTTEFLKSSVGLSEDGIKSVVMNFPQLLCRDVNKILKPNYDYLKECGFGDSQIATMVTGYPQILIKSVKNSLQPRIRFLVQVMGRGMDEVASYPEFFHHGLKKKVESRFKLVKKNNIDCSLREMLDCNTKKFHEKFGFSEVTASS

SEQ ID NO: 38644 - protein, 333 aa, Zea mays subsp. mays
MEVTNTSSIMWFFRDKGFDDPSIDKMLRKCKQLEKAQSDVASENWDYLSNIVGIQERKLPYIVSRCPKILTLRLDERLIPMVECLSSLGRNPREVASAITKFPPILSHSVEEKLCPLLAFFQALGVPETQLGKMILFNPRLISYSIDTKLTVIVSLLASLGLDQDGMIGKVLVKNPFLMGYSVDKRLRPTTEFLKSSVGLSEDGIKSVVMNFPQLLCRDVNKILKPNYDYLKECGFGDSQIATMVTGYPQILIKSVKNSLQPRIRFLVQVMGRGMDEVASYPEFFHHGLKKKVESRFKLVKKNNIDCSLREMLDCNTKKFHEKFGFSEVTASS

SEQ ID NO: 38645 - protein, 324 aa, Zea mays subsp. mays
MWFFRDKGFDDPSIDKMLRKCKQLEKAQSDVASENWDYLSNIVGIQERKLPYIVSRCPKILTLRLDERLIPMVECLSSLGRNPREVASAITKFPPILSHSVEEKLCPLLAFFQALGVPETQLGKMILFNPRLISYSIDTKLTVIVSLLASLGLDQDGMIGKVLVKNPFLMGYSVDKRLRPTTEFLKSSVGLSEDGIKSVVMNFPQLLCRDVNKILKPNYDYLKECGFGDSQIATMVTGYPQILIKSVKNSLQPRIRFLVQVMGRGMDEVASYPEFFHHGLKKKVESRFKLVKKNNIDCSLREMLDCNTKKFHEKFGFSEVTASS

SEQ ID NO: 38646 - DNA, 1318 bp, Zea mays subsp. mays
tcactagtccccccccccccccccgattgcaaatcaaatggatcgtcttaagctttatttctccgttttcgttttgtctttctttatcgtctcggtttcgtcgtctgatgtcaacgacggcgatgatctcgtgatccgtcaggtggttggtggagccgagcctcaggttttgacctcagaggatcacttttctctcttcaagcggaagttcgggaaggtctacgcttccaacgaggagcatgactatagattctcggttttcaaagcgaatctcaggcgagcgaggcgtcaccagaagttggatccgtcggcgactcatggtgttacgcagttctcagatctgactcggtctgagttccgtaagaagcacttgggggttagaagtggctttaagcttcctaaagatgccaacaaggctccgattctccctaccgaaaatctccctgaggattttgattggagagatcatggcgccgttactcccgtcaaaaatcagggatcttgcggctcttgctggagtttcagcgccactggagctttggaaggtgctaacttcctcgctaccggcaaactcgtcagcctcagcgaacaacagctcgtcgactgtgatcacgagtgtgatcccgaggaggcagattcctgcgactctggttgcaatggtgggctaatgaacagcgcttttgaatacaccctcaaaaccggagggctcatgaaagaagaagactatccttacaccggaaaggacggcaagacctgcaagctagacaagtccaagatcgttgcctctgtctccaacttcagtgttatctccattgatgaagaacagattgctgcaaaccttgtcaagaacggacctcttgctgtagccatcaacgctggctatatgcagacttacattggaggagtctcatgcccttacatatgcaccaggaggctcaaccacggtgtcttattggttggctatggagcggcaggttacgctccggctaggttcaaggagaagccttactggatcatcaagaactcgtggggagagacttggggtgaaaatggtttctacaaaatctgcaaaggccgtaacatttgtggtgttgacagtatggtctccactgttgcagccaccgtctcaaccaccgcccattaagcatctcgtcaataagttttaattactttggtgatttgtatgagcgagctctctttgcgctgctgactctctctatttatctctgcttcttgcttgtaaataaaatgcgttctattgagcaaaaccgtacaatgctcattagcaatgagcccactttaagggggggcccggtac

SEQ ID NO: 38647 - protein, 368 aa, Zea mays subsp. mays
MDRLKLYFSVFVLSFFIVSVSSSDVNDGDDLVIRQVVGGAEPQVLTSEDHFSLFKRKFGKVYASNEEHDYRFSVFKANLRRARRHQKLDPSATHGVTQFSDLTRSEFRKKHLGVRSGFKLPKDANKAPILPTENLPEDFDWRDHGAVTPVKNQGSCGSCWSFSATGALEGANFLATGKLVSLSEQQLVDCDHECDPEEADSCDSGCNGGLMNSAFEYTLKTGGLMKEEDYPYTGKDGKTCKLDKSKIVASVSNFSVISIDEEQIAANLVKNGPLAVAINAGYMQTYIGGVSCPYICTRRLNHGVLLVGYGAAGYAPARFKEKPYWIIKNSWGETWGENGFYKICKGRNICGVDSMVSTVAATVSTTAH

SEQ ID NO: 38648 - DNA, 780 bp, Zea mays subsp. mays
  misc_feature (434)..(434): n is a, c, g, or t
  misc_feature (443)..(443): n is a, c, g, or t
  misc_feature (450)..(450): n is a, c, g, or t
  misc_feature (463)..(463): n is a, c, g, or t
  misc_feature (499)..(499): n is a, c, g, or t
  misc_feature (504)..(504): n is a, c, g, or t
  misc_feature (509)..(509): n is a, c, g, or t
  misc_feature (576)..(576): n is a, c, g, or t
  misc_feature (670)..(670): n is a, c, g, or t
  misc_feature (680)..(680): n is a, c, g, or t
  misc_feature (700)..(700): n is a, c, g, or t
  misc_feature (705)..(705): n is a, c, g, or t
  misc_feature (720)..(720): n is a, c, g, or t
  misc_feature (725)..(725): n is a, c, g, or t
  misc_feature (745)..(745): n is a, c, g, or t
  misc_feature (777)..(777): n is a, c, g, or t
aaaattcctcgcagacacgggcgcgcctactcaaccgaggccaacaagtcaaggcgagtgcggagtagaggcacaaggtcggatgcctagagagatttcccggtcgcctccgccattccgccggcgaggctcccctcctttgcggtacgctagccggagaaacagacgagatcggagccgctccccttacgcctctcggcgaaaaactcgttctccttctccactatgggataggagcaactcaccaagtccaagaaggcatagaagcccactatctccaaggagacacagaagacagagaagtcggagcactacaagttcattagagaataacccatccagtccaagtcacgcatcagagaaaataaattcctctgtaaaacaaaggctggaagaagaaaagaaaaggcgtcaaaaggaagctgaatttaagntactggaanaggagcntgctagaagggtngaagaagctataagaaaaaatgtcgaggaacgtttnaaatntgaanaggtgaaacgtgacatagaaccccgaattgaggagggtattagaaagttatttgatgaggttgacgntcagctacaaaaagagaaagcagtggccctttatgaggccaggcagaaagcagagcaagaaagaagagagagggaggagttggatagaatgctngaagagaacnggcgtaaagtggaggaagcncaaanaaaggcgatgatgtntccgntgctgtaaactggcatatgngtattatatatgatgatgagctgaaatttatntcc

SEQ ID NO: 38649 - protein, 243 aa, Zea mays subsp. mays
  misc_feature (145)..(145): Xaa can be any naturally occurring amino acid
  misc_feature (148)..(148): Xaa can be any naturally occurring amino acid
  misc_feature (150)..(150): Xaa can be any naturally occurring amino acid
  misc_feature (154)..(154): Xaa can be any naturally occurring amino acid
  misc_feature (166)..(166): Xaa can be any naturally occurring amino acid
  misc_feature (168)..(168): Xaa can be any naturally occurring amino acid
  misc_feature (170)..(170): Xaa can be any naturally occurring amino acid
  misc_feature (192)..(192): Xaa can be any naturally occurring amino acid
  misc_feature (223)..(223): Xaa can be any naturally occurring amino acid
  misc_feature (227)..(227): Xaa can be any naturally occurring amino acid
  misc_feature (233)..(233): Xaa can be any naturally occurring amino acid
  misc_feature (235)..(235): Xaa can be any naturally occurring amino acid
  misc_feature (240)..(240): Xaa can be any naturally occurring amino acid
  misc_feature (242)..(242): Xaa can be any naturally occurring amino acid
KFLADTGAPTQPRPTSQGECGVEAQGRMPREISRSPPPFRRRGSPPLRYASRRNRRDRSRSPYASRRKTRSPSPLWDRSNSPSPRRHRSPLSPRRHRRQRSRSTTSSLENNPSSPSHASEKINSSVKQRLEEEKKRRQKEAEFKXLEXEXARRXEEAIRKNVEERXKXEXVKRDIEPRIEEGIRKLFDEVDXQLQKEKAVALYEARQKAEQERREREELDRMXEENXRKVEEXQXKAMMXPXL

SEQ ID NO: 38650 - protein, 216 aa, Zea mays subsp. mays
  misc_feature (118)..(118): Xaa can be any naturally occurring amino acid
  misc_feature (121)..(121): Xaa can be any naturally occurring amino acid
  misc_feature (123)..(123): Xaa can be any naturally occurring amino acid
  misc_feature (127)..(127): Xaa can be any naturally occurring amino acid
  misc_feature (139)..(139): Xaa can be any naturally occurring amino acid
  misc_feature (141)..(141): Xaa can be any naturally occurring amino acid
  misc_feature (143)..(143): Xaa can be any naturally occurring amino acid
  misc_feature (165)..(165): Xaa can be any naturally occurring amino acid
  misc_feature (196)..(196): Xaa can be any naturally occurring amino acid
  misc_feature (200)..(200): Xaa can be any naturally occurring amino acid
  misc_feature (206)..(206): Xaa can be any naturally occurring amino acid
  misc_feature (208)..(208): Xaa can be any naturally occurring amino acid
  misc_feature (213)..(213): Xaa can be any naturally occurring amino acid
  misc_feature (215)..(215): Xaa can be any naturally occurring amino acid
MPREISRSPPPFRRRGSPPLRYASRRNRRDRSRSPYASRRKTRSPSPLWDRSNSPSPRRHRSPLSPRRHRRQRSRSTTSSLENNPSSPSHASEKINSSVKQRLEEEKKRRQKEAEFKXLEXEXARRXEEAIRKNVEERXKXEXVKRDIEPRIEEGIRKLFDEVDXQLQKEKAVALYEARQKAEQERREREELDRMXEENXRKVEEXQXKAMMXPXL

SEQ ID NO: 38651 - DNA, 737 bp, Zea mays subsp. mays
gattcatagttctctcttctccggcaagaaaagatgcctatgaagtcgttgaggaatgaccatggaacccttaaggccatgatcggatccgatttcaacgagctcactatcgctgctaagaacctagctacacacgccttcacactcactggtttaggctttggtacctctgtcctcgaatgggttgcttcaatcgccgccatatacttgttggtgttggatcgaaccaattggaagacgaatatgctcacatcacttctcattccttacatcttcttcagtcttccttccttgatctttggtattttcagaggagaaattggtaaatggattgctttcgtagctgttgttgtacaactcttctttcctaaacacgccagagaatacctggaattaccggtggctttggttcttctcgccgtggtggcaccaaatttgattgctggcacattcagagacagttggattggtttagctatatgtttaggtattggatgttacttgcttcaagaacacattagagcttcaggtggattcagaaatgcatttactaaagccaatggtatctccaacaccgtcgggatcatctgtctcgtcgtcttccccgtctgggctcttatcttttaagttaactcttcagtttctttttccatttgtcttttttttcatgtaagagtgattgctttgtacgatctgtctctcctcgtaactctatcaatgaatgtgatttgaataag

SEQ ID NO: 38652 - protein, 197 aa, Zea mays subsp. mays
MPMKSLRNDHGTLKAMIGSDFNELTIAAKNLATHAFTLTGLGFGTSVLEWVASIAAIYLLVLDRTNWKTNMLTSLLIPYIFFSLPSLIFGIFRGEIGKWIAFVAVVVQLFFPKHAREYLELPVALVLLAVVAPNLIAGTFRDSWIGLAICLGIGCYLLQEHIRASGGFRNAFTKANGISNTVGIICLVVFPVWALIF

SEQ ID NO: 38653 - protein, 195 aa, Zea mays subsp. mays
MKSLRNDHGTLKAMIGSDFNELTIAAKNLATHAFTLTGLGFGTSVLEWVASIAAIYLLVLDRTNWKTNMLTSLLIPYIFFSLPSLIFGIFRGEIGKWIAFVAVVVQLFFPKHAREYLELPVALVLLAVVAPNLIAGTFRDSWIGLAICLGIGCYLLQEHIRASGGFRNAFTKANGISNTVGIICLVVFPVWALIF

SEQ ID NO: 38654 - protein, 182 aa, Zea mays subsp. mays
MIGSDFNELTIAAKNLATHAFTLTGLGFGTSVLEWVASIAAIYLLVLDRTNWKTNMLTSLLIPYIFFSLPSLIFGIFRGEIGKWIAFVAVVVQLFFPKHAREYLELPVALVLLAVVAPNLIAGTFRDSWIGLAICLGIGCYLLQEHIRASGGFRNAFTKANGISNTVGIICLVVFPVWALIF

SEQ ID NO: 38655 - DNA, 1478 bp, Zea mays subsp. mays
gatgttctgttcaatgaggaatccccatattctgctccattaccccccttacttggagaagatgatgaatcaggaagtgggaagattgatgagctggcaaccattgtcaaaaaaatgagagagtcgatcactcctaaggatagattctataagatgagaagatttagcaactgctttcttggtagtgaagctgtggatttcatatcagaagatcaatatttggagagagatgaggcagtggaatttggaaggaagcttgcaagaaaatacttctttcgtcatgttctagatgaaaatgtctttgaagatggaaaccacatatatcgtttcctggatcatgatcccatagttatgactcaatgttacaacatccctaggggcatcatcgatgttgcaccaaagcccattgctgaagtagcatcaaggctgaggttgctatcctgtgccatttttgaagcttatgtatcagccgatggtagacatgttgactaccaaagcatcaaaggttctgaggaatttaaaagatatattagaacagttgaggagctccagagggtggaaattgattatttatcacgtgaagaaaaacttgctttcttcataaatctctacaatatgatggctatccatgcattagtgacatgtggccatcctgctggaccattggacagaaaaaagttttttggagattttaagtatatcattggtggatgtgcttattcactgtcagcaatccaaaatggcattctacgtggcaaccaaaggccaccatacaacattgccaaacctttcgggcagaaagaccgaagatccaaggtggcccttccataccatgaacctcttgttcactttgctttggtatgtggcaccaaatctggacctgcacttaggtgttactcaccaggggatatcgatagagaattgatggaagctgcacgtgatttcgtgaggaatggaggactgattgttgatcctgaagccaaaattgcatctgcaagcaagattttgaaatggtatagcacagattttggtaagaacgagatagaagtgttaaagcatgctgcgaactatcttgagcccgcagagtcagagcagctcttggaactgctcgccagcactcaactgaaagtcatgtaccaaaattacgactggagcatcaacatttagaaggtggtgcttatcatttttctgaattccgttcagttaactaaatgagaatcgccgacgccatcttccctaccggagctattaagatttacaaacggtggtgatgttatcagcacggccggtgatgtggagcgagcgagcgagcatgcgtgaacgctgctgcagcgcgcatgattgcttggaacaattaacttctcgccattacgagcgagcgtttgagctgcacgtattttgttttgttgactggctcgatctgaaaaaaagttgattctacgattttcctcttaccttttaaactctccaaacagttt

SEQ ID NO: 38656 - protein, 388 aa, Zea mays subsp. mays
DVLFNEESPYSAPLPPLLGEDDESGSGKIDELATIVKKMRESITPKDRFYKMRRFSNCFLGSEAVDFISEDQYLERDEAVEFGRKLARKYFFRHVLDENVFEDGNHIYRFLDHDPIVMTQCYNIPRGIIDVAPKPIAEVASRLRLLSCAIFEAYVSADGRHVDYQSIKGSEEFKRYIRTVEELQRVEIDYLSREEKLAFFINLYNMMAIHALVTCGHPAGPLDRKKFFGDFKYIIGGCAYSLSAIQNGILRGNQRPPYNIAKPFGQKDRRSKVALPYHEPLVHFALVCGTKSGPALRCYSPGDIDRELMEAARDFVRNGGLIVDPEAKIASASKILKWYSTDFGKNEIEVLKHAANYLEPAESEQLLELLASTQLKVMYQNYDWSINI

SEQ ID NO: 38657 - protein, 350 aa, Zea mays subsp. mays
MRESITPKDRFYKMRRFSNCFLGSEAVDFISEDQYLERDEAVEFGRKLARKYFFRHVLDENVFEDGNHIYRFLDHDPIVMTQCYNIPRGIIDVAPKPIAEVASRLRLLSCAIFEAYVSADGRHVDYQSIKGSEEFKRYIRTVEELQRVEIDYLSREEKLAFFINLYNMMAIHALVTCGHPAGPLDRKKFFGDFKYIIGGCAYSLSAIQNGILRGNQRPPYNIAKPFGQKDRRSKVALPYHEPLVHFALVCGTKSGPALRCYSPGDIDRELMEAARDFVRNGGLIVDPEAKIASASKILKWYSTDFGKNEIEVLKHAANYLEPAESEQLLELLASTQLKVMYQNYDWSINI

SEQ ID NO: 38658 - protein, 337 aa, Zea mays subsp. mays
MRRFSNCFLGSEAVDFISEDQYLERDEAVEFGRKLARKYFFRHVLDENVFEDGNHIYRFLDHDPIVMTQCYNIPRGIIDVAPKPIAEVASRLRLLSCAIFEAYVSADGRHVDYQSIKGSEEFKRYIRTVEELQRVEIDYLSREEKLAFFINLYNMMAIHALVTCGHPAGPLDRKKFFGDFKYIIGGCAYSLSAIQNGILRGNQRPPYNIAKPFGQKDRRSKVALPYHEPLVHFALVCGTKSGPALRCYSPGDIDRELMEAARDFVRNGGLIVDPEAKIASASKILKWYSTDFGKNEIEVLKHAANYLEPAESEQLLELLASTQLKVMYQNYDWSINI

SEQ ID NO: 38659 - DNA, 844 bp, Zea mays subsp. mays
gcaccagctagtccccccccccccccccaagtccaacttctctccttaagaaactctccttaagaattaagaaagagaccagaaacgaaaacctcatcaatcaaagctcaaaatcgccttcaatggatgctaagatcggacaattctttgactccgtcggaactttcttcagcggcagcgataagatcccatggtgcgacggagatgtcatcgctggatgtgaaagagaggttcgagaggccacagattctggcactgaagatcttaagaaagagtgcttgatgcgattgtcatgggcccttgttcattcccgtcaaacggaagatgttcaacgtggaatagccatgcttgaagcatctcttgaaagcagtgcccctccattggaggaccgagagaagctctatcttcttgctgttgggtattacagaagtgggaattactcaaggagcaggcagctcgtggaccgctgtatcgagatgcaagctgattggagacaagctttggtcctaaagaagaccttcgaagacaaaatcacaaaggatggtgttatagggatagggatcacggctacagcctttggagctgtgggtctcatagccggtggtatcgtagcagcgatgtctcgcaagaaatgaaaaccacaaccatgacttcttctctgtgtatacaatggcagtttactttttttcacatttttttcttcttctttgagtgtgttctccactgcttacttcacaatctatgatatagaaaagtcgaagcaaatagcttcgaattaacattttgcttcgaattaacattgtgccatgtcattaattagcatttatacataccatttttactc

SEQ ID NO: 38660 - protein, 170 aa, Zea mays subsp. mays
MDAKIGQFFDSVGTFFSGSDKIPWCDGDVIAGCEREVREATDSGTEDLKKECLMRLSWALVHSRQTEDVQRGIAMLEASLESSAPPLEDREKLYLLAVGYYRSGNYSRSRQLVDRCIEMQADWRQALVLKKTFEDKITKDGVIGIGITATAFGAVGLIAGGIVAAMSRKK

SEQ ID NO: 38661 - protein, 117 aa, Zea mays subsp. mays
MRLSWALVHSRQTEDVQRGIAMLEASLESSAPPLEDREKLYLLAVGYYRSGNYSRSRQLVDRCIEMQADWRQALVLKKTFEDKITKDGVIGIGITATAFGAVGLIAGGIVAAMSRKK

SEQ ID NO: 38662 - protein, 96 aa, Zea mays subsp. mays
MLEASLESSAPPLEDREKLYLLAVGYYRSGNYSRSRQLVDRCIEMQADWRQALVLKKTFEDKITKDGVIGIGITATAFGAVGLIAGGIVAAMSRKK

SEQ ID NO: 38663 - DNA, 705 bp, Zea mays subsp. mays
gaagagatcagaagaaaccaaagtttggatctttttatagttttcttccaagttttgtttttgttttttcttttgttggagtttccttcttcatatagctataaccatatagctagccatggatatgttttcttctcattccttgtcctataagctaagctctttgtctactgaagcaagtgcctcttctggtaacaacacactcagtaccatccaagaattcagtggctttcacaatgtgatttctagtgtttgtacacacacagagactcacaagcctaagaaaaagagaggccttcctggaaatcctgatccagatgcagaagtgatcgcattatcaccaaagacacttcttgcaacaaacagattcgtttgtgagatatgcaacaaagggtttcaaagagatcagaatctacagcttcacaggagaggccacaatcttccatggaagctgaaacagaagaacaccaaagaacaacaaaagaagaaagtctacgtgtgcccagagacaaactgtgctcatcaccatccatctagagctcttggggatctcacagggatcaagaaacacttttgcaggaaacatggagagaagaaatggaaatgtgaaaagtgttcaaagttctatgctgttcaatctgattggaaagctcataccaagatctgtggtactagagattatagatgtgactgcggcactctttt

SEQ ID NO: 38664 - protein, 195 aa, Zea mays subsp. mays
MDMFSSHSLSYKLSSLSTEASASSGNNTLSTIQEFSGFHNVISSVCTHTETHKPKKKRGLPGNPDPDAEVIALSPKTLLATNRFVCEICNKGFQRDQNLQLHRRGHNLPWKLKQKNTKEQQKKKVYVCPETNCAHHHPSRALGDLTGIKKHFCRKHGEKKWKCEKCSKFYAVQSDWKAHTKICGTRDYRCDCGTL

SEQ ID NO: 38665 - protein, 193 aa, Zea mays subsp. mays
MFSSHSLSYKLSSLSTEASASSGNNTLSTIQEFSGFHNVISSVCTHTETHKPKKKRGLPGNPDPDAEVIALSPKTLLATNRFVCEICNKGFQRDQNLQLHRRGHNLPWKLKQKNTKEQQKKKVYVCPETNCAHHHPSRALGDLTGIKKHFCRKHGEKKWKCEKCSKFYAVQSDWKAHTKICGTRDYRCDCGTL

SEQ ID NO: 38666 - DNA, 2286 bp, Zea mays subsp. mays
agtatctggaaaatctcaatggtatctttaacctacgctttgtcagcgagccagataacggtatctacgacgccatgaacaaaggcattgcgatggcacaaggcaagttcgcgttgtttctcaattcgggcgatatttttcatcagaatgccgcaaattttgtccgtaagttaaaaatgcaaaaagataacgtgatgatcaccggcgatgcgctgctggattttggcgacgggcataaaattaaacgtagcgccaaaccgggctggtatatttatcacagcctgcccgccagtcatcaggcgatatttttccctgtatccggcttgaaaaaatggcgttatgacctggaatataaagtttcttccgactacgcgctggcagccaaaatgtataaagccggttatgcatttaaaaaactcaatggcctggtgtctgaattttccatgggtggggtatctaccaccaataatatggaattgtgtgctgacgcgaaaaaagtccaacgacaaatattacatgtgcctggcttttgggctgaattatcctggcatttacgccaacgtactacctcaaagacgaaagccttatataacaaagtctgaatataaggaaaaccaatgcaagatttaagcggtttctcggtgccgaaagggttccggggcggcaacgctattaaagtgcaattatggtgggcagtacaggcaacaatatttgcctggtcgccacaagtattgtatcgctggcgggcttttttattacgtttattcggagcaaaaataggaaaaaacgtagttattcgtccgtcagtaaaaattacctatccgtggaaattaaccttaggtgattacgcgtgggtcggcgatgacgtcaatttatataccctcggtgaaataaccattggcgcacattcggtgatatcgcaaaaaagttatttatgcaccggtagccacgaccatgcaagtcaacatttcaccattaacgccacgcctattgtgattggcgagaaatgctggctggcaaccgatgtctttgttgccccaggcgtcacaatcggcgacggcaccgtcgtgggtgcacgaagcagtgtttttaaatcgcttccggcaaatgtggtttgccgggggaatcccgcagtggtgatacgcgaacgcgttgaaactgaataaattcaaaaatacagaggaataatacatgtcaaaagtcgctctcatcaccggtgtaaccggacaagacggttcttacctggcagagtttctgctggaaaaaggttacgaggtgcatggtattaagcgtcgcgcatcgtcattcaacaccgagcgcgtggatcacatttatcaggatccgcacacctgcaacccgaaattccatctgcattatggcgacctgagtgatacctctaacctgacgcgcattttgcgtgaagtacagccggatgaagtgtacaacctgggcgcaatgagccacgttgcggtctcttttgagtcaccagaatataccgctgacgtcgacgcgatgggtacgctgcgcctgctggaggcgatccgcttcctcggtctggaaaagaaaactcgtttctatcaggcttccacctctgaactgtatggtctggtgcaggaaattccgcagaaagagaccacgccgttctacccgcgatctccgtatgcggtcgccaaactgtacgcctactggatcaccgttaactaccgtgaatcctacggcatgtacgcctgtaacggaattctcttcaaccatgaatccccgcgccgcggcgaaaccttcgttacccgcaaaatcacccgcgcaatcgccaacatcgcccaggggctggagtcgtgcctgtacctcggcaatatggattccctgcgtgactggggccacgccaaagactacgtaaaaatgcagtggatgatgctgcagctggaacagccggaagatttcgttatcgcgaccggcgttcagtactccgtgcgtcagttcgtggaaatggcggcagcacagctgggcatcaaactgcgctttgaaggcacgggcgttgaagagaagggcattgtggtttccgtcaccgggcatgacgcgccgggcgttaaaccgggtgatgtgattatcgctgttgacccgcgttacttccgtccggctgaagttgaaacgctgctcggcgacccgaccaaagcgcacgaaaaactgggctggaaaccggaaatcaccctcagagagatggtgtctgaaatggtggctaatgacctcgaagcggcgaaaaaacactctctgctggggggggcccggtac

SEQ ID NO: 38667 - protein, 365 aa, Zea mays subsp. mays
MSKVALITGVTGQDGSYLAEFLLEKGYEVHGIKRRASSFNTERVDHIYQDPHTCNPKFHLHYGDLSDTSNLTRILREVQPDEVYNLGAMSHVAVSFESPEYTADVDAMGTLRLLEAIRFLGLEKKTRFYQASTSELYGLVQEIPQKETTPFYPRSPYAVAKLYAYWITVNYRESYGMYACNGILFNHESPRRGETFVTRKITRAIANIAQGLESCLYLGNMDSLRDWGHAKDYVKMQWMMLQLEQPEDFVIATGVQYSVRQFVEMAAAQLGIKLRFEGTGVEEKGIVVSVTGHDAPGVKPGDVIIAVDPRYFRPAEVETLLGDPTKAHEKLGWKPEITLREMVSEMVANDLEAAKKHSLLGGARY

SEQ ID NO: 38668 - protein, 277 aa, Zea mays subsp. mays
MSHVAVSFESPEYTADVDAMGTLRLLEAIRFLGLEKKTRFYQASTSELYGLVQEIPQKETTPFYPRSPYAVAKLYAYWITVNYRESYGMYACNGILFNHESPRRGETFVTRKITRAIANIAQGLESCLYLGNMDSLRDWGHAKDYVKMQWMMLQLEQPEDFVIATGVQYSVRQFVEMAAAQLGIKLRFEGTGVEEKGIVVSVTGHDAPGVKPGDVIIAVDPRYFRPAEVETLLGDPTKAHEKLGWKPEITLREMVSEMVANDLEAAKKHSLLGGARY

SEQ ID NO: 38669 - protein, 258 aa, Zea mays subsp. mays
MGTLRLLEAIRFLGLEKKTRFYQASTSELYGLVQEIPQKETTPFYPRSPYAVAKLYAYWITVNYRESYGMYACNGILFNHESPRRGETFVTRKITRAIANIAQGLESCLYLGNMDSLRDWGHAKDYVKMQWMMLQLEQPEDFVIATGVQYSVRQFVEMAAAQLGIKLRFEGTGVEEKGIVVSVTGHDAPGVKPGDVIIAVDPRYFRPAEVETLLGDPTKAHEKLGWKPEITLREMVSEMVANDLEAAKKHSLLGGARY

SEQ ID NO: 38670 - DNA, 442 bp, Zea mays subsp. mays
gcttggaaacttccttctcatcagaaagaagaagataaaaaggttggttgttgttgcatcgatctccaaatccagattgattcgtcacgaaatctgctcaccggttgtttcgtcgccgtcctctgttcacccaacgaagatgaacggcggtccctccggtttccataatgctccggtaacgaaagccttcgttattacgagcgctcttttcactgtcttcttcgggatccaaggtcgttcttctaagctcggtttgtcttaccaggacatttttgagaaatttcggatatggaagttaatcatgtccacttttgccttctcctccacaccagaattgatgttcggattgtatttgctatactacttccgagtttttgagagacagattggctcaaataagtactcggtttttatcttgttctcagggactgtatctctatta

SEQ ID NO: 38671 - protein, 147 aa, Zea mays subsp. mays
LGNFLLIRKKKIKRLVVVASISKSRLIRHEICSPVVSSPSSVHPTKMNGGPSGFHNAPVTKAFVITSALFTVFFGIQGRSSKLGLSYQDIFEKFRIWKLIMSTFAFSSTPELMFGLYLLYYFRVFERQIGSNKYSVFILFSGTVSLL

SEQ ID NO: 38672 - protein, 101 aa, Zea mays subsp. mays
MNGGPSGFHNAPVTKAFVITSALFTVFFGIQGRSSKLGLSYQDIFEKFRIWKLIMSTFAFSSTPELMFGLYLLYYFRVFERQIGSNKYSVFILFSGTVSLL

SEQ ID NO: 38673 - DNA, 1223 bp, Zea mays subsp. mays
gacaaaccaatctaaacatcaaagacaaaaaccaaacctctttcactattacacttttcctcaaaaaaaagaacaatgtattcgttagtgtttaaactctttctatttttgtctcttcttcaaatctctgtctctgctagaaacctagcttcacaagaaccaaaccagtttcaactactcaagtaccacaaaggagctcttctctccggcaaaatctccgttaacctaatctggtacggcaaattcaaaccatctcaaagagcaatcatctccgacttcattacctcactcacacacacttctcctacgtccaaaactctccaccaaccatctgttgccacgtggtggaaaaccacagaaaaatactacaaactcgcaacacccagcaaaaactcatcacctctgtctctaactctcgggaaacaaatcatcgacgagtcttgctctctaggaaaatctttaaccgataaaaagattcaaaccctagcttcgaaaggagaccaacgcaacgccatcaacgtcgttttgacctcagctgacgttacggttacaggatttggtatgagtcgttgcgggactcacggacacgctcgtggtttaggtaaacgtggctccaagtttgcttacatttgggttggaaactctgagacacaatgtcctggtcaatgcgcgtggcctttccacgcgccggtgtacggtccacagagtccaccactagtggcaccaaacaatgacgtgggactcgatgggatggttattaacttagctagtcttttagctggaaccgcaacgaacccttttggtaatggttactatcaaggtccacaaaacgcaccgcttgaagctgcttctgcttgtcctggcgtttatggtaaaggagcttatcctggttacgctggagatttgcttgtggatactacaacgggaggtagttttaatgcgtatggtgcaaacggcaggaagtttttgcttcctgctttgtatgatcctacgacgtcggcttgctctactatggtctgaatactaaaaaaaagtccaatgtttggtctttggtagtagaaaataatattctagcgtaattcttttgttatgtttggttacaaattctagtataattcaatttattcattaatattattctcatttttcccttcatgttgtatgactgaaatcttgtcgcttggactataatttaacggaatattattaagacactttggctc

SEQ ID NO: 38674 - protein, 314 aa, Zea mays subsp. mays
MYSLVFKLFLFLSLLQISVSARNLASQEPNQFQLLKYHKGALLSGKISVNLIWYGKFKPSQRAIISDFITSLTHTSPTSKTLHQPSVATWWKTTEKYYKLATPSKNSSPLSLTLGKQIIDESCSLGKSLTDKKIQTLASKGDQRNAINVVLTSADVTVTGFGMSRCGTHGHARGLGKRGSKFAYIWVGNSETQCPGQCAWPFHAPVYGPQSPPLVAPNNDVGLDGMVINLASLLAGTATNPFGNGYYQGPQNAPLEAASACPGVYGKGAYPGYAGDLLVDTTTGGSFNAYGANGRKFLLPALYDPTTSACSTMV

SEQ ID NO: 38675 - DNA, 1112 bp, Zea mays subsp. mays
aaaaaaaccgcaacaaatcaaaacgagccgcaatcgcagcgcagaggcaaagccgtccatctctctcaacgccgccgccgccgccccgccccgccccagaccctaccctccacctccagtccctcgtcccagcgcgaccgattctcctcgatccagcactgatccggcggcttcccggcccggccatggatttgctggcgtccttggccgccgaggagcggtggctgttcccgttgttcctcgccatgtacgccgccatctactgcgtgggccagctcctcgtgttccggcggtgggcgccgcggcagcggctggacggcgccagctgcctgatctcgctcttccacggcacccccgcggcgctggccgccgcgggggccatcctcgcgctgcccgcggggtcccggtccttcgccgcgcccaacgcgcgcctccaggaccacgtcctcgactacagcgtcgcctacttcaccatggacctgctccactacctcgccttcctgcccggggacgtgctcttcatcgcgcaccacctggccacgctcttcgtcttcctcacctgccgctacctcgtccggcacggcgcatacgcgctcctcgtcctcctccttctcgccgaggttaccagcctgctgcagaacgtctggacgctcgcggggatctggcgggaccagtcccccgccgccgcgcgcgtctacggtgccctctcgccgcccttctacgcgctctacacgctcgtcaggggcgtcgccggcccgctcttcctcctcaagatggccgccttctacctgtccggccaggccgtcgacgtcatcccgtggtgggtgcggatctcctggatcctcgttgtcggcaccgccattgccgtcagcaacctgtggatttggaacctctggaaggagctcgtcagggaatggaagcaagccccttccaagtcaaagaaagacacataggctgccacctcattctaaccacagtaccgtaccatgtacgggtgtacgaaccatatgtagcttcttaatctttccaaatacatccgagccagatgatgcagactgatgatatgctaaaagccaatttccgttgacaattggtggaggatgcttatctgg

SEQ ID NO: 38676 - protein, 339 aa, Zea mays subsp. mays
KKPQQIKTSRNRSAEAKPSISLNAAAAAPPRPRPYPPPPVPRPSATDSPRSSTDPAASRPGHGFAGVLGRRGAVAVPVVPRHVRRHLLRGPAPRVPAVGAAAAAGRRQLPDLALPRHPRGAGRRGGHPRAARGVPVLRRAQRAPPGPRPRLQRRLLHHGPAPLPRLPARGRALHRAPPGHALRLPHLPLPRPARRIRAPRPPPSRRGYQPAAERLDARGDLAGPVPRRRARLRCPLAALLRALHARQGRRRPALPPQDGRLLPVRPGRRRHPVVGADLLDPRCRHRHCRQQPVDLEPLEGARQGMEASPFQVKERHIGCHLILTTVPYHVRVYEPYVAS

SEQ ID NO: 38677 - protein, 316 aa, Zea mays subsp. mays
KNRNKSKRAAIAAQRQSRPSLSTPPPPPRPAPDPTLHLQSLVPARPILLDPALIRRLPGPAMDLLASLAAEERWLFPLFLAMYAAIYCVGQLLVFRRWAPRQRLDGASCLISLFHGTPAALAAAGAILALPAGSRSFAAPNARLQDHVLDYSVAYFTMDLLHYLAFLPGDVLFIAHHLATLFVFLTCRYLVRHGAYALLVLLLLAEVTSLLQNVWTLAGIWRDQSPAAARVYGALSPPFYALYTLVRGVAGPLFLLKMAAFYLSGQAVDVIPWWVRISWILVVGTAIAVSNLWIWNLWKELVREWKQAPSKSKKDT

SEQ ID NO: 38678 - protein, 255 aa, Zea mays subsp. mays
MDLLASLAAEERWLFPLFLAMYAAIYCVGQLLVFRRWAPRQRLDGASCLISLFHGTPAALAAAGAILALPAGSRSFAAPNARLQDHVLDYSVAYFTMDLLHYLAFLPGDVLFIAHHLATLFVFLTCRYLVRHGAYALLVLLLLAEVTSLLQNVWTLAGIWRDQSPAAARVYGALSPPFYALYTLVRGVAGPLFLLKMAAFYLSGQAVDVIPWWVRISWILVVGTAIAVSNLWIWNLWKELVREWKQAPSKSKKDT

SEQ ID NO: 38679 - DNA, 609 bp, Zea mays subsp. mays
ctcgcacctcgcccattcgcttcaccaagggtttaagaccggcggcgatggcggcgaagctggcgcagctgcgcacacaggtaacgcgtgcggcggagttcgcctcgaagcacggctgctcctactacaaggaggtaatggagaagaacaagcagtacgtcgttcagccccccaccgtcgagaagtgccaggagctctccaagcagctcttttacacccgcctcgcaagcctaccaggtcgctatgagtcattctggaaggagcttgattgtgtcaagcaggtatggaagaacaggaaggacctcacggttgaggaccttggcattgccagtttgtttggagttgagctctatgcatggttctgcgtaggcgagattgtcggcagaggtttcaccttgaccggctataaggtctagatgatttccactggtcaagacctgctttataattgatactcttagctgatgcttgtcgaaacgacgacgatggtacctgccttggttcacaattttgtttctttgtaagagtttacctagtgctgaatgccagcaaagacgggcacatcgttgcaacattgcctcaataatttgctcgctcaattgttgattt

SEQ ID NO: 38680 - protein, 137 aa, Zea mays subsp. mays
RTSPIRFTKGLRPAAMAAKLAQLRTQVTRAAEFASKHGCSYYKEVMEKNKQYVVQPPTVEKCQELSKQLFYTRLASLPGRYESFWKELDCVKQVWKNRKDLTVEDLGIASLFGVELYAWFCVGEIVGRGFTLTGYKV

SEQ ID NO: 38681 - protein, 122 aa, Zea mays subsp. mays
MAAKLAQLRTQVTRAAEFASKHGCSYYKEVMEKNKQYVVQPPTVEKCQELSKQLFYTRLASLPGRYESFWKELDCVKQVWKNRKDLTVEDLGIASLFGVELYAWFCVGEIVGRGFTLTGYKV

SEQ ID NO: 38682 - protein, 92 aa, Zea mays subsp. mays
MEKNKQYVVQPPTVEKCQELSKQLFYTRLASLPGRYESFWKELDCVKQVWKNRKDLTVEDLGIASLFGVELYAWFCVGEIVGRGFTLTGYKV

SEQ ID NO: 38683 - DNA, 818 bp, Zea mays subsp. mays
aaatcgtacaaacaccgtttctatacaggccaaggcgacaagcttcgtccagctctgcatcaaagaaggaaggaagttatggaccgcacctactacaagggcggcatcaaggcgtactggaagcgccggggctactaccgcatcgacgccaccgccgcgcagcgccgcccgccgttccccaccgcggagctcggaggtggcgtgggcgtcgcccaggcccagccgccgcaggcgccgccgccggagggtggctcgggccggcgccgttgccgcgggtggcgcgtgcgctgcggccagctgcggcggcggctgctccgcgcgctgtcgccgcgccggtggctcgtgcggctccgcgacgcgtacgtgtccgccatgctgcggctggcgtcctcccccgccgtcgggtacggcgccggcgcgccctactgcggcacggcggccttcgcgcggccggcgcagctcaaggagtacgaacagaaggtgctggtggagatctacaggtccatactcgcgggcggcgggcctggccccatcgccgtcactaccggcagcaacggcgccggtgcgcctgccgccgccacactacggctaccgacggctgctgcttgagcttgagcggcagatgaagcatgtatttattcttcttgcttttactctttatgtcgcgacgttgtaacttcggtgcgcctcacaagcatttcatttcttcttcgtaaattaaggttcctctgaccatggtgtgaaaatgtttgatgaagagggtcattagcatctctacttgctagcaaggcaagatttagtattgattagccgtacac

SEQ ID NO: 38684 - protein, 224 aa, Zea mays subsp. mays
NRTNTVSIQAKATSFVQLCIKEGRKLWTAPTTRAASRRTGSAGATTASTPPPRSAARRSPPRSSEVAWASPRPSRRRRRRRRVARAGAVAAGGACAAASCGGGCSARCRRAGGSCGSATRTCPPCCGWRPPPPSGTAPARPTAARRPSRGRRSSRSTNRRCWWRSTGPYSRAAGLAPSPSLPAATAPVRLPPPHYGYRRLLLELERQMKHVFILLAFTLYVATL

SEQ ID NO: 38685 - protein, 207 aa, Zea mays subsp. mays
IVQTPFLYRPRRQASSSSASKKEGSYGPHLLQGRHQGVLEAPGLLPHRRHRRAAPPAVPHRGARRWRGRRPGPAAAGAAAGGWLGPAPLPRVARALRPAAAAAAPRAVAAPVARAAPRRVRVRHAAAGVLPRRRVRRRRALLRHGGLRAAGAAQGVRTEGAGGDLQVHTRGRRAWPHRRHYRQQRRRCACRRHTTATDGCCLSLSGR

SEQ ID NO: 38686 - protein, 202 aa, Zea mays subsp. mays
KSYKHRFYTGQGDKLRPALHQRRKEVMDRTYYKGGIKAYWKRRGYYRIDATAAQRRPPFPTAELGGGVGVAQAQPPQAPPPEGGSGRRRCRGWRVRCGQLRRRLLRALSPRRWLVRLRDAYVSAMLRLASSPAVGYGAGAPYCGTAAFARPAQLKEYEQKVLVEIYRSILAGGGPGPIAVTTGSNGAGAPAAATLRLPTAAA

SEQ ID NO: 38687 - protein, 176 aa, Zea mays subsp. mays
MDRTYYKGGIKAYWKRRGYYRIDATAAQRRPPFPTAELGGGVGVAQAQPPQAPPPEGGSGRRRCRGWRVRCGQLRRRLLRALSPRRWLVRLRDAYVSAMLRLASSPAVGYGAGAPYCGTAAFARPAQLKEYEQKVLVEIYRSILAGGGPGPIAVTTGSNGAGAPAAATLRLPTAAA

SEQ ID NO: 38688 - DNA, 1277 bp, Zea mays subsp. mays
gatatattcttctccttgtccttccttactctctatatttttctcaattctccgatttgatccaacgatttcacagatctctgatctaaatggcatccaacggtgataaaggactgatcgttagcttcggcgagatgctaatcgattttgtccctaccgaatcaggcgtctctctcgccgaagctcctggattcctcaaagctccaagcggtgctcccgctaacgttgcaatcgctgtttctcgtctcggtggacgatctgctttcgtcggaaaacttggagacgacgagttcggtcatatgttggctgggattttgaggaagaacggtgttgatgatcaggggattaacttcgatactggagctagaactgctttagctttcgttacgttacgtgctgatggagatcgtgagtttatgttttaccgcaatcctagcgccgatatgcttcttcgtcctgatgaactcaatctcgacctcatcagatccgcgaaagtgtttcactatggatcaataagtttgatagtggagccgtgtaggtcagctcatttgaaggccatggaagtggcgaaagaagcaggagctcttctttcctatgacccaaacctcagggagcctctgtggccatcaaaagaagaagccaaaacacagatcatgagcatttgggacaaagctgagatcatcaaggtgagcgatgttgagcttgagtttctaactggaagcaacaagattgatgatgagaccgcgttgaccttgtggcatcccaacttgaagctgttgttagtcactcttggtgaaaagggctgtcggtattacaccaagactttcaaaggagccgttgaccctttccatgtgaacgctgtggacacaaccggagctggagattcctttatcggtgctcttctaaaccagattgtcgatgatcgatccgttctcgaggacgaagagagattgaggaaagtgctgagattcgcaaatgcttgtggagcaatcacaacgaccaaaaaaggagccattccagctcttccctcagatgctgaagttcggagctttctcgaaaagaaatagaaacaaaacaactcaagcttctattacgtaatctgtttccgcgattatcttctctttttgtattcttgttttcggatggttgaatcgagaagagaaacaaattcggcattccgctctgtttttgtttctcttcttcaaatgtaatgatttagaaaagacgtatgttgcaatttaaggcatcacttgctaataaaatgataaggtttttcc

SEQ ID NO: 38689 - protein, 325 aa, Zea mays subsp. mays
MASNGDKGLIVSFGEMLIDFVPTESGVSLAEAPGFLKAPSGAPANVAIAVSRLGGRSAFVGKLGDDEFGHMLAGILRKNGVDDQGINFDTGARTALAFVTLRADGDREFMFYRNPSADMLLRPDELNLDLIRSAKVFHYGSISLIVEPCRSAHLKAMEVAKEAGALLSYDPNLREPLWPSKEEAKTQIMSIWDKAEIIKVSDVELEFLTGSNKIDDETALTLWHPNLKLLLVTLGEKGCRYYTKTFKGAVDPFHVNAVDTTGAGDSFIGALLNQIVDDRSVLEDEERLRKVLRFANACGAITTTKKGAIPALPSDAEVRSFLEKK

SEQ ID NO: 38690 - protein, 310 aa, Zea mays subsp. mays
MLIDFVPTESGVSLAEAPGFLKAPSGAPANVAIAVSRLGGRSAFVGKLGDDEFGHMLAGILRKNGVDDQGINFDTGARTALAFVTLRADGDREFMFYRNPSADMLLRPDELNLDLIRSAKVFHYGSISLIVEPCRSAHLKAMEVAKEAGALLSYDPNLREPLWPSKEEAKTQIMSIWDKAEIIKVSDVELEFLTGSNKIDDETALTLWHPNLKLLLVTLGEKGCRYYTKTFKGAVDPFHVNAVDTTGAGDSFIGALLNQIVDDRSVLEDEERLRKVLRFANACGAITTTKKGAIPALPSDAEVRSFLEKK

SEQ ID NO: 38691 - protein, 255 aa, Zea mays subsp. mays
MLAGILRKNGVDDQGINFDTGARTALAFVTLRADGDREFMFYRNPSADMLLRPDELNLDLIRSAKVFHYGSISLIVEPCRSAHLKAMEVAKEAGALLSYDPNLREPLWPSKEEAKTQIMSIWDKAEIIKVSDVELEFLTGSNKIDDETALTLWHPNLKLLLVTLGEKGCRYYTKTFKGAVDPFHVNAVDTTGAGDSFIGALLNQIVDDRSVLEDEERLRKVLRFANACGAITTTKKGAIPALPSDAEVRSFLEKK

SEQ ID NO: 38692 - DNA, 1222 bp, Zea mays subsp. mays
cccctctcggcccggctcgatggggtccggcgtgtcgtcgagcatggcgctggcgctggcgggcttctgcttcagcgtcctcttcatcgtcttcgtctgcacgcgcctcgcctgcgcgctcgtccgccggcgccggcgccaggcccgcgcccgcctcgcggccgccccgccgctcccgcactacgcccacggctacgccgaccccgaccctttcccgtcgttccgcgccgcccgccaccaccaccacgccccgggcctcgatcccgccgccttccccacccgcgcctacgccgccgcacaagcctccgactccgacgacggctcccagtgcgtcatctgtctggcggaatacgaagagggagacgagctccgcgtgctgcctccctgcagccacaccttccacacgggctgtatcagcctgtggctggcgcagaactcgacgtgcccggtctgtagagtctcgctgctcgtgcctgatactagtactacccctgaaagcgaacactctgcaccccatcctcctcctcctcctcatcatcatcatcatctgtccagcatagtgataataagcccaccaagctcccccgaaccgtcgagatcggacccgtgccgatgcctgttcgccagcggtggtgggcactcgtcaagggcggcagaggctcctcctcctcctcctcctcccagacacgagcccgaccaggtcgtatctggtccaccaccggcagcagatggggctagcggctacagctcgccgttgcctgaagttattcaccccgctcctgctcctgaaaccaacgggcagacagtacggaagcaggcgggcagcagatctactaccccgctaggcccctgcaaatagcggccgctcactctgtgtgggtgggtggggtgaacaggtggtgcgtggtaaaagcgaagtagagagaaacaagcgacttgaagaggcctgggttcgttcgtgtacatacgatcgagaaatcgtttcaggtcattcattcatccattcattcatccatgggcacatactgtggtattacggagtattacggtgtacgtgtagtgtgccgcaggagagacgacgcgacggcagcagtgcgttttccatatgcgacgggacgggagcattcgaggagatgatggcaatggcatggttttgtgtactgtacggtaacatttgtcgctgggaattaataataaaaaacccgtggctggctgatgcagc

SEQ ID NO: 38693 - protein, 285 aa, Zea mays subsp. mays
PSRPGSMGSGVSSSMALALAGFCFSVLFIVFVCTRLACALVRRRRRQARARLAAAPPLPHYAHGYADPDPFPSFRAARHHHHAPGLDPAAFPTRAYAAAQASDSDDGSQCVICLAEYEEGDELRVLPPCSHTFHTGCISLWLAQNSTCPVCRVSLLVPDTSTTPESEHSAPHPPPPPHHHHHLSSIVIISPPSSPEPSRSDPCRCLFASGGGHSSRAAEAPPPPPPPRHEPDQVVSGPPPAADGASGYSSPLPEVIHPAPAPETNGQTVRKQAGSRSTTPLGPCK

SEQ ID NO: 38694 - protein, 279 aa, Zea mays subsp. mays
MGSGVSSSMALALAGFCFSVLFIVFVCTRLACALVRRRRRQARARLAAAPPLPHYAHGYADPDPFPSFRAARHHHHAPGLDPAAFPTRAYAAAQASDSDDGSQCVICLAEYEEGDELRVLPPCSHTFHTGCISLWLAQNSTCPVCRVSLLVPDTSTTPESEHSAPHPPPPPHHHHHLSSIVIISPPSSPEPSRSDPCRCLFASGGGHSSRAAEAPPPPPPPRHEPDQVVSGPPPAADGASGYSSPLPEVIHPAPAPETNGQTVRKQAGSRSTTPLGPCK

SEQ ID NO: 38695 - protein, 271 aa, Zea mays subsp. mays
MALALAGFCFSVLFIVFVCTRLACALVRRRRRQARARLAAAPPLPHYAHGYADPDPFPSFRAARHHHHAPGLDPAAFPTRAYAAAQASDSDDGSQCVICLAEYEEGDELRVLPPCSHTFHTGCISLWLAQNSTCPVCRVSLLVPDTSTTPESEHSAPHPPPPPHHHHHLSSIVIISPPSSPEPSRSDPCRCLFASGGGHSSRAAEAPPPPPPPRHEPDQVVSGPPPAADGASGYSSPLPEVIHPAPAPETNGQTVRKQAGSRSTTPLGPCK

SEQ ID NO: 38696 - DNA, 1302 bp, Zea mays subsp. mays
acctgaatccgccgtagcacctgtcgtggtagagactgtcgccgttgctgaggcagagccagtggagccggaagaagtctcgatctggggagttccactactccaagacgagagatctgacgtgatcctcacgaaattcctccgtgcaagagactttaaggtcaaagaagctttaaccatgcttaaaaacaccgtccagtggcgtaaagaaaacaaaatcgacgaactcgttgaatccggagaagaagtgagtgagttcgagaagatggtgtttgctcacggtgttgacaaagaaggacacgtcgtgatctacagttcttacggtgagtttcagaacaaggagcttttctccgacaaggagaagcttaacaagttcctcagctggaggattcagctacaagagaagtgtgtgagagctattgatttcagcaaccctgaagcgaagtcttcgtttgtgttcgtcagcgacttcaggaacgctccaggacttggtaaaagagccttgtggcaattcatcagacgcgctgttaaacaattcgaggacaattatcctgaattcgccgctaaagagctattcatcaatgtcccatggtggtacattccatactacaaaacattcggatctatcatcacatccccaaggactaggagcaagatggtccttgctggtccatccaaatctgccgatactattttcaaatacatagctcctgaacaagttcccgttaaatacggtggacttagcaaagatactcctttgaccgaagaaaccataacggaagccatcgttaaaccggcagcaaactacactattgaattgcctgcttctgaggcttgcacgctttcatgggagcttagggttttgggtgctgatgtgagctacggagctcagtttgagccaaccaccgaaggaagctatgctgtgatcgtctctaagacacggaagattggatcaaccgatgaaccggtgataaccgattcttttaaggtgggtgaaccgggaaagattgtgatcacaatcgacaaccagacttccaagaagaagaaagtgctctacaggttcaaaactcaataaaaggtctgatctttgaaatccaaatccaaggaagaagcaaaaaaaatgttattttgttatttgggggaaacaaattttaattaattaatttagtttgttatttattatgtaattttgaaatctcaagatgtggttgtgtttttgctttgttttggtattgggggttgttttcgtgtgtggagaatatgtgattaaaattcaaaagaaagtaaagaacactttgtttc

SEQ ID NO: 38697 - protein, 357 aa, Zea mays subsp. mays
PESAVAPVVVETVAVAEAEPVEPEEVSIWGVPLLQDERSDVILTKFLRARDFKVKEALTMLKNTVQWRKENKIDELVESGEEVSEFEKMVFAHGVDKEGHVVIYSSYGEFQNKELFSDKEKLNKFLSWRIQLQEKCVRAIDFSNPEAKSSFVFVSDFRNAPGLGKRALWQFIRRAVKQFEDNYPEFAAKELFINVPWWYIPYYKTFGSIITSPRTRSKMVLAGPSKSADTIFKYIAPEQVPVKYGGLSKDTPLTEETITEAIVKPAANYTIELPASEACTLSWELRVLGADVSYGAQFEPTTEGSYAVIVSKTRKIGSTDEPVITDSFKVGEPGKIVITIDNQTSKKKKVLYRFKTQ

SEQ ID NO: 38698 - protein, 298 aa, Zea mays subsp. mays; identical to SEQ ID NO: 5916

SEQ ID NO: 38699 - protein, 269 aa, Zea mays subsp. mays
MVFAHGVDKEGHVVIYSSYGEFQNKELFSDKEKLNKFLSWRIQLQEKCVRAIDFSNPEAKSSFVFVSDFRNAPGLGKRALWQFIRRAVKQFEDNYPEFAAKELFINVPWWYIPYYKTFGSIITSPRTRSKMVLAGPSKSADTIFKYIAPEQVPVKYGGLSKDTPLTEETITEAIVKPAANYTIELPASEACTLSWELRVLGADVSYGAQFEPTTEGSYAVIVSKTRKIGSTDEPVITDSFKVGEPGKIVITIDNQTSKKKKVLYRFKTQ

SEQ ID NO: 38700 - DNA, 743 bp, Zea mays subsp. mays
aaggtttaatgtcattagacgactttgacgatgctgaaggcggctccaagctggaacgattctcacgggagacgctggatccatcattgtcatggaaggacgtggagtggctcaagtccatcaccagcctgccgattctgctcaagggcatcgtcaccgcggaagacgcgaggaaggccgtggaggcgtgggcggccggcttgatcgtgtccaaccacggcgcccggcagctggactatgcgccggccaccatctcggcgctcgaagaggtggttaaggcggtggcgggggctgtgccggtgctggtggacggcggcgtccggcgcggcaccgacgtgttgaaggcgctggcgctcggcgccaaggcagtcatggtgggcaggccggtgttctttgggctggcggcgcgcggggaagccggcgcgaggcacgtgatcgagatgttgaacaaggagctggagttggccatggcgctctgcggctgccgtagcgtcgcggaggtcaccagggcgcacgtccagaccgagggcgaccggatcagggccctgctgtgacttataaataagcgaccatatccgaggccgaccaccgtgctgtctgggttgcgatatgatttatatgatacgtgagggcatgtgatcgattgttgcctccacacagataagcttactattgccagagcctgggctggactatgctttcagtgattatctaaatcaaatagactgaatgctaaagggaac

SEQ ID NO: 38701 - protein, 183 aa, Zea mays subsp. mays
GLMSLDDFDDAEGGSKLERFSRETLDPSLSWKDVEWLKSITSLPILLKGIVTAEDARKAVEAWAAGLIVSNHGARQLDYAPATISALEEVVKAVAGAVPVLVDGGVRRGTDVLKALALGAKAVMVGRPVFFGLAARGEAGARHVIEMLNKELELAMALCGCRSVAEVTRAHVQTEGDRIRALL

SEQ ID NO: 38702 - protein, 181 aa, Zea mays subsp. mays
MSLDDFDDAEGGSKLERFSRETLDPSLSWKDVEWLKSITSLPILLKGIVTAEDARKAVEAWAAGLIVSNHGARQLDYAPATISALEEVVKAVAGAVPVLVDGGVRRGTDVLKALALGAKAVMVGRPVFFGLAARGEAGARHVIEMLNKELELAMALCGCRSVAEVTRAHVQTEGDRIRALL

SEQ ID NO: 38703 - DNA, 1411 bp, Zea mays subsp. mays
ataaaaatgcctctgccttgcgtctctctcttcttcctccccaccccacgaggcgctagctgcggcacggaaccagcgccattagaggccacaagcccgcaccacgcctccctcgttctcgcgcgcgcgcacgcatgcacgaggagctgctgcagagaagaggaggcctgtcgatttgattgaactttccaaattcagattcagaagctggccaagatgactgccggtttccagctcggcgtgatcgggtctctcacgctctccgtcgcgtcgtcggttgccattgtcatctgcaacaaagccctcatcagcaccctaggctttccattcgctacgactctgacaagctggcacctgatggtgaccttctgcaccctccacgtggcgcagcgcctgcgctttttcgagcccaaggcgatcgacgggcagacggtagttctgtttggcttgctcaacgggacctcgattggccttctgaaccttagtttagggttcaactccatcggattctaccagatgacgaagttggccataatacccttcacggtgctgttggagactatattcctgaagaaaagattcagtgagacgatcaagttttctctgctggtcttgctgctcggagttggcatcgcctcagttacggacctcaagttaaactgcctcgggtccgttctttccggcctcgccatcgccaccacttgtgtcggccaaattctcacgaatacgatacagaggaagctgaaggtctcgtcaacgcagctcctgtaccagtcagcgccttaccaagcagccattctgttcgccactggccccttcgtggaccatctcctcaccggccgcagcgtcttcgcccatagatacactttcccggttgtgggcttcatcgtcctgtcgtgcttgatcgcggtgtcggtgaacttcagcacgttcctggtgatcgggacgacgtcgccggtgacgtaccaggtgctgggccacctcaagacgtgcctggtgctgtcgttcgggtacacgctgctgcacgatcctttcaccgtgcggaacatcctgggcatcctcgtcgccatcttcgggatggcgctctactccatcttctcggtgcgtgagggcaagaagaagtccgcaggcgacgccctcccggtgtcacagatgcctgacaaggagacggagccgctgttggcgaccaaggacaacagcgacaccaaaaaggcgaacggggttgctcacgactgctaagatgttcccgtttgccgttgcttatagcctaattagtccagctctagtgttactacgacgcactgttctgaatctcagaaagtcagggaagaagtcattcctttttgtttcttataatattgtatatgtaatattcctctattgcgaattataagccgtttcaatttttttg

SEQ ID NO: 38704 - protein, 340 aa, Zea mays subsp. mays
MTAGFQLGVIGSLTLSVASSVAIVICNKALISTLGFPFATTLTSWHLMVTFCTLHVAQRLRFFEPKAIDGQTVVLFGLLNGTSIGLLNLSLGFNSIGFYQMTKLAIIPFTVLLETIFLKKRFSETIKFSLLVLLLGVGIASVTDLKLNCLGSVLSGLAIATTCVGQILTNTIQRKLKVSSTQLLYQSAPYQAAILFATGPFVDHLLTGRSVFAHRYTFPVVGFIVLSCLIAVSVNFSTFLVIGTTSPVTYQVLGHLKTCLVLSFGYTLLHDPFTVRNILGILVAIFGMALYSIFSVREGKKKSAGDALPVSQMPDKETEPLLATKDNSDTKKANGVAHDC

SEQ ID NO: 38705 - protein, 293 aa, Zea mays subsp. mays
MVTFCTLHVAQRLRFFEPKAIDGQTVVLFGLLNGTSIGLLNLSLGFNSIGFYQMTKLAIIPFTVLLETIFLKKRFSETIKFSLLVLLLGVGIASVTDLKLNCLGSVLSGLAIATTCVGQILTNTIQRKLKVSSTQLLYQSAPYQAAILFATGPFVDHLLTGRSVFAHRYTFPVVGFIVLSCLIAVSVNFSTFLVIGTTSPVTYQVLGHLKTCLVLSFGYTLLHDPFTVRNILGILVAIFGMALYSIFSVREGKKKSAGDALPVSQMPDKETEPLLATKDNSDTKKANGVAHDC

SEQ ID NO: 38706 - protein, 240 aa, Zea mays subsp. mays
MTKLAIIPFTVLLETIFLKKRFSETIKFSLLVLLLGVGIASVTDLKLNCLGSVLSGLAIATTCVGQILTNTIQRKLKVSSTQLLYQSAPYQAAILFATGPFVDHLLTGRSVFAHRYTFPVVGFIVLSCLIAVSVNFSTFLVIGTTSPVTYQVLGHLKTCLVLSFGYTLLHDPFTVRNILGILVAIFGMALYSIFSVREGKKKSAGDALPVSQMPDKETEPLLATKDNSDTKKANGVAHDC

SEQ ID NO: 38707 - DNA, 1078 bp, Zea mays subsp. mays
gctgtcttgtccctccttatccctatctctctcccactcctcttcctctgcaatggcttcttcaatagtaacctcaagcttcaagcccttagccatggcagactcttcctcttccaccatcttctcccacccttcactctccaccatctcccctcgctgctccttcctcactaacctcccgctctcgttctcccgcgtctccctatctctcaaagccaaaaccaacctaaagaagtcgcctttcgtctccttcgttgctcagacttctgattgggagggggaagaaggtggggacgtgagcgcttccgtcgccgttgaggagaacgagccagaggcgacgttttccgaagaggaaggagatgtgagcgaaggaggtgacttcccggagccaccggaagaagcgaagctcttcgtcggaaacttggcgtacgacgttgatagccaagccttggctatgctctttgagcaagctggtaccgttgaaatcgctgaggttatctacaacagagagacagaccagagtcgtgggtttggatttgtgacaatgagtacggtggaggaagccgagactgctgttgagaagttcaaccgttatgatttgaacggacggcttctgacagtaaacaaggcagcaccaagaggatcacgtccagaacgccaacctcgggtatacgaacctgcattcagagtctatgttggaaacctaccatgggatgtggacaacggtcgtctagaacaagttttcagcgagcatggcaaagttgtggaagctcgtgtggtctacgaccgtgagacaggtcgttcacgtgggttcggttttgtgacaatgtctaacgagactgaactcaatgacgctatcgctgctcttgatggacagaacatggaaggtagagcaatcagagtgaatgtcgcggaggaacgtccaaggcgtggattttaaggattgagattttctcttgtgcctctctttatctctttccattttgtttagacgagattcttacactctttggtgatttttttttttgttctgtctgaactcttgcttcttctatagcacatcattgccttcagtagc

SEQ ID NO: 38708 - protein, 312 aa, Zea mays subsp. mays
LSCPSLSLSLSHSSSSAMASSIVTSSFKPLAMADSSSSTIFSHPSLSTISPRCSFLTNLPLSFSRVSLSLKAKTNLKKSPFVSFVAQTSDWEGEEGGDVSASVAVEENEPEATFSEEEGDVSEGGDFPEPPEEAKLFVGNLAYDVDSQALAMLFEQAGTVEIAEVIYNRETDQSRGFGFVTMSTVEEAETAVEKFNRYDLNGRLLTVNKAAPRGSRPERQPRVYEPAFRVYVGNLPWDVDNGRLEQVFSEHGKVVEARVVYDRETGRSRGFGFVTMSNETELNDAIAALDGQNMEGRAIRVNVAEERPRRGF

SEQ ID NO: 38709 - protein, 295 aa, Zea mays subsp. mays
MASSIVTSSFKPLAMADSSSSTIFSHPSLSTISPRCSFLTNLPLSFSRVSLSLKAKTNLKKSPFVSFVAQTSDWEGEEGGDVSASVAVEENEPEATFSEEEGDVSEGGDFPEPPEEAKLFVGNLAYDVDSQALAMLFEQAGTVEIAEVIYNRETDQSRGFGFVTMSTVEEAETAVEKFNRYDLNGRLLTVNKAAPRGSRPERQPRVYEPAFRVYVGNLPWDVDNGRLEQVFSEHGKVVEARVVYDRETGRSRGFGFVTMSNETELNDAIAALDGQNMEGRAIRVNVAEERPRRGF

SEQ ID NO: 38710 - protein, 281 aa, Zea mays subsp. mays
MADSSSSTIFSHPSLSTISPRCSFLTNLPLSFSRVSLSLKAKTNLKKSPFVSFVAQTSDWEGEEGGDVSASVAVEENEPEATFSEEEGDVSEGGDFPEPPEEAKLFVGNLAYDVDSQALAMLFEQAGTVEIAEVIYNRETDQSRGFGFVTMSTVEEAETAVEKFNRYDLNGRLLTVNKAAPRGSRPERQPRVYEPAFRVYVGNLPWDVDNGRLEQVFSEHGKVVEARVVYDRETGRSRGFGFVTMSNETELNDAIAALDGQNMEGRAIRVNVAEERPRRGF

SEQ ID NO: 38711 - DNA, 1041 bp, Zea mays subsp. mays
accgcctccattcctctctgctctgttctgctccaccaccctgatgacgacgaggccagacggcagcgcctccacgcccgcggacaagcagctcgtggcggcctccaacggcaacggcaacggcaacccgctggccgtccgcaaggcgccctccaaggaccggcacagcaaggtggacgggcgaggccggcgcatccgcatgcccatcatctgcgccgctcgcgtgttccagctcacgagggagctcgggcacaagtccgacggacagaccatcgagtggctgctcaggcaggccgagccctccatcatcgccgccaccggcaccggcaccacgccggcctccttctccacctcgtccccgtcatcgctccgctcctcctcgtcctccacagccggcgtccacccgcacgccgccccggcccaggggttctgggcgctgccggcgcgggccgacttcggacagctctggagcttcgcggccgcgccggagatgatggtcgccgcggctgcagcagcagcgccgggcatggccggggaggcgtccgccgccagggtcggcaactacctccccgtcgcgcagggcaacctcaacctgctggcctccttctccggcgggcctgctcccacagcggccgccggacgggccgaggaggagaccgcccgctaagggtcgtcaattcccagtctctctgtgtgtggctcaatccgggatagacagtgtcactctcacccaactctccatttctttttttggggttcagttcagatcagtgttggccacccgaattgggtggccttccactccatcccagtgagcaatcaagcaaggaggagctgcatcagctctccctcccgtcctatctatctatatgattttttttctttctttttgagcattggattagtgctctcaactacccacaagtgtttattagtcagccagctccttcagtgctactagcagctcagttcagtccatggtatgtgtccggattgtttgctgatgtgcttgttgatcaattaatggacataatggttgcg

SEQ ID NO: 38712 - protein, 237 aa, Zea mays subsp. mays
TASIPLCSVLLHHPDDDEARRQRLHARGQAARGGLQRQRQRQPAGRPQGALQGPAQQGGRARPAHPHAHHLRRSRVPAHEGARAQVRRTDHRVAAQAGRALHHRRHRHRHHAGLLLHLVPVIAPLLLVLHSRRPPARRPGPGVLGAAGAGRLRTALELRGRAGDDGRRGCSSSAGHGRGGVRRQGRQLPPRRAGQPQPAGLLLRRACSHSGRRTGRGGDRPLRVVNSQSLCVWLNPG

SEQ ID NO: 38713 - protein, 221 aa, Zea mays subsp. mays
PPPFLSALFCSTTLMTTRPDGSASTPADKQLVAASNGNGNGNPLAVRKAPSKDRHSKVDGRGRRIRMPIICAARVFQLTRELGHKSDGQTIEWLLRQAEPSIIAATGTGTTPASFSTSSPSSLRSSSSSTAGVHPHAAPAQGFWALPARADFGQLWSFAAAPEMMVAAAAAAAPGMAGEASAARVGNYLPVAQGNLNLLASFSGGPAPTAAAGRAEEETAR

SEQ ID NO: 38714 - protein, 207 aa, Zea mays subsp. mays
MTTRPDGSASTPADKQLVAASNGNGNGNPLAVRKAPSKDRHSKVDGRGRRIRMPIICAARVFQLTRELGHKSDGQTIEWLLRQAEPSIIAATGTGTTPASFSTSSPSSLRSSSSSTAGVHPHAAPAQGFWALPARADFGQLWSFAAAPEMMVAAAAAAAPGMAGEASAARVGNYLPVAQGNLNLLASFSGGPAPTAAAGRAEEETAR

SEQ ID NO: 38715 - DNA, 1202 bp, Zea mays subsp. mays
cccgaaggttctaggctcgattgaacaaattggagcggcactacactcctccacgcctccacctccagcctcccactgatctggcctctctcgagttaatcctagatcaatatgagaaggggctacagttacagtccttcaccaccaaggggctacaggagaagggcgcgcagtccaagtcctcatgatcattatggtggtcgtggtagggatctcccaaccagtcttctggtcaggaatctccgtcgggactgcaggccagaagacctccgtcgcccatttggacagtttggtcgagttaaagatatatatcttccaagagattattacactggacgcaacacaagcctaaaagattattgttgaagagaaggaagaaatagagaaattcaattaagtgatctgcaacttaaaagagtactcagtactgttcaagagatgggaagaaatagagttacaagtttaagagatactcacatcatgaagagtttcaagtctgaatttaaactctcatgagtgcaagggatccccgagggtttgggtttgtccagtattatgatcctgctgatgctgctgatgcgaagtactatatggatgggcaggtagttcttggtaggcaaataacagttgtttttgcagaagagaacagaaagaagcctcaagagatgagagctagggacagagtcaggggtcattcttatgatgacaggaggtattctcgctctaggtcgcctcgttattataggggccgctctccttcacgcagccaaagctactcgaggtctccacctcagaatccaagacacagacttagagagaggtcctactccggctcacctgtggacagcagatcaagaagtgggagcccttatgaggatggatatcgcaaatcatcacggagagagaggtctctttctgtcagcggatgaagcagttttacggtctagagctattgctgtgaatctgcgcatggtggcctacttgctatgtctttctgaaccatatatgttctgtctagattatcattcccagtaccagagaagtatcgtgagactgtttgctgtactttctagtcttgaggatacagaagggggtcaccgattctctcagtagatggactattgaccactagctacgccagttccactgctttgtgtatttacaggcagctttgcggtttgaataaaattgtttgcatcgtg

SEQ ID NO: 38716 - protein, 138 aa, Zea mays subsp. mays
MSARDPRGFGFVQYYDPADAADAKYYMDGQVVLGRQITVVFAEENRKKPQEMRARDRVRGHSYDDRRYSRSRSPRYYRGRSPSRSQSYSRSPPQNPRHRLRERSYSGSPVDSRSRSGSPYEDGYRKSSRRERSLSVSG

SEQ ID NO: 38717 - protein, 137 aa, Zea mays subsp. mays
MMTGGILALGRLVIIGAALLHAAKATRGLHLRIQDTDLERGPTPAHLWTADQEVGALMRMDIANHHGERGLFLSADEAVLRSRAIAVNLRMVAYLLCLSEPYMFCLDYHSQYQRSIVRLFAVLSSLEDTEGGHRFSQ

SEQ ID NO: 38718 - protein, 136 aa, Zea mays subsp. mays
MTGGILALGRLVIIGAALLHAAKATRGLHLRIQDTDLERGPTPAHLWTADQEVGALMRMDIANHHGERGLFLSADEAVLRSRAIAVNLRMVAYLLCLSEPYMFCLDYHSQYQRSIVRLFAVLSSLEDTEGGHRFSQ

SEQ ID NO: 38719 - DNA, 902 bp, Zea mays subsp. mays
catgtcaaaaggaactccttacactcagcagtcttacaaagttagtgaatcattcccctacaagtggatcaacaagaaatggaaagaaggttttcatgttacatcaatgacaactgcaggaagccgctggggtgtagttatgtcaaggaactctggatactctgaacaggtagtggagttggattttctttatcctagtgaaggtattcaccgacgatgggagaacggatatagaataacttctacagcagctactggcgatcaagctgctttcatattgagtatacctaaaagaaagttaatggatgagacacaagaaactcttagaacatctgcttttccaagcaaccatgtgaaggagaaatgggccaagaacctttacattgcttcaatatgctatggccggacagtgtcatgaggcttgctcggctgcatccctagttgggaagagcatgttctgatgagtatatattgggaaaaaagcagcaatctttgttgctgctctctattaatctctgtatgtgtaggtaacccgttcaagatgaagcaccttacagtgtccagagtaggagctcaagaaagaaccgagaggaaggtggaaagcaatcggccaataagcagacgaggagtatgtgatctggctagtagcgggtacaggcgctaatggcgtcaaatgttttgtatcagcatgttttgcttttgcttcgctcctgaccgctgtgcaaagagtagacagcttgtttctttcggaggcaagtcatctgagaaccatcgtgtatagcgtatgatgtcattgtattttctttagtggaggccaagttccatctttccggaactcccaaaatgctaagttattatgcgaggaaacaagtgtactgataaaatcggtgtatcaattccac

SEQ ID NO: 38720 - protein, 138 aa, Zea mays subsp. mays
MSKGTPYTQQSYKVSESFPYKWINKKWKEGFHVTSMTTAGSRWGVVMSRNSGYSEQVVELDFLYPSEGIHRRWENGYRITSTAATGDQAAFILSIPKRKLMDETQETLRTSAFPSNHVKEKWAKNLYIASICYGRTVS

SEQ ID NO: 38721 - protein, 103 aa, Zea mays subsp. mays
MTTAGSRWGVVMSRNSGYSEQVVELDFLYPSEGIHRRWENGYRITSTAATGDQAAFILSIPKRKLMDETQETLRTSAFPSNHVKEKWAKNLYIASICYGRTVS

SEQ ID NO: 38722 - protein, 92 aa, Zea mays subsp. mays
MSRNSGYSEQVVELDFLYPSEGIHRRWENGYRITSTAATGDQAAFILSIPKRKLMDETQETLRTSAFPSNHVKEKWAKNLYIASICYGRTVS

SEQ ID NO: 38723 - DNA, 486 bp, Zea mays subsp. mays
tcgagtcagtactacggccccccccccatgataacagggcatctgtttcctcttattctaatgacaccactgaagccgagagccctcgaacaccaacccgctcaggtgaggactggaggtcagcttttgattccgcttcaaatggtcctgttgctggaagcacaaacagtcaatcaaggtccaaaagtgctgacggtcgcagtcggcgctatgagaacggggacgtgagctcaggtgccaactctggcagccggcgcacaccaaaccggttgccaccagcaccgccaaaatactaatcgtgctgattggtattcatgaacatttatgtattcttgcctggcacatgcgcccagatcggctgctagagattgtggtgtagtggatggagtatcgggtgattgcgtgaacattgtgttcgcaggtcgctgcgtctcagatgagctgtttatagaaaaatatacaggtaaccgtggtttctactgtttt

SEQ ID NO: 38724 - protein, 97 aa, Zea mays subsp. mays
ESVLRPPPHDNRASVSSYSNDTTEAESPRTPTRSGEDWRSAFDSASNGPVAGSTNSQSRSKSADGRSRRYENGDVSSGANSGSRRTPNRLPPAPPKY

SEQ ID NO: 38725 - protein, 75 aa, Zea mays subsp. mays
SSQYYGPPPMITGHLFPLILMTPLKPRALEHQPAQVRTGGQLLIPLQMVLLLEAQTVNQGPKVLTVAVGAMRTGT

SEQ ID NO: 38726 - protein, 66 aa, Zea mays subsp. mays
MITGHLFPLILMTPLKPRALEHQPAQVRTGGQLLIPLQMVLLLEAQTVNQGPKVLTVAVGAMRTGT

SEQ ID NO: 38727 - DNA, 860 bp, Zea mays subsp. mays
attttggactacgtcttgaaaattgtagcgtgccgtcaaattttattttgcccttgcccctcggaaataagtagcaagaaaagatgccagctaagacgacttctgttaagaaaaggtttgtgtctgatggtatgttacgtgcagaactcaacgagttcttaacacgagaacttgctgaagatggttattctggtgttgatgtccgtgctgctccatcgcgcacagaaattgttatttctgcaacacgtacccaaaacgtattgggtgataagggacgccgtattcgtgaacttacatctctcattcaaaaacgttttgacttcaaagacaaggcagttgaacttttcgctgagaaagtagcacaacgtggattgtgtgctgttgcccaagctgagtcattacgttacaagttgattggtggtttagctgtcaggagagcatgttatggtgtgttgagattcatcatggaaagtggagctaagggatgtgaagttgtagtgtctggtaaattaagaggtcaacgtgccaagtcaatgaaatttgttgatggacttatgattcacagtggtgacccatgcaatgattatgttaatgtggctactagacacgttttgttaagacaaggagttttgggtatcaaggtaaaaattatgttgccatgggaccaaacaggtaaacttggcccaaagaagcctttgccagataatgtcagcgttgcagaacccaaggaagaaattctacccatagcaccaaccagtgatattaaatctaaacccgaagtagcagtacctgctgttccagttgtacctgttgttggttgaaatgattgtataaaataaactaaagttttttttaaacac

SEQ ID NO: 38728 - protein, 245 aa, Zea mays subsp. mays
MPAKTTSVKKRFVSDGMLRAELNEFLTRELAEDGYSGVDVRAAPSRTEIVISATRTQNVLGDKGRRIRELTSLIQKRFDFKDKAVELFAEKVAQRGLCAVAQAESLRYKLIGGLAVRRACYGVLRFIMESGAKGCEVVVSGKLRGQRAKSMKFVDGLMIHSGDPCNDYVNVATRHVLLRQGVLGIKVKIMLPWDQTGKLGPKKPLPDNVSVAEPKEEILPIAPTSDIKSKPEVAVPAVPVVPVVG

SEQ ID NO: 38729 - protein, 229 aa, Zea mays subsp. mays
MLRAELNEFLTRELAEDGYSGVDVRAAPSRTEIVISATRTQNVLGDKGRRIRELTSLIQKRFDFKDKAVELFAEKVAQRGLCAVAQAESLRYKLIGGLAVRRACYGVLRFIMESGAKGCEVVVSGKLRGQRAKSMKFVDGLMIHSGDPCNDYVNVATRHVLLRQGVLGIKVKIMLPWDQTGKLGPKKPLPDNVSVAEPKEEILPIAPTSDIKSKPEVAVPAVPVVPVVG

SEQ ID NO: 38730 - DNA, 968 bp, Zea mays subsp. mays
tcgtgccgaattcggcaccagctcactagtccccccccccccctaccataaaaaacatgaaaatcctctcactttcacttctcttgctcttggccgctacggtctctgcatccattccagagctcatcgaactcgtcgattcgaacaccatctttacgaacgaagccgaactcttagagaaagagaaactttccatcaactacgccaactgcagaagctggcaccttggtgttgagacctctaatatcatagacttcgacacggtgcccgcaaattgcaaagactatgttgaagactacttgatcacttccaaacagtaccaatacgactccaaaaccgtgtgcaaagaggcttatttctatgccaaaggacttgccctaaagaacgacaccgttaatgtttggatctttgacctagatgataccctcctctctagtattccctactacgcaaaatatggatacgggacagagaagaccgacccgggggcgtactggttgtggttagggaccggagcatcaacccctggactcccggaggccttgcatctttaccaaaacatcatagagctcgggattgaacccatcatactcagtgaccgttggaaattgtggaagaatgtcactctcgacaatctcgaagctgctggcgtggcctactggaagcatctcatattgaagcctaatggttcgaacttgaggcaagtggtgtacaagtcaaaggtgaggaagagtctcgttaagaaaggatacaacatcgttggcaatatcggagaccaatgggctgatttggttgaggatacccctggaagggtttttaagctcccaaatccactctactacgtaccttcttaagcatttatcttcatggcattttccccttgtatccacttcatatctatgtcgtttcgtttatctttgtagccgttttggcaccgttgcataaataaaatttctatcctatcgtag

SEQ ID NO: 38731 - protein, 265 aa, Zea mays subsp. mays
MKILSLSLLLLLAATVSASIPELIELVDSNTIFTNEAELLEKEKLSINYANCRSWHLGVETSNIIDFDTVPANCKDYVEDYLITSKQYQYDSKTVCKEAYFYAKGLALKNDTVNVWIFDLDDTLLSSIPYYAKYGYGTEKTDPGAYWLWLGTGASTPGLPEALHLYQNIIELGIEPIILSDRWKLWKNVTLDNLEAAGVAYWKHLILKPNGSNLRQVVYKSKVRKSLVKKGYNIVGNIGDQWADLVEDTPGRVFKLPNPLYYVPS

SEQ ID NO: 38732 - DNA, 799 bp, Zea mays subsp. mays
aataatataaccacagaaatccatcgacgaacaactgagaagagctgcgcctgcgcctgcgcctgcgggaaagggagaacatggtggggaagaagaggggtgttatctccccgctggaccatctcgctgggctgctggaggtgcgcgtggtgaggggagtggacctcgccatccgcgacctccgatccagcgacccctacgtcgtccttcgcatcggcaaggcgcagaaagtgaagacgcgagtggtcaagaagagcatcaatccggaatggaacgaaaaactcaccctctctattgaagaccctgccgttcctattagactggaagtatttgacaaggacactttcgttgatgatgcaatgggtaacgcggagctggacatccgcccgttagtcgagattgtgaagatgaagctccagggtgtcgctgacaaaacggtggtaaagaagctggtgcccaacagacagaactgcctagccgaggagagctccatatacatatcggaggggaaggtgaagcaagacctggtcgtacggctaaggaacgtagagtgtggcgaaatcgagctccaacttcagtgggtccacctccctggctctaagggtgtatgagaagagttatgagcgctgcctagcttgcactgctcaggttcttcgcttcacattaaagtaatctatttgaactgtagttgtaatctatagagataaaagcagtgtaaaaatagtagaaatcgttatggattaaagacagtcgacccagctcttgctagttgaaaagaacccagctcttgccatttgac

SEQ ID NO: 38733 - protein, 176 aa, Zea mays subsp. mays
MVGKKRGVISPLDHLAGLLEVRVVRGVDLAIRDLRSSDPYVVLRIGKAQKVKTRVVKKSINPEWNEKLTLSIEDPAVPIRLEVFDKDTFVDDAMGNAELDIRPLVEIVKMKLQGVADKTVVKKLVPNRQNCLAEESSIYISEGKVKQDLVVRLRNVECGEIELQLQWVHLPGSKGV

SEQ ID NO: 38734 - DNA, 2780 bp, Zea mays subsp. mays
  misc_feature (1059)..(1059): n is a, c, g, or t
gcgaaggtgggaaagcaagcaagcggcggccggagcatcttggagacaggaagaaggggtggtagtaggtgaaaccggaggcggcaggatagggagagggagcgagagtagaggccacgcctgcttgacagcaaggcccgtgcgctcggcggcggcggcggcggatatgggcgactctggcggctctgttgtgtcggtggacgtcgagcgcatctccttcggcggcaaggaacatcatatacaaaccaaccatggatctgtatctgttgccatatatggtgaacatgataagcctgctcttattacctacccagatattgctttgaaccatatgtcttgcttccaagggctactcttctgtcctgaagcagcttcattgctgcttcataatttttgcatttaccatatcagccccccaggacatgagttaggagctgctccgattttgccgagcacacctgtggcatctcctgatgacttagcagatcaaatcgcagacatacttgatttttttggactggattcggttatgtgcttaggtgtcactgcgggcgcatacattcttactctgtttgcaacgaagtatagggagcgagtactaggacttattctcgtttcacctctatgtaaagctccctcatggtctgagtggttttataataaggtaatgtcaaatttactgtattattatggcatgtgtaatgtcgtgaaggatattttgttgcagcgctactttggaaagggagtacgtggaggctctgctgaacctgaatcagatattgtgcaggcttgcagaagttttctagatcaacggcagtgtgtgaacgtgtggcgatttatccaaactatcaacgagagaaaagacttgacagagaacctgaagcagctacagtgcaggacactaatttttgttggtgagaattcccagttccatgctgaagctgttcacatgactgcaaagcttgataggcgatatatcgctcttgtggaggtacaagcttgtggctcggttgtgacagaggagcaacctcatgcaatgctgataccaatggagtactntctcatgggatatggactgtacaggccaagccagataaactgtagccctcgtagccctctgaatccgttttgtatatcaccagagctcctctctcctgagagcatgggggttaagctctgatgaatcccctaatgattttggtaaaaatcattaagttaaggtggatacacatcttgtcatatgatcaaatggtttcgcgaaaaatcaataatcagacaacaagatgtgcgaactcgatattttacacgactctctttaccaattctgccccgaattacacttaaaacgactcaacagcttaacgttggcttgccacgcattacttgactgtaaaactctcactcttaccgaacttggccgtaacctgccaaccaaagcgagaacaaaacataacatcaaacgaatcgaccgattgttaggtaatcgtcacctccacaaagagcgactcgctgtataccgttggcatgctagctttatctgttcgggcaatacgatgcccattgtacttgttgactggtctgatattcgtgagcaaaaacgacttatggtattgcgagcttcagtcgcactacacggtcgttctgttactctttatgagaaagcgttcccgctttcagagcaatgttcaaagaaagctcatgaccaatttctagccgaccttgcgagcattctaccgagtaacaccacaccgctcattgtcagtgatgctggctttaaagtgccatggtataaatccgttgagaagctgggttggtactggttaagtcgagtaagaggaaaagtacaatatgcagacctaggagcggaaaactggaaacctatcagcaacttacatgatatgtcatctagtcactcaaagactttaggctataagaggctgactaaaagcaatccaatctcatgccaaattctattgtataaatctcgctctaaaggccgaaaaaatcagcgctcgacacggactcattgtcaccacccgtcacctaaaatctactcagcgtcggcaaaggagccatggattctagcaactaacttacctgttgaaattcgaacacccaaacaacttgttaatatctattcgaagcgaatgcagattgaagaaaccttccgagacttgaaaagtcctgcctacggactaggcctacgccatagccgaacgagcagctcagagcgttttgatatcatgctgctaatcgccctgatgcttcaactaacatgttggcttgcgggcgttcatgctcagaaacaaggttgggacaagcacttccaggctaacacagtcagaaatcgaaacgtactctcaacagttcgcttaggcatggaagttttgcggcattctggctacacaataacaagggaagacttactcgtggctgcaaccctactagctcaaaatttattcacacatggttacgctttggggaaattatgaggggatctctcagggttaagcttaagccaatcaagacgcgagccaaccttaaagcataggaacaggtgatgagaatgcgtaggaactgatgcgcatcccttgattttttttttgtgctgaagtgacatagctgttgtttccgtgatgtacataagacaagaggttagtcgggtcagggttgggtgggtggtcgattccattgatttgtagcctttaaaacagtcgtacattgtcacagatttatttgttgaagggagaagaaataataaggggagatgagatgttgcc

SEQ ID NO: 38735 - protein, 402 aa, Zea mays subsp. mays
MCELDILHDSLYQFCPELHLKRLNSLTLACHALLDCKTLTLTELGRNLPTKARTKHNIKRIDRLLGNRHLHKERLAVYRWHASFICSGNTMPIVLVDWSDIREQKRLMVLRASVALHGRSVTLYEKAFPLSEQCSKKAHDQFLADLASILPSNTTPLIVSDAGFKVPWYKSVEKLGWYWLSRVRGKVQYADLGAENWKPISNLHDMSSSHSKTLGYKRLTKSNPISCQILLYKSRSKGRKNQRSTRTHCHHPSPKIYSASAKEPWILATNLPVEIRTPKQLVNIYSKRMQIEETFRDLKSPAYGLGLRHSRTSSSERFDIMLLIALMLQLTCWLAGVHAQKQGWDKHFQANTVRNRNVLSTVRLGMEVLRHSGYTITREDLLVAATLLAQNLFTHGYALGKL

SEQ ID NO: 38736 - protein, 392 aa, Zea mays subsp. mays
  misc_feature (353)..(353): Xaa can be any naturally occurring amino acid
RRWESKQAAAGASWRQEEGVVVGETGGGRIGRGSESRGHACLTARPVRSAAAAADMGDSGGSVVSVDVERISFGGKEHHIQTNHGSVSVAIYGEHDKPALITYPDIALNHMSCFQGLLFCPEAASLLLHNFCIYHISPPGHELGAAPILPSTPVASPDDLADQIADILDFFGLDSVMCLGVTAGAYILTLFATKYRERVLGLILVSPLCKAPSWSEWFYNKVMSNLLYYYGMCNVVKDILLQRYFGKGVRGGSAEPESDIVQACRSFLDQRQCVNVWRFIQTINERKDLTENLKQLQCRTLIFVGENSQFHAEAVHMTAKLDRRYIALVEVQACGSVVTEEQPHAMLIPMEYXLMGYGLYRPSQINCSPRSPLNPFCISPELLSPESMGVKL

SEQ ID NO: 38737 - protein, 337 aa, Zea mays subsp. mays
  misc_feature (298)..(298): Xaa can be any naturally occurring amino acid
MGDSGGSVVSVDVERISFGGKEHHIQTNHGSVSVAIYGEHDKPALITYPDIALNHMSCFQGLLFCPEAASLLLHNFCIYHISPPGHELGAAPILPSTPVASPDDLADQIADILDFFGLDSVMCLGVTAGAYILTLFATKYRERVLGLILVSPLCKAPSWSEWFYNKVMSNLLYYYGMCNVVKDILLQRYFGKGVRGGSAEPESDIVQACRSFLDQRQCVNVWRFIQTINERKDLTENLKQLQCRTLIFVGENSQFHAEAVHMTAKLDRRYIALVEVQACGSVVTEEQPHAMLIPMEYXLMGYGLYRPSQINCSPRSPLNPFCISPELLSPESMGVKL

SEQ ID NO: 38738 - DNA, 1317 bp, Zea mays subsp. mays
tttatggcaactaattcttagttatatgcagcatcacacatatcaacaagtttttgtgtcctgaccaggaacaatagatatcataccaaggagaaaaagtatgggctaacaacttgaatcgttaagcagaggactaggaatgaagattccaatccaaattactgaagggagcaagaggccagagccacccattcaagctgctaagtttgcatcagaggggggaatcacattgaggcagcacattccaatatttcaccactggaaggagtacaagaagaaagagaatgaacctacaataagaaactatattggaaaagatattgctcaattcaccttggacaatgatagcaaggcagtggaagatgcatgtctagatatgctaaagggtggacaatgccaaatgaggtatagactaaaacaaaagtatttcaatgggatacctgctaatcaagtgaggactacatcacctatttcaagcatgtctgatgaggactggagaaagttggtggagaagtggtctacccaaaacacaaggatagttgtatgaagaataaacttaatcgtgaaaaagtacagtatcaacaatgcataggatcccaatcatatattgcaaaagcttatttactgaaagaagagaaatataaggatgctgaaccgagtgcaatagatcttttcaaggacatgcattgcagcaagaagaaaggtttttctgaaaatgtaaagaaagcaattgttgacatggaagcaagggtgacaacaccagttgaggatggacaacaacaaaagtctcctatagaagttgtttctgaagtgctatggggctccagtttatttctacagaatgttggtctgcaagataactccaagaaaagctccacaacaactgtttttgctaaggttcaagaacttcataatcaattggagtctgagaggctagaaaaagatgggcttcaagaagaagtagaaaccttaaaggctcaggcacaggcctcaaaggagaccatggacaatatgaagagatcgatggaagaaaataacagtctcctccgtcaactgttgagcttcaatcgaagccaaacgtccccatcttaagtctgctatagtatcatgttatattagttctggattcaggttttataaatttggaatatgtttaaaactttcatactttgagttgaagttataggatttcctttgtattttaagttacatgatctacaatcatatgatttgaagttataaaagtatctcttgtatgaattgtgtgaatgttgaactaaataattcaatgttttggttattagcatgtgatttcat

SEQ ID NO: 38739 - protein, 182 aa, Zea mays subsp. mays
MKNKLNREKVQYQQCIGSQSYIAKAYLLKEEKYKDAEPSAIDLFKDMHCSKKKGFSENVKKAIVDMEARVTTPVEDGQQQKSPIEVVSEVLWGSSLFLQNVGLQDNSKKSSTTTVFAKVQELHNQLESERLEKDGLQEEVETLKAQAQASKETMDNMKRSMEENNSLLRQLLSFNRSQTSPS

SEQ ID NO: 38740 - protein, 136 aa, Zea mays subsp. mays
MHCSKKKGFSENVKKAIVDMEARVTTPVEDGQQQKSPIEVVSEVLWGSSLFLQNVGLQDNSKKSSTTTVFAKVQELHNQLESERLEKDGLQEEVETLKAQAQASKETMDNMKRSMEENNSLLRQLLSFNRSQTSPS

SEQ ID NO: 38741 - protein, 135 aa, Zea mays subsp. mays
MKIPIQITEGSKRPEPPIQAAKFASEGGITLRQHIPIFHHWKEYKKKENEPTIRNYIGKDIAQFTLDNDSKAVEDACLDMLKGGQCQMRYRLKQKYFNGIPANQVRTTSPISSMSDEDWRKLVEKWSTQNTRIVV

SEQ ID NO: 38742 - DNA, 1241 bp, Zea mays subsp. mays
atgtaaggctgcaagggttaagttgttccttgttgagccttgcaaggaattgaccgtgtccagctctccatctactccacccttcaaaagtaaagatggttcagttggcagacctggcaagttagaaggtcaccactagtcattcccaaaaatgatcgccacatcgcactgagtccaagtaccggagcaggatgatgtattcccctccacgcaccgatcctgacagagaggatgagcagtgcttcgcaattggagctaacctgctttcttcactagatcatactatgaagtttgatgagcctatcgcctttccaatgaacaatgtaggcatgcaagagaaggttcagctctacaattctactggagatgctcaactaagtagaaatgtgaacacagggaagtgttcaaagggtggcaaaaggaagggttctggagagaacaattcatcactgcattctctagacgaagccagggcattgttgcagcgagaagtcagcatggagtgtgctgatgagaaggctgctggagccaagagagaggactacgcggcgcatgtccgggcaaagcgaggccaagccaccaacagccacagccttgcagaaagatttcgaagggaaaagataaatgtaaggatgaagcttcttcaggaccttgtcccgggttgcaacaagattacaggcaaggccatgatgcttgacgagatcataaactatgtgcaatctctgcagcgtcaggttgagttcctttcgatgaagctctcagcgatcagaccagggttcaaccgtgacctcgacctgcaagatatcctttgcgcacaagatgccagctccggttttccaggatacagcctgcaagcgagcgatgtgcatcttaatctgtatatagcatctgaagaaagtttctcacacaggatcatccctaatcctgcaaatgttcatgtgacaagaaacggccagctatctgcatttcctcagagaggagttatctggaacgaggaacttcgcagcgttgctccacatactttcgcttcagataccgttgctggttcaatggaagtggagtgacaaactgacaagtcggcagtttaatggtaaatcttgacaagtttagtctgttgggttgctactggtcaactggtgtgcctttgtaagttgcaatggtggcgcggatgagctagtcaactttggtctttggtgcccacacaccatgtacagttataataactaatcaaaggagcacag

SEQ ID NO: 38743 - protein, 290 aa, Zea mays subsp. mays
MMYSPPRTDPDREDEQCFAIGANLLSSLDHTMKFDEPIAFPMNNVGMQEKVQLYNSTGDAQLSRNVNTGKCSKGGKRKGSGENNSSLHSLDEARALLQREVSMECADEKAAGAKREDYAAHVRAKRGQATNSHSLAERFRREKINVRMKLLQDLVPGCNKITGKAMMLDEIINYVQSLQRQVEFLSMKLSAIRPGFNRDLDLQDILCAQDASSGFPGYSLQASDVHLNLYIASEESFSHRIIPNPANVHVTRNGQLSAFPQRGVIWNEELRSVAPHTFASDTVAGSMEVE

SEQ ID NO: 38744 - protein, 289 aa, Zea mays subsp. mays
MYSPPRTDPDREDEQCFAIGANLLSSLDHTMKFDEPIAFPMNNVGMQEKVQLYNSTGDAQLSRNVNTGKCSKGGKRKGSGENNSSLHSLDEARALLQREVSMECADEKAAGAKREDYAAHVRAKRGQATNSHSLAERFRREKINVRMKLLQDLVPGCNKITGKAMMLDEIINYVQSLQRQVEFLSMKLSAIRPGFNRDLDLQDILCAQDASSGFPGYSLQASDVHLNLYIASEESFSHRIIPNPANVHVTRNGQLSAFPQRGVIWNEELRSVAPHTFASDTVAGSMEVE

SEQ ID NO: 38745 - protein, 259 aa, Zea mays subsp. mays
MKFDEPIAFPMNNVGMQEKVQLYNSTGDAQLSRNVNTGKCSKGGKRKGSGENNSSLHSLDEARALLQREVSMECADEKAAGAKREDYAAHVRAKRGQATNSHSLAERFRREKINVRMKLLQDLVPGCNKITGKAMMLDEIINYVQSLQRQVEFLSMKLSAIRPGFNRDLDLQDILCAQDASSGFPGYSLQASDVHLNLYIASEESFSHRIIPNPANVHVTRNGQLSAFPQRGVIWNEELRSVAPHTFASDTVAGSMEVE

SEQ ID NO: 38746 - DNA, 1625 bp, Zea mays subsp. mays
gaaacaatcggtctctatctttctcatgaatctcagcctagcttaccatcttgacctgccccacacgtcccaccggccaccaccgggtttcgtcgctgccgccgcccgcacctgcagccgccatgtggaggggcggctctacagccgcctccgccgcgagggctctccgctcgcgcctcctcctcgaccccatccaccacccggccacgtcgctcgctccaatcgcttcggcgcgtacctcctcctcttccaccccgtccaccgccgcggcgaacaccatcgtggaagaagcggcggcagcggtatccgtttctcagcataccggatccatctccgactcgctgcggcactacgggaagtgctactgggagctctcgaaagcccgcctcagtgctcttgttgtggcaacttcgggggctggctatgtgcttggtagtggcaacatcgtggacattgccggcctttgttgcacatgtgccggtacaatgatggttacagcatctgcaaataccctcaaccaggtgtttgagataaaaaatgatgctaaaatgaaaaggacaatgcgacggcccctgccatctggtcgcattagtcctgcacatgctgcgatgtgggctacaagtgttggagttgcaggaacagctttgctggcctggaaggctaatggcttggcagctgggcttgcagcttctaatcttgttctgtatgcatttgtgtatacgccgttgaagcaaatacaccctgttaatacatgggttggggcagtcgttggtgccatcccaccacttctggggtgggcagcagcttcaactgaactgtcactaaacgcgatgatactccctgccgcattgtacttttggcaaatacctcattttatggctctcgcgtacttatgtcgaaatgattaccttgctggagggtatcgaatgttttcttttgctgaccctaccggtagaagaactgcatgggtgtcgctaagaaattgtctgtacatgctacctttggggttatttgcgtacaactgggggctcacatccgagtggttcagttttgaagcttcactcctaacattaggccttaccatcggagctctatcattcgtcctagaaccaagcccgaagactgcgaggagaatgttctatggtagcctgctgtatctccctgccttcatgtccggacttctgttacatcggctaccaagtgaacaaaaggcgcacaacctggctgagaacaatgagctggacggagttctgtacggggctgatctgcaggacgaagaacgagcaagacagaaacgccaagacacgaaaccttctcgtgtgcaatcactccctccagtttcctatgcttctgtggctccattccctttcctaccggtacccatatacgagtcatgaaaagttgaaaacctcctctggttcttcctgcagccgtggggtagttggagcaatgtattcatgcatttttggcttacatgagttttccgccatcaagaagagtccttggtatggtgcgtctgttgttaaaattatagaatacgtttttgtgtgtgtggattgagccttttgcggctcacctacaaatgtaaaaagtgatgttgatgttcattctgatgattcgatcgc

SEQ ID NO: 38747 - protein, 424 aa, Zea mays subsp. mays
MWRGGSTAASAARALRSRLLLDPIHHPATSLAPIASARTSSSSTPSTAAANTIVEEAAAAVSVSQHTGSISDSLRHYGKCYWELSKARLSALVVATSGAGYVLGSGNIVDIAGLCCTCAGTMMVTASANTLNQVFEIKNDAKMKRTMRRPLPSGRISPAHAAMWATSVGVAGTALLAWKANGLAAGLAASNLVLYAFVYTPLKQIHPVNTWVGAVVGAIPPLLGWAAASTELSLNAMILPAALYFWQIPHFMALAYLCRNDYLAGGYRMFSFADPTGRRTAWVSLRNCLYMLPLGLFAYNWGLTSEWFSFEASLLTLGLTIGALSFVLEPSPKTARRMFYGSLLYLPAFMSGLLLHRLPSEQKAHNLAENNELDGVLYGADLQDEERARQKRQDTKPSRVQSLPPVSYASVAPFPFLPVPIYES

SEQ ID NO: 38748 - protein, 303 aa, Zea mays subsp. mays
MMVTASANTLNQVFEIKNDAKMKRTMRRPLPSGRISPAHAAMWATSVGVAGTALLAWKANGLAAGLAASNLVLYAFVYTPLKQIHPVNTWVGAVVGAIPPLLGWAAASTELSLNAMILPAALYFWQIPHFMALAYLCRNDYLAGGYRMFSFADPTGRRTAWVSLRNCLYMLPLGLFAYNWGLTSEWFSFEASLLTLGLTIGALSFVLEPSPKTARRMFYGSLLYLPAFMSGLLLHRLPSEQKAHNLAENNELDGVLYGADLQDEERARQKRQDTKPSRVQSLPPVSYASVAPFPFLPVPIYES

SEQ ID NO: 38749 - protein, 302 aa, Zea mays subsp. mays
MVTASANTLNQVFEIKNDAKMKRTMRRPLPSGRISPAHAAMWATSVGVAGTALLAWKANGLAAGLAASNLVLYAFVYTPLKQIHPVNTWVGAVVGAIPPLLGWAAASTELSLNAMILPAALYFWQIPHFMALAYLCRNDYLAGGYRMFSFADPTGRRTAWVSLRNCLYMLPLGLFAYNWGLTSEWFSFEASLLTLGLTIGALSFVLEPSPKTARRMFYGSLLYLPAFMSGLLLHRLPSEQKAHNLAENNELDGVLYGADLQDEERARQKRQDTKPSRVQSLPPVSYASVAPFPFLPVPIYES

SEQ ID NO: 38750 - DNA, 1864 bp, Zea mays subsp. mays
attttttgggggccatagtgacttgaggacggtgtacacatccatagtaaagggtacaatcgagcaagttagaatgatgttattgggaagttcacaatgaaaatccaaataatagtaccgctgcaataatctcttctcctgaggctgtcctgctttgctgcttaaaaccgtattcagttattgttctaaaaaaatgattcatacctactgaaaaccgttctcactctatctaattccttctatttttttcttttttctaaatgaaccctcacccagcattcaccatacgcagtttattttagcagttgatatactatatcaaactaagaaccatgtgaagatagttctctatcatagcaacctctagcatcgtagggatctattttccatttttaacaatcaggttaatagcttgagcttgggtgccttaaatgctcactatttttcatatggggtgatgtgcatcaagcggacggtctggcaagattgacaaatcattgtgctttctcccccggtaagaattgcatcttgacacatcagcttcaaagcagatgctgaccgaaagaattagcattcttttttgggatgtttagaagtcctatcatgtgatctgttcaaaagggagtcttaaaaagaaacagttccaaaacctcaaataatatacatatagatatcaaaaggttgtataatgttgttgccttgtttgctgagtggttctattgattaattaaagctctagcatattgttaaggtttcgacctgagtttgttccatgattttagtggaacgactcaatttcttattgatgggataacaggcagctgttgatcaaatcgaaccctggcgaagttgtgaagcctggtgaggaatccgattcattgtgttcagggctgcttgcggtttgaatttgacagtatttgtgtttgtgccagtgatcagccggctacactaccacctgaaccggttgcattgcatagactcttccgagtttaacaagtaggtgttggtagttcgtcaggggcgtttagcttttgccaatgggggatttggctgcattttgttaccttttggtatatgtactgattatattatttattggtctataagaccactggggtactaaactatattgctgattgttaagataagatctgtgatgatttttgccaagtgagcacctgatcttttttatgcaatcaatttcaggtgtgtgtagacaacctattttttagttgatatagatggtgctgatttgttagttaaagctattgtctttgatggtcacacttttattggaaatctgcaattccttttatgttgtaacaaaatttaatatctaaaaatgttgttggtgtcttggtggtaccgtgtcagttgtcaacagtccaattccattctcatggctttgattctgacgtatgattatgattattttaaatttgtgcagattcattcaaggcaatcaacgatgaaggcatgcccatgtatcagaggcccttcatgaagggcaagctgtacatccacttctcggtggagttcccggactcattgagcccggagcagtggaatgccctggaggatgttctcccacccaagccagtatcacagtacactgacatagagctggacgagtgcgaggagacaatgccctacgacgtgaacatcgaagaggagatgcggaggcagcagcagcaccaggaggcctacgacgaggatgatgatgtgccaggcggtgggcagagggtgcagtgcgcccagcagtaggcagcttacgtcaaatttgctgtttcgctttgggcgactattgagtttacccgcttgtattggtctgatgatacttcggttacaagagtgcagtattact

SEQ ID NO: 38751 - protein, 95 aa, Zea mays subsp. mays
MPMYQRPFMKGKLYIHFSVEFPDSLSPEQWNALEDVLPPKPVSQYTDIELDECEETMPYDVNIEEEMRRQQQHQEAYDEDDDVPGGGQRVQCAQQ

SEQ ID NO: 38752 - protein, 93 aa, Zea mays subsp. mays
MYQRPFMKGKLYIHFSVEFPDSLSPEQWNALEDVLPPKPVSQYTDIELDECEETMPYDVNIEEEMRRQQQHQEAYDEDDDVPGGGQRVQCAQQ

SEQ ID NO: 38753 - protein, 87 aa, Zea mays subsp. mays
MKGKLYIHFSVEFPDSLSPEQWNALEDVLPPKPVSQYTDIELDECEETMPYDVNIEEEMRRQQQHQEAYDEDDDVPGGGQRVQCAQQ

SEQ ID NO: 38754 - DNA, 1150 bp, Zea mays subsp. mays
ggctagtggataagctaagctctccctctcgctgagctggctgttgctcttccccaaccccgcgcgcgggggagcgataaaccctagtcttcgccgtcgtcgcaggaggacccgcgatgtcgcacttcgggaggtcaggcccgccggacatccgcgacaccttctcgctcctcgtcctcaacatcagcttccgcaccacggccgacgacctcttcccgctcttcgagcgctacggcaaggtcgtcgacgtcttcatcccgagggacaggaggaccggggactcgaggggtttcgcgttcgtgcggtacaagtacgccgacgaggcgcagaaggctatagatcggctcgatggccgtgatgtggatgggagaaacatcatggtgcagtttgcaaagtacggccccaatgctgagccaatccgcaaaggaagggttaaagagggggttgagaaatcacaagacagatcaagaagccgcagtccaaggccaaggcacagagatagagatcatagaagccaaagtcgcagcaggagcagagaaaggcatgtccgtgatagagacaggggctatcgtcgtcggagcagaagtagaagccaaagtcttagttcaagccctgacaacagaagtcatcatagagcaagagatgatgataggcgcaagagcatgagtaagagcaggagcaggagcacaagtagaagccgctcatactatagtgcttcacctgcccggcacagtgctagccctcgcaagagcccaccgccacagaggagccccactcctgcaaagcatgccaatggaaaagattcacctctgtcacgctgtgtttctccattaccgaagcgtgcaacctcccgcagcccaggcagtgatggcaaggagtaaagcttgctgatttggtgatgcctagaaaacagccttctcacggagtcacgggattgcagaaccttgagaaggttgattgagcacaatggaagtagcagtctgcaatcaaccgcgatccaaggttgctagttcttttaatggcttatagaattgtgttttccagttgtcaaaaatatgcgctggtttgtatttttggcatatactgtgtttttatacccttgcactgcatcatcatctactttatatatgcatcagtttctcgaaaccat

SEQ ID NO: 38755 - protein, 254 aa, Zea mays subsp. mays
MSHFGRSGPPDIRDTFSLLVLNISFRTTADDLFPLFERYGKVVDVFIPRDRRTGDSRGFAFVRYKYADEAQKAIDRLDGRDVDGRNIMVQFAKYGPNAEPIRKGRVKEGVEKSQDRSRSRSPRPRHRDRDHRSQSRSRSRERHVRDRDRGYRRRSRSRSQSLSSSPDNRSHHRARDDDRRKSMSKSRSRSTSRSRSYYSASPARHSASPRKSPPPQRSPTPAKHANGKDSPLSRCVSPLPKRATSRSPGSDGKE

SEQ ID NO: 38756 - protein, 167 aa, Zea mays subsp. mays
MVQFAKYGPNAEPIRKGRVKEGVEKSQDRSRSRSPRPRHRDRDHRSQSRSRSRERHVRDRDRGYRRRSRSRSQSLSSSPDNRSHHRARDDDRRKSMSKSRSRSTSRSRSYYSASPARHSASPRKSPPPQRSPTPAKHANGKDSPLSRCVSPLPKRATSRSPGSDGKE

SEQ ID NO: 38757 - DNA, 2042 bp, Zea mays subsp. mays
gagagaatatgaagaattcaaagttcgtatcaatggtcttgtagccaaggcacaaaaagttcccgaggagggatggatcatgcaagatggtacaccttggcctgggaacaatactagggaccatcctggaatgattcaggttttcctgggtcacagtggagggcttgacgttgaaggcaatgaacttcctcgtttggtttatgtgtctcgtgaaaaacgtcctggattccaacatcacaagaaggctggtgccatgaatgcacttgttcgtgtatcagctgtccttactaatgggcaatacatgttgaatcttgattgtgaccactacatcaataatagcaaggctcttcgagaagctatgtgcttccttatggacccaaacctaggaaggaatgtctgttatgtccaatttcctcagaggtttgatggtattgataggaatgaccgatatgcaaacaggaacactgtgtttttcgatattaacttgagaggtcttgacggcattcaagggccagtttatgtgggaactggttgtgtgtttaacagaacggccttatatggttatgagcctccagtcaagaaaaaaaagccaggcttcttctcttcgctttgtgggggaaggaaaaagacgtcaaaatctaagaagagctcggaaaagaagaagtcacatagacacgcagacagttctgtaccagtatttaatctcgaagatatagaggaagggattgaaggttctcagtttgatgatgagaaatcgctgattatgtctcaaatgagcttggagaagagatttggccagtccagtgtttttgtagcctctactctgatggaatatggtggtgttccacaatctgcaactccagagtctcttctgaaagaagctattcatgtcatcagctgtggctatgaggacaaaactgactggggaactgagattgggtggatatatggttctgttacagaagacattctcaccggattcaagatgcatgctcgaggctggcgatcaatctactgcatgcctaagcgaccagctttcaagggatctgctcctatcaacctttcggatcgtttgaatcaagtgcttcggtgggctcttggttccattgaaattcttttcagcaggcattgtcccatatggtatggctatggaggccggcttaaattcctggagagatttgcttatatcaacacaacaatttatccactcacatcaatcccgctcctcctgtactgcatattgccagcagtttgtcttctcactgggaagttcatcatcccaaagattagtaacctagagagtgtttggtttatatcgctctttatctcaatctttgccactggtatccttgagatgaggtggagtggtgttggcattgatgaatggtggaggaacgagcagttctgggtcattggtggtatttctgcgcatttatttgccgtcttccagggtctcctgaaggtgcttgctggtatcgacacgagcttcactgtcacctctaaggccactgacgaagaaggtgattttgccgagctctacatgttcaagtggacaacgcttctgatcccaccaaccactattttgatcatcaacctggtcggcgtggtcgctggcatttcctacgcaatcaatagcggttaccagtcatggggacctcttttcgggaagctcttctttgcgttctgggtgattgtccacctgtaccccttcctcaagggcctcatggggaagcagaaccgcacgccgaccattgtcgttgtctgggctatcctccttgcgtcgatcttttccctgatgtgggttcgtatcgatccattcaccacccgggtcactggccctgatatcgcgaaatgtggcatcaactgctaggatgagctgaatatagttaaagagtggaactagacgcattgtgcatcgtaagttatcagtgggtggctctttttatagtatggtaggaacttggtcgggagacgttaattacatatgctatatgtacctccgctggtctttatccgtaagttaatatatatactgctttgag

SEQ ID NO: 38758 - protein, 622 aa, Zea mays subsp. mays
REYEEFKVRINGLVAKAQKVPEEGWIMQDGTPWPGNNTRDHPGMIQVFLGHSGGLDVEGNELPRLVYVSREKRPGFQHHKKAGAMNALVRVSAVLTNGQYMLNLDCDHYINNSKALREAMCFLMDPNLGRNVCYVQFPQRFDGIDRNDRYANRNTVFFDINLRGLDGIQGPVYVGTGCVFNRTALYGYEPPVKKKKPGFFSSLCGGRKKTSKSKKSSEKKKSHRHADSSVPVFNLEDIEEGIEGSQFDDEKSLIMSQMSLEKRFGQSSVFVASTLMEYGGVPQSATPESLLKEAIHVISCGYEDKTDWGTEIGWIYGSVTEDILTGFKMHARGWRSIYCMPKRPAFKGSAPINLSDRLNQVLRWALGSIEILFSRHCPIWYGYGGRLKFLERFAYINTTIYPLTSIPLLLYCILPAVCLLTGKFIIPKISNLESVWFISLFISIFATGILEMRWSGVGIDEWWRNEQFWVIGGISAHLFAVFQGLLKVLAGIDTSFTVTSKATDEEGDFAELYMFKWTTLLIPPTTILIINLVGVVAGISYAINSGYQSWGPLFGKLFFAFWVIVHLYPFLKGLMGKQNRTPTIVVVWAILLASIFSLMWVRIDPFTTRVTGPDIAKCGINC

SEQ ID NO: 38759 - protein, 596 aa, Zea mays subsp. mays
MQDGTPWPGNNTRDHPGMIQVFLGHSGGLDVEGNELPRLVYVSREKRPGFQHHKKAGAMNALVRVSAVLTNGQYMLNLDCDHYINNSKALREAMCFLMDPNLGRNVCYVQFPQRFDGIDRNDRYANRNTVFFDINLRGLDGIQGPVYVGTGCVFNRTALYGYEPPVKKKKPGFFSSLCGGRKKTSKSKKSSEKKKSHRHADSSVPVFNLEDIEEGIEGSQFDDEKSLIMSQMSLEKRFGQSSVFVASTLMEYGGVPQSATPESLLKEAIHVISCGYEDKTDWGTEIGWIYGSVTEDILTGFKMHARGWRSIYCMPKRPAFKGSAPINLSDRLNQVLRWALGSIEILFSRHCPIWYGYGGRLKFLERFAYINTTIYPLTSIPLLLYCILPAVCLLTGKFIIPKISNLESVWFISLFISIFATGILEMRWSGVGIDEWWRNEQFWVIGGISAHLFAVFQGLLKVLAGIDTSFTVTSKATDEEGDFAELYMFKWTTLLIPPTTILIINLVGVVAGISYAINSGYQSWGPLFGKLFFAFWVIVHLYPFLKGLMGKQNRTPTIVVVWAILLASIFSLMWVRIDPFTTRVTGPDIAKCGINC

SEQ ID NO: 38760 - protein, 579 aa, Zea mays subsp. mays
MIQVFLGHSGGLDVEGNELPRLVYVSREKRPGFQHHKKAGAMNALVRVSAVLTNGQYMLNLDCDHYINNSKALREAMCFLMDPNLGRNVCYVQFPQRFDGIDRNDRYANRNTVFFDINLRGLDGIQGPVYVGTGCVFNRTALYGYEPPVKKKKPGFFSSLCGGRKKTSKSKKSSEKKKSHRHADSSVPVFNLEDIEEGIEGSQFDDEKSLIMSQMSLEKRFGQSSVFVASTLMEYGGVPQSATPESLLKEAIHVISCGYEDKTDWGTEIGWIYGSVTEDILTGFKMHARGWRSIYCMPKRPAFKGSAPINLSDRLNQVLRWALGSIEILFSRHCPIWYGYGGRLKFLERFAYINTTIYPLTSIPLLLYCILPAVCLLTGKFIIPKISNLESVWFISLFISIFATGILEMRWSGVGIDEWWRNEQFWVIGGISAHLFAVFQGLLKVLAGIDTSFTVTSKATDEEGDFAELYMFKWTTLLIPPTTILIINLVGVVAGISYAINSGYQSWGPLFGKLFFAFWVIVHLYPFLKGLMGKQNRTPTIVVVWAILLASIFSLMWVRIDPFTTRVTGPDIAKCGINC

SEQ ID NO: 38761 - DNA, 1678 bp, Zea mays subsp. mays
aagaaggtaccttacctgatagatagtgataggattattgctggagctctgattgctgctgtttcatgtttttcctgatctcttcagcatgttctttggctcaattcattcttctgtatttctgtgctgcagaaaactgaagcgtcttcatcgtccaatcatgcggttgcctctggtccggctaaggtctggcaaccgggtgtagatgcactggaagatggggaggagcttcagtttgatcctgaggcttataattatctccgaggttttggcattggctggtcttgcttgaggcggagaaagcttcattgaattatatcggtgttttcaagctttctaacataaatgggaaaaagcgggaacctataccagcttcagcagttgatggtgacactgatgtggatagtgacagcagcagtgatgaagaagatgaagaaattaacgaggatacaaagcccatcctacatctaaaaaaggtggctcatgcggggtgtgtaaatcggatacgctcaatgactcaaaagccacatatatgtgctacttggggagatacccgtcatgttcaggtgtgggacttgagctccttccttaattctttagcagagtcaggggcatctgcacccaaagaagacgatataatccacaaacacttacccatgaaagtttttagtggccataaagatgagggatatgccattgattggagtccacttgttactggaagacttgtttctggtgactgcaataagtgcattcacctatgggaaccgacttcaaataactggaacgtagatgcaaacccatttgttggacacactgctagtgttgaagatctacagtggagtcccacggaagccgacatatttgcctcgtgttctgtggatggtacgatatcaatatgggatgtacgtacagggaagaaaccttctatttctgtcaaagctcataaagcagatgtgaatgttatctcatggaacaggcttgctagctgcatgatagcttctgggtgcgacgatggcagtttctcagttcatgatcttagatcaattcaggactcgttggtagcacattttgagtaccacaagaaagcaattacatccatcgagtggagcccacacgaagcatcatcattagctgtaacatctgaagaccaccagctcacaatctgggacctttcattggaacgggacaccgaggaggaggctgagttcagagcgaagatgaaagagcaggcaaacgcccctgacgatttgccgcctcagcttctctttgctcatcagggtcagagagacttgaaagaagtgcactggcacccacagataccgtcgatgatcatatcgacggcaatcgacggcttcaacgtgttgatgcctagcaacatcgatacaaccattcctggcagcacagatacagcaatgccgcctgctgagccataggttaggtgtttctggtagctcatgattccaggttcatgcggtggtgagtgtagttgccatttgtcatgtgtcgacagtgctatgctgtcgtgttggagcatgatgggaaaattttgattggctggcgttctatgataatatgattaggatttaatatgtgcatgctttttttagttttaccagcatctttgatggttgtgggccccatcatatgtcaaattatcaaccgatgttttcgttgc

SEQ ID NO: 38762 - protein, 307 aa, Zea mays subsp. mays
MTQKPHICATWGDTRHVQVWDLSSFLNSLAESGASAPKEDDIIHKHLPMKVFSGHKDEGYAIDWSPLVTGRLVSGDCNKCIHLWEPTSNNWNVDANPFVGHTASVEDLQWSPTEADIFASCSVDGTISIWDVRTGKKPSISVKAHKADVNVISWNRLASCMIASGCDDGSFSVHDLRSIQDSLVAHFEYHKKAITSIEWSPHEASSLAVTSEDHQLTIWDLSLERDTEEEAEFRAKMKEQANAPDDLPPQLLFAHQGQRDLKEVHWHPQIPSMIISTAIDGFNVLMPSNIDTTIPGSTDTAMPPAEP

SEQ ID NO: 38763 - protein, 259 aa, Zea mays subsp. mays
MKVFSGHKDEGYAIDWSPLVTGRLVSGDCNKCIHLWEPTSNNWNVDANPFVGHTASVEDLQWSPTEADIFASCSVDGTISIWDVRTGKKPSISVKAHKADVNVISWNRLASCMIASGCDDGSFSVHDLRSIQDSLVAHFEYHKKAITSIEWSPHEASSLAVTSEDHQLTIWDLSLERDTEEEAEFRAKMKEQANAPDDLPPQLLFAHQGQRDLKEVHWHPQIPSMIISTAIDGFNVLMPSNIDTTIPGSTDTAMPPAEP

SEQ ID NO: 38764 - DNA, 1239 bp, Zea mays subsp. mays
taggctctaggttctttgaacattttaagttgttcactccaagtgtgaaaccaggtccctatttggacctgaagtgaagcattttaaagttgaaggacccagattctcacttcgagagtttatgaacctagatgagaatctaaggctctggaagttatggaacttgaccagaaaatagatctagttcatgagcttgatggtcatattatgcaatgtgtccgtgatcaaaatggaaatcacgttatacagaagtgcattgagtgtgtccccacagaacatattggttttgtagtgtctgcttttcagggacaagttactagcctttcaatgcatccatatggctgccgtgtaattcagagaatcttggagcactgcggtggtaactcacaaggccagtgcataatagacgagatattacagtgggtgtgcatccttgcgcaggatcagtatggcaactatgttacacagcatgttctagaaagaggaaaagctcatgagaggagccaaattattactaaattggccgggcaggttgttaccatgagccaaaataaatatgcatcaaatgtgatagagaagtgttttcaacatggtgatattgcggagcgggatcttctgatcagacggattgtggagcagacagagggcaacaacaatttattggcaatgatgaaggaccagtatgctaattacgtggtccataagatacttgaaacttgcaacgaggatcagcgggagcttctgctcagccacgtaaaggatcatatgcaagcattgaggaagtacacatacggcaagcacatcgtaagccgagtcgagcagctctgtggcgacgttgtcaccctttcaggaactgccgagtcaggttcttgaaacgaaccgccgcctaattcttcataggctggagggtgtcctgctcttttgctcattccgtcagtgacgaagaaagcaaaacggatcaagtctaactctggcgcttcagaacagactaacaaagctgtcgtcgaagattgtataggtatgactctgttcagggatagtcttgaggttatagaacagaagggtagtggtgtgcatcagtgtatctgtttactggataatagtggttggttaggtgtgtgcagaaaaagtttagcgctatggtttgtatgtgatacatattaactgtgccttggaatgttcatatgttgtcctgattgcgtgtgatatctctcgttcagttcaagttgcgttttctgc

SEQ ID NO: 38765 - protein, 238 aa, Zea mays subsp. mays
MELDQKIDLVHELDGHIMQCVRDQNGNHVIQKCIECVPTEHIGFVVSAFQGQVTSLSMHPYGCRVIQRILEHCGGNSQGQCIIDEILQWVCILAQDQYGNYVTQHVLERGKAHERSQIITKLAGQVVTMSQNKYASNVIEKCFQHGDIAERDLLIRRIVEQTEGNNNLLAMMKDQYANYVVHKILETCNEDQRELLLSHVKDHMQALRKYTYGKHIVSRVEQLCGDVVTLSGTAESGS

SEQ ID NO: 38766 - protein, 221 aa, Zea mays subsp. mays
MQCVRDQNGNHVIQKCIECVPTEHIGFVVSAFQGQVTSLSMHPYGCRVIQRILEHCGGNSQGQCIIDEILQWVCILAQDQYGNYVTQHVLERGKAHERSQIITKLAGQVVTMSQNKYASNVIEKCFQHGDIAERDLLIRRIVEQTEGNNNLLAMMKDQYANYVVHKILETCNEDQRELLLSHVKDHMQALRKYTYGKHIVSRVEQLCGDVVTLSGTAESGS

SEQ ID NO: 38767 - protein, 181 aa, Zea mays subsp. mays
MHPYGCRVIQRILEHCGGNSQGQCIIDEILQWVCILAQDQYGNYVTQHVLERGKAHERSQIITKLAGQVVTMSQNKYASNVIEKCFQHGDIAERDLLIRRIVEQTEGNNNLLAMMKDQYANYVVHKILETCNEDQRELLLSHVKDHMQALRKYTYGKHIVSRVEQLCGDVVTLSGTAESGS

SEQ ID NO: 38768 - DNA, 1759 bp, Zea mays subsp. mays
gacaaatctgaaatcacaaatctcatcatctccttcctcccttgcgagatctgatcgtatcaatggagatcttctacttcgtggttttcggtggcctggctgcgatcgtcgccggcttggagctgagcaaatcgaacaaagaccgcattaacacctcctccgccttcaactccttcaagaacaactatctcctcgtctactctctcatgatggctggggactggttgcagggtccgtatgtgtactatctctacagcacttatggcttcggaaagggagagatcggtcagctctttattgctggttttggatcttccatgttgtttggcaccattgttggatctcttgccgacaaacagggtcgcaagagagcttctatcacctattgtatcacctacattctcagctgtatcaccaaacattctccccagtacaaagttttgatggtcggtcgtgttcttggtggtatcgctacttctctccttttctctgccttcgaatcctggctcgtcgctgagcacaacaagagaggcttcgagcagcagtggctttctgtcactttctccaaggctattttcctcggtaatggattagtcgccatcattgctggcctctttggcaattaccttgtcgattctctctccctcggtcctgttgctcctttcgatgctgctgcttgcttccttgctattggtatggccgttattatctcatcttggtccgaaaactatggagatccatctgaaaacaaagaccttcttacccagttcaagaacgctgcatctgccattgcttctgatgagaagatcgctttgctcggtgctattcagtctctgtttgaagggtccatgtacacctttgtgtttctctggactcctgctttgagcccaaacgaagaggacattccacatggtttcatatttgcaactttcatgctggcttcgatgcttggtagctccattgcctctcgtctgttggcacattcgtctccaaaagtagagagctatatgcagatcgtatttgtgatatcttctgctgctctaatgcttcctgttgtaacaagcttcttggtggcgccctcaggtgtaaaaggtggaagcatatccttctctggatgcattcagttaatgggtttctgcacatttgaagcgtgtgtaggaatcttctggccatctataatgaagatgagatcgcaatacattccagaggaagctagaagcaccatcatgaattttttccgcatcccactcaacatctttgtctgccttgtattatacaatgttgacgcgtttccaatgaccgtgatgtttggaatatgctctgtattcctttttgtggcctctatattgcagaggaggttgatgaatgtagccgagatccacaagtcaagatcacaagagtggtcagcagaaaaggagatgacctcagaagctgaccctctaaacccataataaccaaatcaaccatgacataagaaaaaagaagaaacgccgttccgtttctcttgatgatttttctacttgtcttaatatgttcgttggtcataaagtctttccacttgtttagttatatttggattttgtgccttcaccagatgtagcaaacacaccctaatacctctgcacgtcagcttatttgggctttggccactattcttcttgaatctttcaactttttttttatgtgcgtcaaaaacaatctttataagtcgattttggccctaaaccataaaaatgtagtgttgttttaaaggaagctc

SEQ ID NO: 38769 - protein, 462 aa, Zea mays subsp. mays
MEIFYFVVFGGLAAIVAGLELSKSNKDRINTSSAFNSFKNNYLLVYSLMMAGDWLQGPYVYYLYSTYGFGKGEIGQLFIAGFGSSMLFGTIVGSLADKQGRKRASITYCITYILSCITKHSPQYKVLMVGRVLGGIATSLLFSAFESWLVAEHNKRGFEQQWLSVTFSKAIFLGNGLVAIIAGLFGNYLVDSLSLGPVAPFDAAACFLAIGMAVIISSWSENYGDPSENKDLLTQFKNAASAIASDEKIALLGAIQSLFEGSMYTFVFLWTPALSPNEEDIPHGFIFATFMLASMLGSSIASRLLAHSSPKVESYMQIVFVISSAALMLPVVTSFLVAPSGVKGGSISFSGCIQLMGFCTFEACVGIFWPSIMKMRSQYIPEEARSTIMNFFRIPLNIFVCLVLYNVDAFPMTVMFGICSVFLFVASILQRRLMNVAEIHKSRSQEWSAEKEMTSEADPLNP

SEQ ID NO: 38770 - protein, 414 aa, Zea mays subsp. mays
MMAGDWLQGPYVYYLYSTYGFGKGEIGQLFIAGFGSSMLFGTIVGSLADKQGRKRASITYCITYILSCITKHSPQYKVLMVGRVLGGIATSLLFSAFESWLVAEHNKRGFEQQWLSVTFSKAIFLGNGLVAIIAGLFGNYLVDSLSLGPVAPFDAAACFLAIGMAVIISSWSENYGDPSENKDLLTQFKNAASAIASDEKIALLGAIQSLFEGSMYTFVFLWTPALSPNEEDIPHGFIFATFMLASMLGSSIASRLLAHSSPKVESYMQIVFVISSAALMLPVVTSFLVAPSGVKGGSISFSGCIQLMGFCTFEACVGIFWPSIMKMRSQYIPEEARSTIMNFFRIPLNIFVCLVLYNVDAFPMTVMFGICSVFLFVASILQRRLMNVAEIHKSRSQEWSAEKEMTSEADPLNP

SEQ ID NO: 38771 - protein, 413 aa, Zea mays subsp. mays
MAGDWLQGPYVYYLYSTYGFGKGEIGQLFIAGFGSSMLFGTIVGSLADKQGRKRASITYCITYILSCITKHSPQYKVLMVGRVLGGIATSLLFSAFESWLVAEHNKRGFEQQWLSVTFSKAIFLGNGLVAIIAGLFGNYLVDSLSLGPVAPFDAAACFLAIGMAVIISSWSENYGDPSENKDLLTQFKNAASAIASDEKIALLGAIQSLFEGSMYTFVFLWTPALSPNEEDIPHGFIFATFMLASMLGSSIASRLLAHSSPKVESYMQIVFVISSAALMLPVVTSFLVAPSGVKGGSISFSGCIQLMGFCTFEACVGIFWPSIMKMRSQYIPEEARSTIMNFFRIPLNIFVCLVLYNVDAFPMTVMFGICSVFLFVASILQRRLMNVAEIHKSRSQEWSAEKEMTSEADPLNP

SEQ ID NO: 38772 - DNA, 1061 bp, Zea mays subsp. mays
gataaaaagtagtactcgtgtcttactcgtgccagccactcgcatttctccagattttattatccttcctcgaaacaagagcttagctaagatgacgaagaactacccaaccgtgagcgaagattacaagaaggctgttgagaagtgcaggaggaagctcagaggtttgatcgctgagaagaactgtgcacccatcatggtccgactcgcatggcactctgctggaactttcgattgtcaatcaaggactggaggtccattcggaacaatgaggtttgacgctgagcaagctcatggagccaacagtggtatccacattgctcttaggttgttggaccccatcagggagcaattccctaccatctcttttgctgatttccatcagcttgctggtgttgtggccgttgaagttactggtggccctgacattcctttccaccctggaagagaggacaagccccaaccacctccagagggtcgtcttcctgatgctaccaagggttgtgaccatttgagagatgtctttgctaagcagatgggcttatctgacaaagacattgtcgctttatctggtgcccacactctgggacgatgccacaaggataggtctggcttcgaaggtgcatggacatcaaaccctctaatcttcgacaactcttacttcaaggaactcttgagcggagagaaggaaggccttcttcagcttgtctctgacaaagcactattggacgaccctgttttccgtcctttggtcgagaaatacgctgctgatgaagatgcctttttcgctgattacgctgaggcccacatgaagctttctgagcttgggtttgctgatgcttaagctgtgacgtatgctctgtgtgtgtgtgtgtgtctccccgagagtcatggctgtttttggttgggggctggaggggtcgcattgcatttgaactttgtcatatgattgcttaatgtactctcggatttacgtatctgtttttttcggtgggttgtgatttgaacacatccgttgcgcttttgctgcttagacacattaataaaattaatttctctcg

SEQ ID NO: 38773 - protein, 280 aa, Zea mays subsp. mays
IKSSTRVLLVPATRISPDFIILPRNKSLAKMTKNYPTVSEDYKKAVEKCRRKLRGLIAEKNCAPIMVRLAWHSAGTFDCQSRTGGPFGTMRFDAEQAHGANSGIHIALRLLDPIREQFPTISFADFHQLAGVVAVEVTGGPDIPFHPGREDKPQPPPEGRLPDATKGCDHLRDVFAKQMGLSDKDIVALSGAHTLGRCHKDRSGFEGAWTSNPLIFDNSYFKELLSGEKEGLLQLVSDKALLDDPVFRPLVEKYAADEDAFFADYAEAHMKLSELGFADA

SEQ ID NO: 38774 - protein, 250 aa, Zea mays subsp. mays; identical to SEQ ID NO: 9356

SEQ ID NO: 38775 - protein, 215 aa, Zea mays subsp. mays; identical to SEQ ID NO: 9357

SEQ ID NO: 38776 - DNA, 616 bp, Zea mays subsp. mays
actgagaagaaggagagctcagaaaccaaagaagctcggaagagcacgcagagtccagaaggcggcggcaaaggcgacgagggtccagacagcaaggcggagggcgagaaggaagcggccgttgttgaccttaggccactgacgatggaagacctgaggcaggcaaagaaccaggttgcagcgagcttcgccgccgagggtgccgtgatgaacgagctcaggcagtggaacgacctgtacggcgaaggggggtccaggaagaaacagcagctgacctacttcttgtagaggtgaagcatttggcaggtggtggagaggaacagagctgggcagacggtggacccatacttgatgaaccgagcatggtttcttcaagacgtgacgtgggcatgacgcatagtactagtctttgaggttccaggatccatgagatgagatgaggtcgatggtcaatttgtaggatcatgaactattattcttttacatgcatttgtacatgagcgctagactggttatgtatatctggattgattgaacagctcttgtgtttgagggtcattttagcttctcgtagactgctgtaattatatcatatatagtgagtatatatattcac

SEQ ID NO: 38777 - protein, 95 aa, Zea mays subsp. mays
TEKKESSETKEARKSTQSPEGGGKGDEGPDSKAEGEKEAAVVDLRPLTMEDLRQAKNQVAASFAAEGAVMNELRQWNDLYGEGGSRKKQQLTYFL

SEQ ID NO: 38778 - protein, 47 aa, Zea mays subsp. mays; identical to SEQ ID NO: 38457

SEQ ID NO: 38779 - DNA, 977 bp, Zea mays subsp. mays
tctggccttaaaaacctctgctcccccgtctcggcgcgattgccatcgccatcgccatcgccatcgcgcaccgcctccccgtgtcccctccttctcgcccggcaccgtcgagctcggctgtggaaacagaacaaacccatcaaccatggcgaactcggcgtcggggatggccgtgagcgacgagtgcaagctcaagttccaggagctcaagtcgaagcgaagcttccggttcatcacgttcaagatcaacgagcagacgcagcaggtggtggtggacaggctggggcagccgggcgacacctacgacgacttcaccggctccatgcccgagagcgagtgccgctacgccgtcttcgacttcgacttcaccaccgacgagaactgccagaagagcaagatcttgttcatctcctggtccccggacacctcgagggtcaggagcaagatgctgtacgcgagctccaaggaccggttcaagagggagctggagggcatccagctggagctgcaggccaccgaccccagcgagatgagcatggacattgtcagggcgcgagctctctgaagaggaagacgcgcatccgctcgcgcgatcgccatgcatgccccggaacgacagaagctgtttgtcttgcatcgaccggcggcctctgcatgtacccgtgtgccgttttttgcaccgccggtgccagtgttctcttactccatgtaaactactctagacagtgctcggtgagtacagctgctcggtgagtacggtgtcacagtcactccgtgtaggcagtgccatttcgaagacaatattgcaaaatttaactaacttggttttacaatgcgtttggttggaagtattcctccgggtcactaataattcatgctttgtatatacatgacgtggtcgtggtctatggaatatagcttaaaccattactagtataatacgttgtaacaacacatcaatcatatttgatttatag

SEQ ID NO: 38780 - protein, 250 aa, Zea mays subsp. mays
SGLKNLCSPVSARLPSPSPSPSRTASPCPLLLARHRRARLWKQNKPINHGELGVGDGRERRVQAQVPGAQVEAKLPVHHVQDQRADAAGGGGQAGAAGRHLRRLHRLHARERVPLRRLRLRLHHRRELPEEQDLVHLLVPGHLEGQEQDAVRELQGPVQEGAGGHPAGAAGHRPQRDEHGHCQGASSLKRKTRIRSRDRHACPGTTEAVCLASTGGLCMYPCAVFCTAGASVLLLHVNYSRQCSVSTAAR

SEQ ID NO: 38781 - protein, 187 aa, Zea mays subsp. mays
LALKTSAPPSRRDCHRHRHRHRAPPPRVPSFSPGTVELGCGNRTNPSTMANSASGMAVSDECKLKFQELKSKRSFRFITFKINEQTQQVVVDRLGQPGDTYDDFTGSMPESECRYAVFDFDFTTDENCQKSKILFISWSPDTSRVRSKMLYASSKDRFKRELEGIQLELQATDPSEMSMDIVRARAL

SEQ ID NO: 38782 - protein, 139 aa, Zea mays subsp. mays
MANSASGMAVSDECKLKFQELKSKRSFRFITFKINEQTQQVVVDRLGQPGDTYDDFTGSMPESECRYAVFDFDFTTDENCQKSKILFISWSPDTSRVRSKMLYASSKDRFKRELEGIQLELQATDPSEMSMDIVRARAL

SEQ ID NO: 38783 - DNA, 1799 bp, Zea mays subsp. mays
gacttacaggtacatgagctgggtgagctgtccgacgctgtcgctgagcgtgccctggatgttgacacttgacagccgcctgcatgcaaacaaggcacgcacgaagcatgaagacccgttcagtctggtggctcgaatcgatcggtgaagaaaggaaggaaggaaggaaggaagttgcgcggtgattaagtaatataaagacacttgactacatctctgctgagggtggccggtgatgagcaacctgtctctttatttataacaaactcataccaagaatgatagattgcttctgtgaaaattatacggaacaagcagactgggcactcagaaggctatggttttattgagttttcctctcgagctgctgcagaacatactctggtgaacttcaatgggcagatgatgccaaatgttgagatgacttttaagctgaactgagcttctgctagcactggtgataagcgtggagatagtggttctgatcacacaatatttgttggtgatttggctcatggtgttactgactccatgttgaaagatgtgttcagagctaagtacccttcagttagaggagctaatgttgttgttgataggatgactggatggcccaaaggatatggtttcgtgcgttttggaaatctgaatgagcaggcacgtgctatgactgagatgaatggaatgttgttatctacaaggcaaatgaggattggtgctgcagttaacaagaagaatagggatgctcagtagacatatgcaactaacgctcggacggcgcgaggggcctcaccagcgtcggcctgtccaattccgagtctaggccagacagtgtggcacagcgtggcttcgaccacgacactgaagagagggtggaggagctcacattgaagaattgcatcaacaatggtatccagcctgaggtttctgctggtgggagcacaagcagcagggataggcctacccgtattaatggcttgtggggtaattttacacggagaactagcaatttggccagcagggaaaacgccgcactgagttctggtgacattgcaaacttgagggttggtgatgcttcagcaaaggcaataaggcttactggagtttctgcatactcaagggttcatgggcatcccagactcccagcaatggaatctgcaaggtatggctcattcgaaccatatgtggagaagtttaattccttattagtgagaggagaagatagaaaatgtagaatagttgtatagtgtttcaaaggcgttgcctacgcacgtccggccgtccaggtatctccagctcgctacctatttttgccattatggaatctgcaaggtatggctccacattgatacagttgatggtttgtctgcatatctagcaagtgtgcaggaggatgttgcatcagttatcattggtaaaaaaactatattgcatgcgcggactgcctctgatgctattgatatgaggatctcagttgatgaaagtgtaaaggacaagctctcaaatttggtagccaggctccaaaatcaaagctttaccgcttcccgaaagaactagcatcactctcagagtgcttgtttcatctgaaaaggagaccacttttaggtggcataatccgacatgaagatgaaagatctgtacttaggaatttgttcttgaatgcttagtttgacctttcacttcgtatgctaccacttcagtgtataatgcattgtgaagatgtacatctgtgcttgtttgatctgaaaaggggaccacttgtagatagcataataggatatgaagatgaaagatctgtactt

SEQ ID NO: 38784 - protein, 72 aa, Zea mays subsp. mays
MLKDVFRAKYPSVRGANVVVDRMTGWPKGYGFVRFGNLNEQARAMTEMNGMLLSTRQMRIGAAVNKKNRDAQ

SEQ ID NO: 38785 - protein, 50 aa, Zea mays subsp. mays
MTGWPKGYGFVRFGNLNEQARAMTEMNGMLLSTRQMRIGAAVNKKNRDAQ

SEQ ID NO: 38786 - protein, 48 aa, Zea mays subsp. mays
TYRYMSWVSCPTLSLSVPWMLTLDSRLHANKARTKHEDPFSLVARIDR

SEQ ID NO: 38787 - DNA, 1078 bp, Zea mays subsp. mays
gacaaacattactcattcacaaaaccatcttaaagcaactacacaaatcttgaaattttctcatattttctatttactatataaacttttaatcaaatcaagattaactatggctgaggagtacaagaacaacgttcccgagcacgagacaccaacggtcgcaacagaggaatcaccagcgacgacaacagaggttacggatcgtggattgtttgatttcttggggaagaaggaagaggaagtgaaacctcaagagacaacgacgctcgagtctgagttcgatcataaggctcagatctctgaaccggagttagctgcggagcacgaggaagtgaaggagaacaagattactctgctagaggagcttcaagaaaagaccgaggaagatgaggagaacaagactagtgtcatcgaaaagcttcaccgatccaacagctcttcttcctcttcgagcgatgaagaaggtgaggaaaagaaggagaagaagaagaagatcgttgaaggagaggaagataagaaaggactagtggagaagatcaaggagaagctcccaggacaccacgacaagacagcagaggatgatgtaccagtttccactaccatcccggtaccagtgtcggagagtgtggtggagcatgaccatcccgaggaagagaagaaaggattagttgagaagatcaaggagaagcttcctggtcaccacgacgagaaagcagaggattcaccagctgtcacctccacgccgttggttgtaacggagcatccggtggagcctacgacggagcttccagtggaacatccggaggagaagaaggggattttggaaaagatcaaagagaagcttccaggttatcatgccaagaccactgaagaggaagtgaagaaagaaaaagagtctgatgattaagcaaaatggttaaagaatgaataatgatgtgggagtgggacattcgctgtgttttgtgatcattatctttctcttttaagttgttattgtggctttcgttgattgcatttgatcctttattttgtaatttcattctatcttttatataaagtttgcatatggtttatactt

SEQ ID NO: 38788 - protein, 301 aa, Zea mays subsp. mays
TNITHSQNHLKATTQILKFSHIFYLLYKLLIKSRLTMAEEYKNNVPEHETPTVATEESPATTTEVTDRGLFDFLGKKEEEVKPQETTTLESEFDHKAQISEPELAAEHEEVKENKITLLEELQEKTEEDEENKTSVIEKLHRSNSSSSSSSDEEGEEKKEKKKKIVEGEEDKKGLVEKIKEKLPGHHDKTAEDDVPVSTTIPVPVSESVVEHDHPEEEKKGLVEKIKEKLPGHHDEKAEDSPAVTSTPLVVTEHPVEPTTELPVEHPEEKKGILEKIKEKLPGYHAKTTEEEVKKEKESDD

SEQ ID NO: 38789 - protein, 265 aa, Zea mays subsp. mays
MAEEYKNNVPEHETPTVATEESPATTTEVTDRGLFDFLGKKEEEVKPQETTTLESEFDHKAQISEPELAAEHEEVKENKITLLEELQEKTEEDEENKTSVIEKLHRSNSSSSSSSDEEGEEKKEKKKKIVEGEEDKKGLVEKIKEKLPGHHDKTAEDDVPVSTTIPVPVSESVVEHDHPEEEKKGLVEKIKEKLPGHHDEKAEDSPAVTSTPLVVTEHPVEPTTELPVEHPEEKKGILEKIKEKLPGYHAKTTEEEVKKEKESDD

SEQ ID NO: 38790 - DNA, 1703 bp, Zea mays subsp. mays
attccttgcttcatttttcgtcaccctagccgctttactctcttgcgatatctctgagatttgtttgacagtctctaaccatgggtaaagagaagtttcacatcaacattgtggtcattggccacgtcgattctggaaagtcgaccaccactggacacttgatctacaagttgggtggtattgacaagcgtgtcattgagaggttcgagaaggaggctgctgagatgaacaagaggtccttcaagtacgcatgggttttggacaaacttaaggctgagcgtgagcgtggtatcaccattgacattgctctctggaagttcgagaccaccaagtactactgcactgtcattgatgctcctggccatcgtgatttcatcaagaacatgatcactggtacctcccaggctgattgtgctgtccttatcatcgactccaccactggtggttttgaggctggtatctccaaggatggtcagacccgtgagcacgctctccttgctttcacccttggtgtcaaacagatgatctgctgttgtaacaagatggatgccactacccccaagtactccaaggccaggtacgatgaaattatcaaggaggtgtcttcctacttgaagaaggttggttacaaccccgacaaaatcccatttgtgcccatctctggattcgagggtgacaacatgattgagaggtccaccaacctagactggtacaagggaccaactcttcttgaggctcttgaccagatcaacgagcccaagaggccatcagacaagccccttcgtctcccacttcaggatgtctacaagattggtggtattggaacggtgccagtgggacgtgttgagactggtatgatcaagcctggtatggttgtgacctttgctcccacagggttgaccactgaggtcaagtctgttgagatgcaccacgagtctcttcttgaggcacttccaggtgacaacgttgggttcaatgttaagaatgttgctgtcaaggatcttaagagagggtacgtcgcatccaactccaaggatgaccctgccaagggtgctgctaacttcacctcccaggtcatcatcatgaaccaccctggtcagattggtaacggttacgccccagtcctggattgccacacctctcacattgcagtcaagttctctgagatcttgaccaagattgacaggcgttctggtaaggagattgagaaggagcccaagttcttgaagaatggtgatgctggtatggtgaagatgactccaaccaagcccatggttgtggagaccttctctgagtacccaccacttggacgtttcgctgtgagggacatgaggcagactgttgcagtcggtgttatcaagagtgttgacaagaaggacccaaccggagccaaggttaccaaggctgccgtcaagaagggtgcgaagtgaaccatcctcaaaactctatctgccgcaggtgaatcaaaggacagtgttagttttattacaatagtttggtatttggtcgcgtgtctgtgttcttgtttcgttttctccccgtcagagcgttgttctcgtaattgggttcttgatcggaggtggcggatctacacacacattcttcctgttttttgctttttatttgttttctcattttgaactgtttaaaatttctgttatatgaatgaatgttttccctgcggttattatcttctttactcc

SEQ ID NO: 38791 - protein, 449 aa, Zea mays subsp. mays; identical to SEQ ID NO: 7253

SEQ ID NO: 38792 - protein, 401 aa, Zea mays subsp. mays; identical to SEQ ID NO: 7254

SEQ ID NO: 38793 - protein, 348 aa, Zea mays subsp. mays; identical to SEQ ID NO: 7255

SEQ ID NO: 38794 - DNA, 682 bp, Zea mays subsp. mays
gaaagagaaaagaaattgagaagaaaaaaaaaaggtgaccgtattctccgtcgattgtagccgcctgaagaaatatcttctcctctctcgttgaaccacgaatttgctctgatattagtgtttctctagccatggcgaacgcggcatctggaatggctgtgcatgatgattgcaagctgagatttctggaactgaaggcgaaaaggacacaccgtttcatagtttacaagattgaggagaagcagaagcaagttgttgttgagaaagttggtcaaccgatccaaacttacgaggagtttgcagcatgtcttccagctgatgaatgccgttacgccatttacgattttgactttgtcactgctgagaattgccagaagagcaagatcttcttcatcgcgtggtgcccggatattgctaaggtgagaagcaagatgatctacgcaagctctaaggacaggttcaagagggaactagatgggattcaagtagagctacaggcaactgatccaacagagatggatctcgatgttttcagaagccgtgccaactaaagagtaaaaaccaaagtttattatcatcatccccttgaaagatctattctcttattctgttatttttgagtgatggtactggtacttgattatgtttttacattgtgttgtgaagttatgaacctataacc

SEQ ID NO: 38795 - protein, 139 aa, Zea mays subsp. mays
MANAASGMAVHDDCKLRFLELKAKRTHRFIVYKIEEKQKQVVVEKVGQPIQTYEEFAACLPADECRYAIYDFDFVTAENCQKSKIFFIAWCPDIAKVRSKMIYASSKDRFKRELDGIQVELQATDPTEMDLDVFRSRAN

SEQ ID NO: 38796 - protein, 132 aa, Zea mays subsp. mays
MAVHDDCKLRFLELKAKRTHRFIVYKIEEKQKQVVVEKVGQPIQTYEEFAACLPADECRYAIYDFDFVTAENCQKSKIFFIAWCPDIAKVRSKMIYASSKDRFKRELDGIQVELQATDPTEMDLDVFRSRAN

SEQ ID NO: 38797 - DNA, 628 bp, Zea mays subsp. mays
ccacacacacgcatccatcaaagaaacaagagcacacaaacaatacctctctagctcgccaccaacaatggcctctaggttctccatcatgctcgccacaacggcactggctacgttttttgtgattggttcgtgcaccaccccgctcaccttcaaggtcggcaaaggctccaagcctggccacctggtcctcacccccaacattgccaccatctccgaagtggagatcaaggagcacggtggcgatgacttctcctttgagctcaaggagggcccggccggcacctggacgcttgacacaaaggccccactcaagtaccccctctgcatccgctttgccatcaagtctggcggctaccgcatcgccgatgatgtcatccctgaaaattttaaggccgacaccacctacaagaccaccctcagcatctgatcatcctcttatgaggaataatattttgaaagagctcatctgatccatgtgccagcgagctaatatttaatttttgttctatggttattttatggcaccacaccacccaagaaataagttatgttacatgtcccttcgtgcaccttgttgtgttgggttaatacggttatataaattgaaatacaatatgtatttaat

SEQ ID NO: 38798 - protein, 142 aa, Zea mays subsp. mays
HTHASIKETRAHKQYLSSSPPTMASRFSIMLATTALATFFVIGSCTTPLTFKVGKGSKPGHLVLTPNIATISEVEIKEHGGDDFSFELKEGPAGTWTLDTKAPLKYPLCIRFAIKSGGYRIADDVIPENFKADTTYKTTLSI

SEQ ID NO: 38799 - protein, 120 aa, Zea mays subsp. mays
MASRFSIMLATTALATFFVIGSCTTPLTFKVGKGSKPGHLVLTPNIATISEVEIKEHGGDDFSFELKEGPAGTWTLDTKAPLKYPLCIRFAIKSGGYRIADDVIPENFKADTTYKTTLSI

SEQ ID NO: 38800 - protein, 113 aa, Zea mays subsp. mays
MLATTALATFFVIGSCTTPLTFKVGKGSKPGHLVLTPNIATISEVEIKEHGGDDFSFELKEGPAGTWTLDTKAPLKYPLCIRFAIKSGGYRIADDVIPENFKADTTYKTTLSI

SEQ ID NO: 38801 - DNA, 2013 bp, Zea mays subsp. mays
gcccactgctcagtccactgcccagcacggatctcatctcaccagctgcccgcgcatccaattcctctcgctggacggctgcagcacatcatcaggtgagaccgtgagagggaatgggatcaacaacaatgtcccctccatcttttcccgtcgtcctcctgctcctcctcctcgccaccatagccgcagccgccggaagcaacatggatgaggaggtggtggacgacctccagtatcttattgacaactccgacgacatccccaccaacgatcccgacgggtggcctgagggagactacgacgacgacgaccttctcttccaagatcaggaccaggacctcacaggccaccagccggagatcgacgagacccacgtcgtggtcctcgccgccgcaaacttttcctccttcctcgcctccagccaccatgttatggttgagttctacgcaccttggtgtggccactgccaggagctcgccccggattacgccgccgccgccgcgcatctcgccgctcaccaccaccaggcccacctcgcccttgccaaggtcgacgccaccgaggaaaccgacctcgcccagaagtacgacgtccagggcttccccaccatcctcttcttcatcgatggcgtccccagaggctataacggagccaggaccaaggaagccatcgtcgactggatcaacaagaagctcggcccagccgtgcaaaatgtcaccagcgtcgacgaggcccagagcatactcaccggagatgacaaagccgtccttgccttcctcgacacactatccggtgctcacagtgatgagcttgctgctgcttcgaggctggaagatagcatcaacttttatcagacttcgactcctgatgttgctaagcttttccatatcgatgcagcagcgaagcgtccatccgtagtgctgctgaagaaagaggaggagaagttgaccttctatgatggggagtttaaagcatcagccattgctggttttgtgtctgctaacaagcttcctttggtgaccacactaactcaagaaacttccccttctatttttggcaatccaatcaagaagcagattttactatttgctgttgcaagcgagtccaccaaatttctgcccatctttaaggaagcagcaaaaccatttaagggaaagttattatttgtctttgtggaacgagacagtgaggaagttggtgaaccagttgccgactactttggtattactggacaagagaccacagttcttgcttacactggtaatgaagatgctaggaaattttttcttgatggtgaggtgtcacttgaagctataaaggacttcgctgaaggtttcttggaagacaagcttacaccattctacaaatcggaaccagtgcctgaatctaatgatggggatgtgaaaattgttgttgggaagaatctggatctaatagtttttgatgaaacaaaagatgtacttcttgagatatatgcaccatggtgtggtcattgtcaatcgctggaacctacttacaacaatctagccaagcatctacgtagtgttgactcccttgtggtagccaaaatggatggtactaccaatgagcatccacgtgcaaagtctgacggatacccgacgattctcttctatccagctgggaagaaaagctttgagccaatcacttttgagggggagcggacagtggtagatctgtacaagttcatcaagaaacatgctagcatccctttcaagttgaagcgccaggagtcgagaaccgagagcactcgggcggagggtgtgaagagctctggtacgaactcaaaggacgaactgtaaagagctcagggttggatgtgtgttggagtggatcagggtgaaagtttccatctcaatacaagtagatcgatcttggtggatgcgagtgcagtgttggcctgagggaggagcagcagagatgagtgcttactgcttagagagaggaatgaaatcagcaactaatcaaataaaatcaaattccattattcctttt

SEQ ID NO: 38802 - protein, 568 aa, Zea mays subsp. mays
MGSTTMSPPSFPVVLLLLLLATIAAAAGSNMDEEVVDDLQYLIDNSDDIPTNDPDGWPEGDYDDDDLLFQDQDQDLTGHQPEIDETHVVVLAAANFSSFLASSHHVMVEFYAPWCGHCQELAPDYAAAAAHLAAHHHQAHLALAKVDATEETDLAQKYDVQGFPTILFFIDGVPRGYNGARTKEAIVDWINKKLGPAVQNVTSVDEAQSILTGDDKAVLAFLDTLSGAHSDELAAASRLEDSINFYQTSTPDVAKLFHIDAAAKRPSVVLLKKEEEKLTFYDGEFKASAIAGFVSANKLPLVTTLTQETSPSIFGNPIKKQILLFAVASESTKFLPIFKEAAKPFKGKLLFVFVERDSEEVGEPVADYFGITGQETTVLAYTGNEDARKFFLDGEVSLEAIKDFAEGFLEDKLTPFYKSEPVPESNDGDVKIVVGKNLDLIVFDETKDVLLEIYAPWCGHCQSLEPTYNNLAKHLRSVDSLVVAKMDGTTNEHPRAKSDGYPTILFYPAGKKSFEPITFEGERTVVDLYKFIKKHASIPFKLKRQESRTESTRAEGVKSSGTNSKDEL

SEQ ID NO: 38803 - protein, 563 aa, Zea mays subsp. mays
MSPPSFPVVLLLLLLATIAAAAGSNMDEEVVDDLQYLIDNSDDIPTNDPDGWPEGDYDDDDLLFQDQDQDLTGHQPEIDETHVVVLAAANFSSFLASSHHVMVEFYAPWCGHCQELAPDYAAAAAHLAAHHHQAHLALAKVDATEETDLAQKYDVQGFPTILFFIDGVPRGYNGARTKEAIVDWINKKLGPAVQNVTSVDEAQSILTGDDKAVLAFLDTLSGAHSDELAAASRLEDSINFYQTSTPDVAKLFHIDAAAKRPSVVLLKKEEEKLTFYDGEFKASAIAGFVSANKLPLVTTLTQETSPSIFGNPIKKQILLFAVASESTKFLPIFKEAAKPFKGKLLFVFVERDSEEVGEPVADYFGITGQETTVLAYTGNEDARKFFLDGEVSLEAIKDFAEGFLEDKLTPFYKSEPVPESNDGDVKIVVGKNLDLIVFDETKDVLLEIYAPWCGHCQSLEPTYNNLAKHLRSVDSLVVAKMDGTTNEHPRAKSDGYPTILFYPAGKKSFEPITFEGERTVVDLYKFIKKHASIPFKLKRQESRTESTRAEGVKSSGTNSKDEL

SEQ ID NO: 38804 - protein, 538 aa, Zea mays subsp. mays
MDEEVVDDLQYLIDNSDDIPTNDPDGWPEGDYDDDDLLFQDQDQDLTGHQPEIDETHVVVLAAANFSSFLASSHHVMVEFYAPWCGHCQELAPDYAAAAAHLAAHHHQAHLALAKVDATEETDLAQKYDVQGFPTILFFIDGVPRGYNGARTKEAIVDWINKKLGPAVQNVTSVDEAQSILTGDDKAVLAFLDTLSGAHSDELAAASRLEDSINFYQTSTPDVAKLFHIDAAAKRPSVVLLKKEEEKLTFYDGEFKASAIAGFVSANKLPLVTTLTQETSPSIFGNPIKKQILLFAVASESTKFLPIFKEAAKPFKGKLLFVFVERDSEEVGEPVADYFGITGQETTVLAYTGNEDARKFFLDGEVSLEAIKDFAEGFLEDKLTPFYKSEPVPESNDGDVKIVVGKNLDLIVFDETKDVLLEIYAPWCGHCQSLEPTYNNLAKHLRSVDSLVVAKMDGTTNEHPRAKSDGYPTILFYPAGKKSFEPITFEGERTVVDLYKFIKKHASIPFKLKRQESRTESTRAEGVKSSGTNSKDEL

SEQ ID NO: 38805 - DNA, 833 bp, Zea mays subsp. mays
gacctccccccgtttcaatcaaaatggaaaaaagtttcctcccttcccctctcttctgaatccggcatcaccatgcagaacaccgtcgcgaacccttccactgcggccgccgccgctgcggcagggaacggcggcgtccaagcatcgggggctggaggggagcggccggaggacgcgtcgaagcagaacctggcgcaggtgacgagctccatccagaagacgctgggcctgctccaccagctcaacctcaccgtctcctccttcaactctgcctcccagctccccctcctccagcgcctgaatgcgcttgtggcggagctcgacacgatgcagaaactcgccgaggggtgcaacatccaggtgcctatggaggtcgtcaatttgatcgacgatgggaagaaccccgacgagttcactagggacgtgctcaacagctgcatcgtcaaaaaccagatcaccaagggcaagactgacgctttcaagggcctacggaagcatcttcttgaggagcttgaacaagctttccctgaggacgtagaagcatacagggagatacgtgctacttctgctgctgaggcaaagcggttggctcagtcccagggtactttgcctaatggagatgtcaaagtgaaagctgagcattgagcgaatggtacgactacagagggcaagtttgttatctctgcttagttttggggatggctttgttaaccagaaacatgcatatctttctattgcacgtcccctgatcagtgaatgtgtacatactatcgtagcatgtgtggccgcaatgtattcaacttaactaataacttcaaaaagatatccggaac

SEQ ID NO: 38806 - protein, 214 aa, Zea mays subsp. mays
DLPPFQSKWKKVSSLPLSSESGITMQNTVANPSTAAAAAAAGNGGVQASGAGGERPEDASKQNLAQVTSSIQKTLGLLHQLNLTVSSFNSASQLPLLQRLNALVAELDTMQKLAEGCNIQVPMEVVNLIDDGKNPDEFTRDVLNSCIVKNQITKGKTDAFKGLRKHLLEELEQAFPEDVEAYREIRATSAAEAKRLAQSQGTLPNGDVKVKAEH

SEQ ID NO: 38807 - protein, 190 aa, Zea mays subsp. mays
MQNTVANPSTAAAAAAAGNGGVQASGAGGERPEDASKQNLAQVTSSIQKTLGLLHQLNLTVSSFNSASQLPLLQRLNALVAELDTMQKLAEGCNIQVPMEVVNLIDDGKNPDEFTRDVLNSCIVKNQITKGKTDAFKGLRKHLLEELEQAFPEDVEAYREIRATSAAEAKRLAQSQGTLPNGDVKVKAEH

SEQ ID NO: 38808 - DNA, 736 bp, Zea mays subsp. mays
ataaatcatatgagaaacgactgtggtcgggaccgggccttagacccatgctttggcgtggtactgacgaggagatttctttaaccacaacctgaaattcgctcccatgggaagtcaactccaggatctgagtagtgctactcagaccacctaactaactcagctataaccctttcgcacatacatttcatataggtatgaacgattttgtattttgtatctttcaaatgctaatcaaggaaatttctgatttcgcagacacaacatatgcttgatcagctcactgatcttcagaggagggagcaaatgctgtgtgaagcaaataagtgccttagaagaaagctggaggagaccagcaaccaggtgcatggccaagtgtgggagcacggtgccaacttactcggctacgagaggcactctcctcaacagcaggccccatcacatgttggcaatggtttgttctttcatcccctggaagctgcagcagagccaaccctgcagatcggtttcgctcctgagcatatgaataacttcatgccaacatggctaccctgaagatggatcttgaggcaaaggaaataaataaagatgcggtggcagcatcatactctatgcaagctaagagtgacagctgtgtttcagtcacatatatgatctagtctgtgtgtcaatgtgtcgaaaaacatgtctgtgattttgttatatgaatgtaacgcgcaatgaaacatacaggact

SEQ ID NO: 38809 - protein, 95 aa, Zea mays subsp. mays
MLDQLTDLQRREQMLCEANKCLRRKLEETSNQVHGQVWEHGANLLGYERHSPQQQAPSHVGNGLFFHPLEAAAEPTLQIGFAPEHMNNFMPTWLP

SEQ ID NO: 38810 - protein, 82 aa, Zea mays subsp. mays; identical to SEQ ID NO: 14495

SEQ ID NO: 38811 - protein, 52 aa, Zea mays subsp. mays
MAKCGSTVPTYSATRGTLLNSRPHHMLAMVCSFIPWKLQQSQPCRSVSLLSI

SEQ ID NO: 38812 - DNA, 1643 bp, Zea mays subsp. mays
aagtttgaggaggggtgttaaggcccattaggcccaggcctacagcctatatatattatatagtccttagggactcatcattattgattaatctcaaggttagtaacagctagaagggcaagcctggtgcagtggcgagagctattttactgagtcagcaagtcaggggtttgaagcagcttctccagatttgcgggggaaaggcttgccttggtttatcactttctcagattccactcatgtgggagccttcgatcgggttagctcttgatgtagttgaccgcatgtgtaaatccagttctgatgtgccaattgaatcatttcacccaatcatacatgcttgtgaacaaagatgtgaacttcacatggcccgccccatatatgatttgatccgccaccacaatttgaaatttaaaagcaaaacattcagaagcataataagtttatttgtaaaattgaaggattttgaaggtgcttacaatatactcacagacgctgaagaatctggggagatatcaaccgtaagcctgtataatgctataatgctagggtattatagggagaaaaactacaatggagcacaaatggtcatgtctcaaatgcagattgctggagtaaaaccagattctgagacattcagttatttgatagcgaattgtgagtctgaagagaacatttctaagtactgtgaccaattacggcaagatttaattccaatgaccagaaatatatatgttgcactcattgttgcatacgcaagacttggtaattttgatatggccaagcaggttctactcgataaagaaataccatgtaagttcctcagtgacatcaagagcgcacttgtaggagcgctggcattaaatgggcaagtgtcggatgcacttcgcttgcatgatgagataatgcaatccggcggctccctggaaccaaaagctgccattgccttgattgagcatattcgaacagaaggtgaactggatagaatgcatcaacttctcgatgggctgaatgactcaaacagctggtttgatggctgtggcagagtacttttatactgtgtccagcacaactatcctgatgctgcaattgatctacttaagcagatcagggagaaagatgaaatgagtacatatatggttgttgatcaggttttttgccaaatatgggacatggagaccacaaatttggattttggaatggtgtttcttgatgctgtcaaagagcttggacttaatgtttctcggacaagccttgactttcttctcagcgcatgtgtaaaagcaaaggatttgcgacgtgcccaacagatctggacagaatacgaatctgctggtcttccacacaacgtgctgagttccttgaggatgtatcaagcttttctttcatctgggggacgtaaggcggctaagaagttgttgaaaaagatacaaaaggaagatgctcacgtgcgctacataacatatgcttgtcgtgcgacatactgcagtaaagacttcaagccttctgctacagttaggttaagttccaaaggaagagctagatcaaaacctactaatgaggggtaagaggtctatttacttttaccacttccgttgcagtgaaatactgaaacgggatgaaatcaattcttttgttctggg

SEQ ID NO: 38813 - protein, 442 aa, Zea mays subsp. mays
MWEPSIGLALDVVDRMCKSSSDVPIESFHPIIHACEQRCELHMARPIYDLIRHHNLKFKSKTFRSIISLFVKLKDFEGAYNILTDAEESGEISTVSLYNAIMLGYYREKNYNGAQMVMSQMQIAGVKPDSETFSYLIANCESEENISKYCDQLRQDLIPMTRNIYVALIVAYARLGNFDMAKQVLLDKEIPCKFLSDIKSALVGALALNGQVSDALRLHDEIMQSGGSLEPKAAIALIEHIRTEGELDRMHQLLDGLNDSNSWFDGCGRVLLYCVQHNYPDAAIDLLKQIREKDEMSTYMVVDQVFCQIWDMETTNLDFGMVFLDAVKELGLNVSRTSLDFLLSACVKAKDLRRAQQIWTEYESAGLPHNVLSSLRMYQAFLSSGGRKAAKKLLKKIQKEDAHVRYITYACRATYCSKDFKPSATVRLSSKGRARSKPTNEG

SEQ ID NO: 38814 - protein, 427 aa, Zea mays subsp. mays
MCKSSSDVPIESFHPIIHACEQRCELHMARPIYDLIRHHNLKFKSKTFRSIISLFVKLKDFEGAYNILTDAEESGEISTVSLYNAIMLGYYREKNYNGAQMVMSQMQIAGVKPDSETFSYLIANCESEENISKYCDQLRQDLIPMTRNIYVALIVAYARLGNFDMAKQVLLDKEIPCKFLSDIKSALVGALALNGQVSDALRLHDEIMQSGGSLEPKAAIALIEHIRTEGELDRMHQLLDGLNDSNSWFDGCGRVLLYCVQHNYPDAAIDLLKQIREKDEMSTYMVVDQVFCQIWDMETTNLDFGMVFLDAVKELGLNVSRTSLDFLLSACVKAKDLRRAQQIWTEYESAGLPHNVLSSLRMYQAFLSSGGRKAAKKLLKKIQKEDAHVRYITYACRATYCSKDFKPSATVRLSSKGRARSKPTNEG

SEQ ID NO: 38815 - protein, 400 aa, Zea mays subsp. mays
MARPIYDLIRHHNLKFKSKTFRSIISLFVKLKDFEGAYNILTDAEESGEISTVSLYNAIMLGYYREKNYNGAQMVMSQMQIAGVKPDSETFSYLIANCESEENISKYCDQLRQDLIPMTRNIYVALIVAYARLGNFDMAKQVLLDKEIPCKFLSDIKSALVGALALNGQVSDALRLHDEIMQSGGSLEPKAAIALIEHIRTEGELDRMHQLLDGLNDSNSWFDGCGRVLLYCVQHNYPDAAIDLLKQIREKDEMSTYMVVDQVFCQIWDMETTNLDFGMVFLDAVKELGLNVSRTSLDFLLSACVKAKDLRRAQQIWTEYESAGLPHNVLSSLRMYQAFLSSGGRKAAKKLLKKIQKEDAHVRYITYACRATYCSKDFKPSATVRLSSKGRARSKPTNEG

SEQ ID NO: 38816 - DNA, 1449 bp, Zea mays subsp. mays
tacgcgcgggtgaccggcagcacctcgtctctctcgatgtgccaatggcgccgcctccatcctacccagtctccacctcagtcaccgcgttcgtcaaggaggaggacgccccaacccctttggtggcctccccgatggcgccgcctctgtcctacccgacctcgagttcattgagatccagaaggagcaggcgcaaacttctccatgcacgggaggtcaagcggagtatgcgcgaacttctttgtgttgtcgcccgaggctgactccagcatctccttcctggccagatccatggaggcatcgcaagcccagatcccgctgtcgttaggagctaatggttggtgctcgtgtggcacggcaacgcgacgacggagcaaatcggagagcctcggtacaaggttttcataaatccgagcattagtgatgtcctgtgcacaacaacaatagaggctctttcaatggggaaattcatgatctgcgcaagacatccatgaaatgagtttttcatgtcattttccgaactgtttgacatacaagacttcagaggagtttgttgcgagagtgaaagaggcaatggatagagaaccccaacagctaacccctgagcaaagatacaacctttcatgggaggcagcgactgagagattcatggagtactcagaccttgacaaggttctgaacaatgaggctgctcagcctaaacaaggtaggaaaagaaagaataaaagaacctcacagcctaatttgttcgacatcatggatggcggtctagcgttggcccatcgatgcttaaccggcaatgaggttctcaggctggcaaccgaagccattcctggtacccgggactacgataagagcaatgtgtggatatgggtctcttgcctcctcaagtacaacaccctgtatatggctggtgatgactgatgagcacccaaagctaatcgtagaaatgtgtagtacatggacatcaaaagttcatgactccagaagactgtcagcacaatattgtctgcttttgccattgaattagagaaacatagtcttaaaaatttaagagcatctctggccgcagagggcgcgcctgtgccaacgacggaagcaaagaagctggcgtcctccatcgcgaggtccaagcaggagatcacagaggacttctcgtcgattggcaggacatggcccccgcggcggtctaagaagagaccaggtgcaacgacaactcaatgtaagaattgctggattttgtctcccctccaaattcagtgtttcatgagattttttcccttttcctttaattttcctatatcacaaagaagaaccgaaaggcgagaggatttcatttcacaggtcgacttgcttctaccatctggttgtttgtggacagtattttggtgctgatttcgttatcatgtgttatgtttgttttattttaacatcactccagatttgatg

SEQ ID NO: 38817 - protein, 142 aa, Zea mays subsp. mays
MSFSCHFPNCLTYKTSEEFVARVKEAMDREPQQLTPEQRYNLSWEAATERFMEYSDLDKVLNNEAAQPKQGRKRKNKRTSQPNLFDIMDGGLALAHRCLTGNEVLRLATEAIPGTRDYDKSNVWIWVSCLLKYNTLYMAGDD

SEQ ID NO: 38818 - protein, 116 aa, Zea mays subsp. mays
MDREPQQLTPEQRYNLSWEAATERFMEYSDLDKVLNNEAAQPKQGRKRKNKRTSQPNLFDIMDGGLALAHRCLTGNEVLRLATEAIPGTRDYDKSNVWIWVSCLLKYNTLYMAGDD

SEQ ID NO: 38819 - protein, 91 aa, Zea mays subsp. mays
MEYSDLDKVLNNEAAQPKQGRKRKNKRTSQPNLFDIMDGGLALAHRCLTGNEVLRLATEAIPGTRDYDKSNVWIWVSCLLKYNTLYMAGDD

SEQ ID NO: 38820 - DNA, 880 bp, Zea mays subsp. mays
gaccacacaataccatttgcaaaaaacttctctctgaatctcagtgagttctcataaaatgagagggatggtgagttttgccgtttgggctctctttgctgctttactctcacagcagctctttgcttctgttgcttccgtaaggtttgaggatgccaaaacatactacttatctcctccctctggctcacatggaactcctccatcacacacgcctccttcttctaactgtggaagtccaccttacgacccttctccttcaactccttctcacccttcacctccatcacatactccaactccttccactccatcacacactccaactccacacactccatcacacacgccaactccacacacccctccttgtaactgtggaagtccaccttcccacccttccacgccttcacacccttccactccttcgcacccaacgccatcacaccctccttctggtggatattactcatctcctccaccaagaactccggttgttgtgactccaccatcacccattgttgatccaggcacacccatcattggaggaagcccaccaactcctatcattgacccaggcactcctggaactcctttcattcctgctcctttcccaccaatcactggaacatgcgattactggagaaaccaccctacattgatatggggcttgcttggatggtggggaactgttggaggagcttttggtacagtcagtattcccagtagcattccagggtttgatcctcacatgaaccttcttcaggcaatttgaagtgtcctatagtctctagtaatatttatgatggatacttccttttatttaatgttgttgtttcaaaaaatttcttgatcttaaataagatttagtagttcctct

SEQ ID NO: 38821 - protein, 238 aa, Zea mays subsp. mays
MRGMVSFAVWALFAALLSQQLFASVASVRFEDAKTYYLSPPSGSHGTPPSHTPPSSNCGSPPYDPSPSTPSHPSPPSHTPTPSTPSHTPTPHTPSHTPTPHTPPCNCGSPPSHPSTPSHPSTPSHPTPSHPPSGGYYSSPPPRTPVVVTPPSPIVDPGTPIIGGSPPTPIIDPGTPGTPFIPAPFPPITGTCDYWRNHPTLIWGLLGWWGTVGGAFGTVSIPSSIPGFDPHMNLLQAI

SEQ ID NO: 38822 - protein, 235 aa, Zea mays subsp. mays
MVSFAVWALFAALLSQQLFASVASVRFEDAKTYYLSPPSGSHGTPPSHTPPSSNCGSPPYDPSPSTPSHPSPPSHTPTPSTPSHTPTPHTPSHTPTPHTPPCNCGSPPSHPSTPSHPSTPSHPTPSHPPSGGYYSSPPPRTPVVVTPPSPIVDPGTPIIGGSPPTPIIDPGTPGTPFIPAPFPPITGTCDYWRNHPTLIWGLLGWWGTVGGAFGTVSIPSSIPGFDPHMNLLQAI

SEQ ID NO: 38823 - DNA, 1749 bp, Zea mays subsp. mays
gacccagagcgagtcaccttatcgtctctctatctcctccttcctatatccccttgctctctgggtttttgctcagtgtgctacgtgagagatagagagatggaaggtctgattcaaaccagaggaattctctctttacccgcgaagcccatcggagtgagaaggcttctccaaccctcacatggcttaaagcaaagacttttcaccacaaacttacctgccttgtccttatcctctaatggtcacaagaaatttcaagcctttcagcaaatcccacttgggatttcggtttcccacaaggagagaagcagaggattcatctgcaaggcggaagctgcggcggccggaggcggaaatgtgttcgacgaaggagacacagcggcgatggcggtgtcgcctaagattttcggtgtggaggttacgactctgaagaagattgttcctttagggctaatgttcttttgcatccttttcaattacacaatccttagggacacgaaggatgttttggtggtgacggctaaaggaagttctgctgagattataccctttttgaagacatgggtgaatcttccgatggctattgggtttatgttgctatacaccaaactttccaatgttctctccaaaaaggctctcttttacactgttattgttcctttcattgtctactttggagcctttggtttcgtgatgtaccctctcagcaatttgattcatcctgaagctcttgctgataagcttcttgcaacactcggccccagattcatgggtcctctcgcaatcatgaggatttggagtttctgtttgttctatgtcatggctgagctttggggtagtgttgtcgtttcagttctcttctggggatttgccaaccagattacaactgttgacgaagccaaaaagttctatcctctgtttggacttggggccaatattgcacttatcttctcaggaagaactgtgaaatatttctctaatatgagaaagaatcttggtcctggagttgatggctgggctgtttcattaaaagctatgatgagtattgtcgtggggatgggtctcgccatctgtttcctctactggtgggtgaatagatatgtgcccctcccaacccgtagcaagaagaagaaggtgaaaccacagatgggaacaatggagagcttgaagttcttggtgtcatcaccatacattagggatcttgctactttggtggttgcatatggaattagtatcaaccttgttgaagtcacatggaaatcaaagcttaaagctcagttccctagcccgaacgaatactcagcatttatgggcgacttctcaacctgcacaggtattgcaacattcacaatgatgcttctaagccaatacgtgtttaagaagtatggttggggagtagctgcaaagatcacaccaaccgttctgctattgaccggtgttgccttcttctctctgatactgtttggtggcccattagcaccattggttgccaagcttggtatgacaccgctactcgcagcagtgtacgttggtgccctccagaatatcttcagcaagagtgccaagtacagcttgttcgatccttgcaaagaaatggcttatatcccattggatgaggacaccaaggttaaaggcaaagctgcaattgatgtggtctgcaacccattggggaaatcaggcggtgctctaatccagcagttcatgatccttacattcggctcactcgccaattccacaccttaccttggg

SEQ ID NO: 38824 - protein, 583 aa, Zea mays subsp. mays
DPERVTLSSLYLLLPISPCSLGFCSVCYVRDREMEGLIQTRGILSLPAKPIGVRRLLQPSHGLKQRLFTTNLPALSLSSNGHKKFQAFQQIPLGISVSHKERSRGFICKAEAAAAGGGNVFDEGDTAAMAVSPKIFGVEVTTLKKIVPLGLMFFCILFNYTILRDTKDVLVVTAKGSSAEIIPFLKTWVNLPMAIGFMLLYTKLSNVLSKKALFYTVIVPFIVYFGAFGFVMYPLSNLIHPEALADKLLATLGPRFMGPLAIMRIWSFCLFYVMAELWGSVVVSVLFWGFANQITTVDEAKKFYPLFGLGANIALIFSGRTVKYFSNMRKNLGPGVDGWAVSLKAMMSIVVGMGLAICFLYWWVNRYVPLPTRSKKKKVKPQMGTMESLKFLVSSPYIRDLATLVVAYGISINLVEVTWKSKLKAQFPSPNEYSAFMGDFSTCTGIATFTMMLLSQYVFKKYGWGVAAKITPTVLLLTGVAFFSLILFGGPLAPLVAKLGMTPLLAAVYVGALQNIFSKSAKYSLFDPCKEMAYIPLDEDTKVKGKAAIDVVCNPLGKSGGALIQQFMILTFGSLANSTPYLG

SEQ ID NO: 38825 - protein, 550 aa, Zea mays subsp. mays
MEGLIQTRGILSLPAKPIGVRRLLQPSHGLKQRLFTTNLPALSLSSNGHKKFQAFQQIPLGISVSHKERSRGFICKAEAAAAGGGNVFDEGDTAAMAVSPKIFGVEVTTLKKIVPLGLMFFCILFNYTILRDTKDVLVVTAKGSSAEIIPFLKTWVNLPMAIGFMLLYTKLSNVLSKKALFYTVIVPFIVYFGAFGFVMYPLSNLIHPEALADKLLATLGPRFMGPLAIMRIWSFCLFYVMAELWGSVVVSVLFWGFANQITTVDEAKKFYPLFGLGANIALIFSGRTVKYFSNMRKNLGPGVDGWAVSLKAMMSIVVGMGLAICFLYWWVNRYVPLPTRSKKKKVKPQMGTMESLKFLVSSPYIRDLATLVVAYGISINLVEVTWKSKLKAQFPSPNEYSAFMGDFSTCTGIATFTMMLLSQYVFKKYGWGVAAKITPTVLLLTGVAFFSLILFGGPLAPLVAKLGMTPLLAAVYVGALQNIFSKSAKYSLFDPCKEMAYIPLDEDTKVKGKAAIDVVCNPLGKSGGALIQQFMILTFGSLANSTPYLG

SEQ ID NO: 38826 - protein, 455 aa, Zea mays subsp. mays
MAVSPKIFGVEVTTLKKIVPLGLMFFCILFNYTILRDTKDVLVVTAKGSSAEIIPFLKTWVNLPMAIGFMLLYTKLSNVLSKKALFYTVIVPFIVYFGAFGFVMYPLSNLIHPEALADKLLATLGPRFMGPLAIMRIWSFCLFYVMAELWGSVVVSVLFWGFANQITTVDEAKKFYPLFGLGANIALIFSGRTVKYFSNMRKNLGPGVDGWAVSLKAMMSIVVGMGLAICFLYWWVNRYVPLPTRSKKKKVKPQMGTMESLKFLVSSPYIRDLATLVVAYGISINLVEVTWKSKLKAQFPSPNEYSAFMGDFSTCTGIATFTMMLLSQYVFKKYGWGVAAKITPTVLLLTGVAFFSLILFGGPLAPLVAKLGMTPLLAAVYVGALQNIFSKSAKYSLFDPCKEMAYIPLDEDTKVKGKAAIDVVCNPLGKSGGALIQQFMILTFGSLANSTPYLG

SEQ ID NO: 38827 - DNA, 1240 bp, Zea mays subsp. mays
acacaacaaacacaacttctacaagactcaaatagtttctatttaattactaaaaagaaaaatgggtcgtggttacaatttgctattcgttctagtaacgtttttagtattggttgcagctgtaaccgcacaagggaaccgtggctcaaacagcggtggtggtcgaagaccacatgttgggttttatgggaatagatgccgaaacgtagagtctattgtgagatctgtagttcagtctcatgtccggtctatcccggctaatacacctggaattttgcgaatgcatttccacgattgctttgtccatggctgcgatggctcggttctcctcgctggtaacacctcagagagaaccgcagttccgaaccgttcattgagagggttcgaagttattgaagaagctaaggctcggcttgagaaggcttgtcctcgtaccgtttcttgtgctgatattctcacccttgcagcccgagacgccgtcgttttgaccggtggacaacgctgggaagtgcccttgggacgtctcgacggccgaatctcgcaagcctcagacgtgaacttgcccggaccaagcgactccgttgctaagcagaagcaagacttcgctgctaaaactctcaacacattagacctcgtgactcttgttggcggacacacaataggaactgctggctgcggtctagtaaggggaaggttcgttaacttcaacggcacaggacaacctgacccatcaatcgacccgagttttgtgccgctgattctggctcagtgccctcaaaatggaggcacccgagtggagttagacgagggaagtgttgacaagtttgacacatcgttcctaaggaaggtgacgtcaagtcgcgtggttctccaatccgatctagtcctatggaaggatcccgagacccgagccatcattgaacgtttattaggattacgccgaccatccttgaggttcggaaccgagttcgggaagtcgatggtcaaaatgagtctcatagaagttaagactggatcagatggggagattcgtcgggtttgttccgccatcaactaagatttaaaaaaacacaaatgtgagctttgtttttcatttatgaattcgttaattaataatcacttgttttaaataaaagcttgctacagcattttgtggtcgatggttacgttttgattttcaagtgtaagattgtacttgtaaacaaaaaatgtattatataaaagtgttatttgtttcttc

SEQ ID NO: 38828 - protein, 331 aa, Zea mays subsp. mays
MGRGYNLLFVLVTFLVLVAAVTAQGNRGSNSGGGRRPHVGFYGNRCRNVESIVRSVVQSHVRSIPANTPGILRMHFHDCFVHGCDGSVLLAGNTSERTAVPNRSLRGFEVIEEAKARLEKACPRTVSCADILTLAARDAVVLTGGQRWEVPLGRLDGRISQASDVNLPGPSDSVAKQKQDFAAKTLNTLDLVTLVGGHTIGTAGCGLVRGRFVNFNGTGQPDPSIDPSFVPLILAQCPQNGGTRVELDEGSVDKFDTSFLRKVTSSRVVLQSDLVLWKDPETRAIIERLLGLRRPSLRFGTEFGKSMVKMSLIEVKTGSDGEIRRVCSAIN

SEQ ID NO: 38829 - protein, 258 aa, Zea mays subsp. mays
MHFHDCFVHGCDGSVLLAGNTSERTAVPNRSLRGFEVIEEAKARLEKACPRTVSCADILTLAARDAVVLTGGQRWEVPLGRLDGRISQASDVNLPGPSDSVAKQKQDFAAKTLNTLDLVTLVGGHTIGTAGCGLVRGRFVNFNGTGQPDPSIDPSFVPLILAQCPQNGGTRVELDEGSVDKFDTSFLRKVTSSRVVLQSDLVLWKDPETRAIIERLLGLRRPSLRFGTEFGKSMVKMSLIEVKTGSDGEIRRVCSAIN

SEQ ID NO: 38830 - DNA, 737 bp, Zea mays subsp. mays
  misc_feature (662)..(662): n is a, c, g, or t
  misc_feature (702)..(702): n is a, c, g, or t
gcaccagtccccccccccccccgaggctttgaggtttgagcttttactatagaataataagggtaataaacaaagacacccaaagatgggtctcaaggtctcctcttctctcctctgtctcaccatcttactcgctgtttcatccattgtatcagcggttaacataacccgagtgctcgagaaataccctgaattcagcaccatgaccgagcttcttgccaagaccgagctcacaccaattatcaacaaacgtcagaccatcaccgtgctggcccttaacaacgatgctatcggttccatctctggtagacccgaggaagaggtcaagaacattcttatgaaccatgtggttcttgactactttgatgagcttaagctcaaggctctcaaggaaaagagcacattgctcactaccctttaccagtccaccggtttgggccaacagcaaaacggtttcctcaactgcaccaaatctaacggaaagatttactttggttctggtgtgaaaggcgctcctcaaaccgctgaatacatcacaaccgttttccgtaacccgtacaatctctctgtggtccagatcagcatgcccattgtggcacctggactcgggtctcccggttaaggttcctccaccaccacccatgtcttcaccaccggcccantctcccaagaaaggggcagccactccagctcagctcctgntgaatgaagggattatgcagatgctcctcctggtt

SEQ ID NO: 38831 - protein, 178 aa, Zea mays subsp. mays
MGLKVSSSLLCLTILLAVSSIVSAVNITRVLEKYPEFSTMTELLAKTELTPIINKRQTITVLALNNDAIGSISGRPEEEVKNILMNHVVLDYFDELKLKALKEKSTLLTTLYQSTGLGQQQNGFLNCTKSNGKIYFGSGVKGAPQTAEYITTVFRNPYNLSVVQISMPIVAPGLGSPG

SEQ ID NO: 38832 - protein, 139 aa, Zea mays subsp. mays
MTELLAKTELTPIINKRQTITVLALNNDAIGSISGRPEEEVKNILMNHVVLDYFDELKLKALKEKSTLLTTLYQSTGLGQQQNGFLNCTKSNGKIYFGSGVKGAPQTAEYITTVFRNPYNLSVVQISMPIVAPGLGSPG

SEQ ID NO: 38833 - protein, 94 aa, Zea mays subsp. mays
MNHVVLDYFDELKLKALKEKSTLLTTLYQSTGLGQQQNGFLNCTKSNGKIYFGSGVKGAPQTAEYITTVFRNPYNLSVVQISMPIVAPGLGSPG

SEQ ID NO: 38834 - DNA, 974 bp, Zea mays subsp. mays
accctttccatgaccatgagtccatgaccataactgcactgcatgcatggttgcacatccttctgccatcaaagaaaccatgtgaccgatcgacccatcaggttcccggaggtggtgaagctgcaggacgtgtgctggctggagatcagcgggaagctcagtctgtcgctgctgtctccggggacgacctacgcggcgcacctcgtcttcgccatagccgacgactcgtacggcctcgagtgccacgtcgggatgccggcgcttaaggccacggtcaccgtcaccgtctccggcaagacaacgatggcggagcacgacatctgcctgcaccacatgcagggcgaggcggaggccgcggcgcaccggcggacgcagcagtacgtgcgcctccgcaggggctacggcggcggagggaaggcgacggtgctgacgacgacgagggaggccgaccccgacatcaggtgcccccggcggaggggcgacgggtgggccgaggtcgaggtgggcgagttcgccgtggcgggcgacgagggcgacgccgcggacgtggaggtgacggtgcaggaggatagcctgcgctggaagaggggcctcgtggtgctgggcgtcgacatccggcccaagcagcacacgccaacgccatgctagctagctagcgcaatggccggtgcccgctgcccggtggattttattttttatacaaaaatctagggagaaattaacaagctaagtgctgatcaaattagatccagtcaggaacaggtaggcgatgtgcccactgctcaataaggccaagctttaaaacctgtatcttttatggacagactagtgcacttttaaaacggccgtccatttcttagcgctttagcttctctgaatatgcgcatggtgtattatttattattgtgtcagttgcttgcatgcaggctacgtacgtagcccataaaaccgtgatgaaattataggtgtgtttt

SEQ ID NO: 38835 - protein, 201 aa, Zea mays subsp. mays
MHGCTSFCHQRNHVTDRPIRFPEVVKLQDVCWLEISGKLSLSLLSPGTTYAAHLVFAIADDSYGLECHVGMPALKATVTVTVSGKTTMAEHDICLHHMQGEAEAAAHRRTQQYVRLRRGYGGGGKATVLTTTREADPDIRCPRRRGDGWAEVEVGEFAVAGDEGDAADVEVTVQEDSLRWKRGLVVLGVDIRPKQHTPTPC

SEQ ID NO: 38836 - protein, 131 aa, Zea mays subsp. mays
MPALKATVTVTVSGKTTMAEHDICLHHMQGEAEAAAHRRTQQYVRLRRGYGGGGKATVLTTTREADPDIRCPRRRGDGWAEVEVGEFAVAGDEGDAADVEVTVQEDSLRWKRGLVVLGVDIRPKQHTPTPC

SEQ ID NO: 38837 - protein, 114 aa, Zea mays subsp. mays
MAEHDICLHHMQGEAEAAAHRRTQQYVRLRRGYGGGGKATVLTTTREADPDIRCPRRRGDGWAEVEVGEFAVAGDEGDAADVEVTVQEDSLRWKRGLVVLGVDIRPKQHTPTPC

SEQ ID NO: 38838 - DNA, 617 bp, Zea mays subsp. mays
atccaacccatcagtacccaaccttcccctacaccagaaaaatccccagttctttggtccgcgtcagagaggcggcggcgatgtctgggcgcggcaagggcggcaagggtctgggcaagggcggcgcgaagcgccaccggaaggtgctccgcgacaacatccagggcatcaccaagccggcgatccggaggctggctaggaggggtggcgtgaagcgcatctcggggctcatctacgaggagacccgcggcgtgctcaagatctttctcgagaacgtcatccgcgacgccgtcacctacaccgagcacgcgcgccgcaagaccgtgaccgccatggacgtcgtctacgcgctcaagcgccagggccgcaccctctacggcttcggaggctaggctaggcgcctcttcgtagtcggggactggttaggggacatgtctctgtgtgatgctttctgaggtagtattgctgcaatagctgtgtaatccatcgcttctgcaatgaagcgctttgaagcatgctacgtatgttgtgtctgtgggtgattgtatttctggtagtaacagtgattcttcctgaattttggataatacaagctcattcgcagtagtttctgatgt

SEQ ID NO: 38839 - protein, 129 aa, Zea mays subsp. mays
PTHQYPTFPYTRKIPSSLVRVREAAAMSGRGKGGKGLGKGGAKRHRKVLRDNIQGITKPAIRRLARRGGVKRISGLIYEETRGVLKIFLENVIRDAVTYTEHARRKTVTAMDVVYALKRQGRTLYGFGG

SEQ ID NO: 38840 - protein, 103 aa, Zea mays subsp. mays; identical to SEQ ID NO: 71

SEQ ID NO: 38841 - protein, 70 aa, Zea mays subsp. mays
IQPISTQPSPTPEKSPVLWSASERRRRCLGAARAARVWARAARSATGRCSATTSRASPSRRSGGWLGGVA

SEQ ID NO: 38842 - DNA, 1263 bp, Zea mays subsp. mays
atttgagaaggagagggaaaatgatgacctcgtggcttctgggccgccggggcccctccggcttctcctggagttccaccgccgaccaagtcacgcagggcatctccgccgccggcctcaccgccatcgtcactggggcgtccagcggcatcggcgcggagacggcgcgaacgctggcgctgcgcggggcccacgtcatcatggccgtcaggagccttcccgctgcccaggccgtcaaggacgccgtcctcgcccaggcgccgggggccaagctcgacgtcatggagctcgacctctcgtccatggcctctgtccgcgctttcgcgtcccaattcatcgacaggggtctccccctcaacatccttatcaacaatgcaggagtaatggcaataccttttgcgctttcaaaggatggaattgagatgcagtttgcaactaatcatgttgggcatttcctgctcacacaccttctattggataccatgaagaggacctctcatgaatcaaatttggaaggaagaattgtcaacgtgtcatcagaggggcacagacttgcatatcgggaaggaatccgttttgacaagatcaacgatgaatcagtgtatagtagcattggtgcatatgggcaatcaaagcttgcaaacatattgcatgctaatgaacttgccaggcgatttgaggaagataatgtcaacataactgcaaattctcttcatcctggttccattatcacgaaccttcttcgctaccacagtatcctagatgttctccatcggacgctgggtaaattggtgttgaaaaatgctgagcagggtgcggcaactacatgctatttggcactccacccgcatgtgaagggcgtgtccgggaagtacttctgcgactgtaacctgtacgagccaagcgcgaacgccaaggacatggagttggccaagaggctctgggacttcggcgtcgagctcatcacctagctcatgcttcttgttgttagcgacttgttttcagacatggatgtaatgtaaatcccttgacagatggtaaattctgtaggccctcgaggagctcctgtgtggtaaactcattcacctcaatctatctacgtgtattaaggtggattagggtgtaaattaaattaatttacactccaatcgccctcgaggagctccggtgtggataatgctttggttggatattttagtattcacctgaatttacgtgtattaagatgaattagggtgtaaattaaattaattacactccaag

SEQ ID NO: 38843 - protein, 322 aa, Zea mays subsp. mays
LRRRGKMMTSWLLGRRGPSGFSWSSTADQVTQGISAAGLTAIVTGASSGIGAETARTLALRGAHVIMAVRSLPAAQAVKDAVLAQAPGAKLDVMELDLSSMASVRAFASQFIDRGLPLNILINNAGVMAIPFALSKDGIEMQFATNHVGHFLLTHLLLDTMKRTSHESNLEGRIVNVSSEGHRLAYREGIRFDKINDESVYSSIGAYGQSKLANILHANELARRFEEDNVNITANSLHPGSIITNLLRYHSILDVLHRTLGKLVLKNAEQGAATTCYLALHPHVKGVSGKYFCDCNLYEPSANAKDMELAKRLWDFGVELIT

SEQ ID NO: 38844 - protein, 316 aa, Zea mays subsp. mays
MMTSWLLGRRGPSGFSWSSTADQVTQGISAAGLTAIVTGASSGIGAETARTLALRGAHVIMAVRSLPAAQAVKDAVLAQAPGAKLDVMELDLSSMASVRAFASQFIDRGLPLNILINNAGVMAIPFALSKDGIEMQFATNHVGHFLLTHLLLDTMKRTSHESNLEGRIVNVSSEGHRLAYREGIRFDKINDESVYSSIGAYGQSKLANILHANELARRFEEDNVNITANSLHPGSIITNLLRYHSILDVLHRTLGKLVLKNAEQGAATTCYLALHPHVKGVSGKYFCDCNLYEPSANAKDMELAKRLWDFGVELIT

SEQ ID NO: 38845 - protein, 315 aa, Zea mays subsp. mays
MTSWLLGRRGPSGFSWSSTADQVTQGISAAGLTAIVTGASSGIGAETARTLALRGAHVIMAVRSLPAAQAVKDAVLAQAPGAKLDVMELDLSSMASVRAFASQFIDRGLPLNILINNAGVMAIPFALSKDGIEMQFATNHVGHFLLTHLLLDTMKRTSHESNLEGRIVNVSSEGHRLAYREGIRFDKINDESVYSSIGAYGQSKLANILHANELARRFEEDNVNITANSLHPGSIITNLLRYHSILDVLHRTLGKLVLKNAEQGAATTCYLALHPHVKGVSGKYFCDCNLYEPSANAKDMELAKRLWDFGVELIT

SEQ ID NO: 38846 - DNA, 868 bp, Zea mays subsp. mays
cactactctctctctctctgcctgcaaagctgcttgatccatcatcgatcacatcactccaccagccgcagcgcacgaacgtacgactcatggcagatcgcgaccgcagcggcatctacggcggcggcgcctacgggcagcagcaggggggcggccgcccgatgggtgagcaggtgaagggcatgatccacgacaaggggccgacggcgtcccaggcgctgacggtggcgacgctgttccctctgggcgggctgctcctggtgctgtcgggcctggcgctggcggcctccacggtggggctggccctggccacgcccgtgttcctgctcttcagccccgtgctcgtccccgccgcgctgctcatcggcacggccgtcgcggggttcctcacgtcgggcgcgctggggctcggcggcctgtcctcgctcacgtgcctcgccaacacggcgcggcaggcgttccagcgcaccccggactacgtcgaggaggcgcgccgcaggatggcggaggccgcggcgcacgcgggccacaagaccgcgcaggccgggcacggcatccagagcaaggcgcaggaggccggtgctggcactggcgccggcggcggcaggacttcctcgtaaataagcaaatcatccatggatgcgtgcgtgtcaatgtcagcagggtcgtcgtggaatgctcttctctgtacgtgggtaaccgtcttttggtcgtcttccccgagtgcgtgataaatatcctggtgttcgtcgtgtgtggtgctgccctaggctggggcctggggtcggctgtgtaccggtatctgttcatcgccgctccgtcgcgttcggagatgtgaataagtgatgtgaaggttaagtttcagctc

SEQ ID NO: 38847 - protein, 205 aa, Zea mays subsp. mays; identical to SEQ ID NO: 36525

SEQ ID NO: 38848 - protein, 176 aa, Zea mays subsp. mays; identical to SEQ ID NO: 36526

SEQ ID NO: 38849 - protein, 152 aa, Zea mays subsp. mays; identical to SEQ ID NO: 36527

SEQ ID NO: 38850 - DNA, 1007 bp, Zea mays subsp. mays
tctagtctagtacacgaatcacgaacgcgtccacctgcgcgcatcgccacgcaggttctctccaccaaaccttaacctccccttccagaaaccctccaagaggcagctcaaaggaatagtgagccgccccgccgctcctcagccatcctctccatctcggtgtcacacactccgcatacgcacctacgagagtcgagtgacagcgagcgagcgagcgagcgaagccatggctctccgcaccctggcatcgaagaacgccctatccttcgcgctcggcggcgcggcccggccgtcggcggcgtccgcgaggggggtgacgacggtcgcgctccccgacctctcctacgacttcggcgcgctggagccggccatctcgggggagatcatgcgcctgcaccaccagaagcaccacgccacctacgtcgccaactacaacaaggcgctggagcagctcgacgctgccgtcgccaagggcgacgcctccgctgtcgtccagctccagggcgccatcaagttcaacggcggcggtcatgtgaaccattcaatcttttggaagaacctcaagcctattagcgaaggtggtggggagccgccacatgggaaacttggctgggccatcgatgaggattttggttcatttgaggcacttgtaaagaggatgaatgcagaaggcgctgctttacaaggatctggatgggtgtggttagctttggataaagaggcaaaaaagctttcagttgaaactacagctaatcaggatcctctggtgactaaaggtgcaagcttggttccgctgttggggattgatgtctgggagcatgcgtactacctgcagtacaagaatgttaggccggattacctgaacaacatctggaaggtgatgaactggaaatatgctggagaggtgtacgaaaatgttcttgcttgaattgtcttaatggacaatactcatctgcgcgggtttgttttcggctgtttgaccatgtgaaataaagatggacttgtgt

SEQ ID NO: 38851 - protein, 233 aa, Zea mays subsp. mays
MALRTLASKNALSFALGGAARPSAASARGVTTVALPDLSYDFGALEPAISGEIMRLHHQKHHATYVANYNKALEQLDAAVAKGDASAVVQLQGAIKFNGGGHVNHSIFWKNLKPISEGGGEPPHGKLGWAIDEDFGSFEALVKRMNAEGAALQGSGWVWLALDKEAKKLSVETTANQDPLVTKGASLVPLLGIDVWEHAYYLQYKNVRPDYLNNIWKVMNWKYAGEVYENVLA

SEQ ID NO: 38852 - protein, 180 aa, Zea mays subsp. mays
MRLHHQKHHATYVANYNKALEQLDAAVAKGDASAVVQLQGAIKFNGGGHVNHSIFWKNLKPISEGGGEPPHGKLGWAIDEDFGSFEALVKRMNAEGAALQGSGWVWLALDKEAKKLSVETTANQDPLVTKGASLVPLLGIDVWEHAYYLQYKNVRPDYLNNIWKVMNWKYAGEVYENVLA

SEQ ID NO: 38853 - DNA, 906 bp, Zea mays subsp. mays
atcgcacatattattgagaccaactagcaacatagaaagcacaatattgtaccaataatggcagccaaaatattttgcctcattatgctccttggtctttctgcaagtgctgctacggcgagcattttcccgcaatgctcacaagctcctatagcttcccttcttcccccatacctctcaccagcgatgtcttcagtatgtgaaaatccaattcttctaccctacaggatccaacaggcaatcgcagcaggcatcttacctttatcacccttgttcctccaacaatcatcagccctattacagcagttacctttggtgcatttattggcacaaaacatcagggcacaacaactacaacaactcgtgctagcaaaccttgctgcctactctcaacaacagcagttacctttggtgcatttgttggcacaaaacatcagggcacaacaactacaacaactcgtgctagcaaaccttgctgcctactctcagcaacaacagtttctgccattcaaccaactagctgcattgaactctgctgcttatttgcagcaacaacaactactaccattcagccagctagctgctgcctacccccggcaatttcttccattcaaccaactggcagcattgaactctcatgcttatgtacaacaacaacaactactaccattcagccagctagctgctgtgagccctgctgccttcttgacacagcaacatttgttgccgttctacctgcacactgcgcctaacgttggcaccctcttacaactgcaacaattgctgccattcgaccaacttgctttgacaaacccagcagtgttctaccaacaacccatcattggtggtgccctcttttagattgcttatgagttatagttcaataataaagttttttttgctgat

SEQ ID NO: 38854 - protein, 267 aa, Zea mays subsp. mays
MAAKIFCLIMLLGLSASAATASIFPQCSQAPIASLLPPYLSPAMSSVCENPILLPYRIQQAIAAGILPLSPLFLQQSSALLQQLPLVHLLAQNIRAQQLQQLVLANLAAYSQQQQLPLVHLLAQNIRAQQLQQLVLANLAAYSQQQQFLPFNQLAALNSAAYLQQQQLLPFSQLAAAYPRQFLPFNQLAALNSHAYVQQQQLLPFSQLAAVSPAAFLTQQHLLPFYLHTAPNVGTLLQLQQLLPFDQLALTNPAVFYQQPIIGGALF

SEQ ID NO: 38855 - protein, 258 aa, Zea mays subsp. mays
MLLGLSASAATASIFPQCSQAPIASLLPPYLSPAMSSVCENPILLPYRIQQAIAAGILPLSPLFLQQSSALLQQLPLVHLLAQNIRAQQLQQLVLANLAAYSQQQQLPLVHLLAQNIRAQQLQQLVLANLAAYSQQQQFLPFNQLAALNSAAYLQQQQLLPFSQLAAAYPRQFLPFNQLAALNSHAYVQQQQLLPFSQLAAVSPAAFLTQQHLLPFYLHTAPNVGTLLQLQQLLPFDQLALTNPAVFYQQPIIGGALF

SEQ ID NO: 38856 - protein, 224 aa, Zea mays subsp. mays
MSSVCENPILLPYRIQQAIAAGILPLSPLFLQQSSALLQQLPLVHLLAQNIRAQQLQQLVLANLAAYSQQQQLPLVHLLAQNIRAQQLQQLVLANLAAYSQQQQFLPFNQLAALNSAAYLQQQQLLPFSQLAAAYPRQFLPFNQLAALNSHAYVQQQQLLPFSQLAAVSPAAFLTQQHLLPFYLHTAPNVGTLLQLQQLLPFDQLALTNPAVFYQQPIIGGALF

SEQ ID NO: 38857 - DNA, 859 bp, Zea mays subsp. mays
atttttcgaccgccgccgcccccagtccccgatccgaagctgtgcctcgtaccatttcgatccaatggcgccgacgtcgaagctgtcgacgggcatcaagcgcgcttcgcggtcgcacacgtaccatcgccgtgggctgtgggccatcaaggccaagaacggcggcgccttccccaaggccgacaaggccgccgccgccgtggaacccaagttctaccctgccgacgacgtcaagccccgcgttcccagcacccgcaagcctaagcctaccaagctcaggtcgagcatcacgcctgggacggtgctgatcctcctcgcagggcgcttcatggggaagagagtggtgtttctcaagcagctcaagtctggcctgctccttatctctgggcctttcaagatcaatggagtaccgatccgccgtgtgaaccagacctatgtcattgctacatcaaccaaagttgacatctctggtgttgatgtcgccaagtttgatgacaagtactttgccagggagaagaagcagaaggtgaagaagaccgagggcgagctttttgagacagaaaaggaggcatccaagtcactgcctgacttcaagaaggatgaccagaaggctgtggattctgctctgatcaaggctatcgaggctgtcctggagctgaaaacctatcttggcgcccggttctctctcagggatggtgacaagccccatgagatggtattctaagtttctagttttggagttcgtaggaagctgttttgtctgtgttcttgtacttctgagttttgtaccagtagcgaacgtttcattgtgattgaagtcttcctgcccaaatattataagatctaagaaagttctatc

SEQ ID NO: 38858 - protein, 240 aa, Zea mays subsp. mays
FFDRRRPQSPIRSCASYHFDPMAPTSKLSTGIKRASRSHTYHRRGLWAIKAKNGGAFPKADKAAAAVEPKFYPADDVKPRVPSTRKPKPTKLRSSITPGTVLILLAGRFMGKRVVFLKQLKSGLLLISGPFKINGVPIRRVNQTYVIATSTKVDISGVDVAKFDDKYFAREKKQKVKKTEGELFETEKEASKSLPDFKKDDQKAVDSALIKAIEAVLELKTYLGARFSLRDGDKPHEMVF

SEQ ID NO: 38859 - protein, 219 aa, Zea mays subsp. mays
MAPTSKLSTGIKRASRSHTYHRRGLWAIKAKNGGAFPKADKAAAAVEPKFYPADDVKPRVPSTRKPKPTKLRSSITPGTVLILLAGRFMGKRVVFLKQLKSGLLLISGPFKINGVPIRRVNQTYVIATSTKVDISGVDVAKFDDKYFAREKKQKVKKTEGELFETEKEASKSLPDFKKDDQKAVDSALIKAIEAVLELKTYLGARFSLRDGDKPHEMVF

SEQ ID NO: 38860 - protein, 131 aa, Zea mays subsp. mays
MGKRVVFLKQLKSGLLLISGPFKINGVPIRRVNQTYVIATSTKVDISGVDVAKFDDKYFAREKKQKVKKTEGELFETEKEASKSLPDFKKDDQKAVDSALIKAIEAVLELKTYLGARFSLRDGDKPHEMVF

SEQ ID NO: 38861 - DNA, 729 bp, Zea mays subsp. mays
tccgttggttgattctgattcgtctcctgttggctgttgccttcgaccgcctccacctcgtctccgacgatgtcctccgtcgccggtgagggagaaggagagggaggaggacggcgccgacgggaggagccaaggagccaacaacatgaggacggggtcgaggtggccgacggaaaactggatttgggtgacctttacggcgcggcggcggggtgggtagaggcgcggaccagctgcccgcacctcggcaccatgccgcccgctggtgctgaattgctgatgaccttgctcgcgtgcctccgcccgactctccgtgctccagatgtcatgaccctgctgaaaactgattatgcttgatatgcaaagatgtgatgtgcagtcgttttatcaacaaacatatgttgtgccatcatgaagaagaaactggtcactgtcttgctttgagcttcagtgatctttcagtttggtgtttctcatgtgactcgtacctagatgttcaagccattttagaattgcgcccaagttgcacatttgttgaagtttggagaacaccttttcaatcacttgaagtactggatttcagcactggtgaaagtggaagttcatcaaggacttagttgtttgtattcaagtgatgagtttcttttcatgatgcttcaatcagatcaagacagacagttgtgtagtatcctggcactttttaagcttcagtatgttctagttatattt

SEQ ID NO: 38862 - protein, 95 aa, Zea mays subsp. mays
MSSVAGEGEGEGGGRRRREEPRSQQHEDGVEVADGKLDLGDLYGAAAGWVEARTSCPHLGTMPPAGAELLMTLLACLRPTLRAPDVMTLLKTDYA

SEQ ID NO: 38863 - protein, 81 aa, Zea mays subsp. mays
MCSRFINKHMLCHHEEETGHCLALSFSDLSVWCFSCDSYLDVQAILELRPSCTFVEVWRTPFQSLEVLDFSTGESGSSSRT

SEQ ID NO: 38864 - protein, 72 aa, Zea mays subsp. mays
PLVDSDSSPVGCCLRPPPPRLRRCPPSPVREKEREEDGADGRSQGANNMRTGSRWPTENWIWVTFTARRRGG

SEQ ID NO: 38865 - DNA, 617 bp, Zea mays subsp. mays
atcattccaatcgactagcgcatacacttgtgtttcgctcccgtctcgtctcgtagcgtccgaagcgccacgccagcaccgcggcgccctcgcttgcgatgcccagcccgatcgccgcttgcttccgctgcgccgcggcgccttcgtcgggcgccggcgcggcggggcccagcctgacgacctccgtctacgagacccacctcggcctcgtcgcgctctcctggtcccgcacctcgctcggcctctccctccgcgccgtactccgcctgtcgcccccgccatcgcccggcttctcttcggcgtcgggagcgggctacctcgacgacgacgcggacgaggagactctcgccttccgcgtccgcccatggctcctctggcgctggcgcggctccaagcggttccgcgctgacgaccgcatcgtcgacttggcgtgggacctctcgcgcgcgcgcttcccgggctccgggtcccccgagccgtcgtccggcttcttcgtcgccgtcatcatcgacggcgagatggtcctcgcggtcggggacctttccgatgctgcctaccggaggacccgggcccggcgcccatccgggccccgcccagtcctcctctcccggagggag

SEQ ID NO: 38866 - protein, 173 aa, Zea mays subsp. mays
MPSPIAACFRCAAAPSSGAGAAGPSLTTSVYETHLGLVALSWSRTSLGLSLRAVLRLSPPPSPGFSSASGAGYLDDDADEETLAFRVRPWLLWRWRGSKRFRADDRIVDLAWDLSRARFPGSGSPEPSSGFFVAVIIDGEMVLAVGDLSDAAYRRTRARRPSGPRPVLLSRRE

SEQ ID NO: 38867 - protein, 135 aa, Zea mays subsp. mays
SFQSTSAYTCVSLPSRLVASEAPRQHRGALACDAQPDRRLLPLRRGAFVGRRRGGAQPDDLRLRDPPRPRRALLVPHLARPLPPRRTPPVAPAIARLLFGVGSGLPRRRRGRGDSRLPRPPMAPLALARLQAVPR

SEQ ID NO: 38868 - DNA, 1900 bp, Zea mays subsp. mays
ctcactagtcccccccccccccaccccccccgaaaacatctagcccccgggctgttccagtaggtggctcacggttggtgaggccaatgtttcggaataaaacctcgacgaaaaagaaggtgaaacccgaacctgctatagtgcctgcatcacacaagcattgtgagacgaaaggtcctaaatctcacactagtaaacatcaggagtcccttcaggatgaacccagaaccccagcgccaactgacaagaaggctactgtcagctccaccactgttgatggagctgattttggcaccaaaggctgtggtgtcggtgtgatccatggctcgaaggttggtgagttgttaagatcaaaggagaagggagaatgctcccaaagctctaagagtagcattggtgattatagcaccagcacaagcatcagtgaggacagttatggcagcttcagtgctaacagaagcaggcctcacatgtcaaaggatgtgagatggggagccatcaggcgcatggctatccaacaagggagcttgggattaaagaacttcaagcttctcaaacaacttggttgtggggatattggcactgtttatttggctgagttagtgggctcagactgcatgttcgcattgaaggttatggacatcgagtacctcataagcagaaagaaaatgctcagagcacaaactgagagggagatactgcaaatgctcgaccacccattccttccaaccctgtattctcatttcacgacggacaacctttcttgtctggtaatggagttttgccctggtggtgacctacatgttcttaggcagaagcaacctaccaaaaccttttcagaagcagctgcaagattttatgtcgctgaagtcctcttagccttggagtatctccatatgttgggggtcatataccgtgatctgaagccagagaacatccttgttcgtgaagatgggcacatcatgctctcagactttgatctgtcgctgaggtgctcagtgagcccaatgcttgtgagaacatcatcagtagacagagatgagccaagtaggccttctggtccctgtgcacaaagctgcattgatcccctgtgtatccagccatcgtggagcaattcttcttgcttcacgcccagtctggtttcatctacaccgtcaaggacacggaggcctagagctgaacccctgaagaaaccatcacttccacagctcgttgttgagcctacggaagcaaggtcaaattcgtttgttgggacccatgaatatcttgccccagagatcattcgaggagatggccatggcagctcggttgattggtggactcttggaatcttcctttacgaattactctatggcaagacaccattcaggggaccggataatgatgaaacactctcaaatgtgatctcacagggcttgaagttccctgacagtccagcattaagcttccacgctcgagatctgatcagagggctgcttgtgaaagaaccggagtaccggcttggctcgtcgagaggagctgctgagattaagcggcatcccttcttcgaaggtctgaactgggccttgatccggtggacttcaccaccagagaccccgaaaaatattgatactgcagcaacactcgcgggaacacgcaagaaaaaggaaggcaaatgtctggaattccggctgaatggtgacgacatcgagttcgagctcttttagttgtagctgtagtggtagtcccaaggatatatcagtaccacgtaagctagcaagagtagtctttagtccctcttccttgcagatttctgttcatccttggtcatttcggacgttgggaagtaaggtaaggttggctgataagcatgtaactttatgcgttgttaatactatccaatattataagacgctgttgg

SEQ ID NO: 38869 - protein, 539 aa, Zea mays subsp. mays
MFRNKTSTKKKVKPEPAIVPASHKHCETKGPKSHTSKHQESLQDEPRTPAPTDKKATVSSTTVDGADFGTKGCGVGVIHGSKVGELLRSKEKGECSQSSKSSIGDYSTSTSISEDSYGSFSANRSRPHMSKDVRWGAIRRMAIQQGSLGLKNFKLLKQLGCGDIGTVYLAELVGSDCMFALKVMDIEYLISRKKMLRAQTEREILQMLDHPFLPTLYSHFTTDNLSCLVMEFCPGGDLHVLRQKQPTKTFSEAAARFYVAEVLLALEYLHMLGVIYRDLKPENILVREDGHIMLSDFDLSLRCSVSPMLVRTSSVDRDEPSRPSGPCAQSCIDPLCIQPSWSNSSCFTPSLVSSTPSRTRRPRAEPLKKPSLPQLVVEPTEARSNSFVGTHEYLAPEIIRGDGHGSSVDWWTLGIFLYELLYGKTPFRGPDNDETLSNVISQGLKFPDSPALSFHARDLIRGLLVKEPEYRLGSSRGAAEIKRHPFFEGLNWALIRWTSPPETPKNIDTAATLAGTRKKKEGKCLEFRLNGDDIEFELF

SEQ ID NO: 38870 - protein, 411 aa, Zea mays subsp. mays
MSKDVRWGAIRRMAIQQGSLGLKNFKLLKQLGCGDIGTVYLAELVGSDCMFALKVMDIEYLISRKKMLRAQTEREILQMLDHPFLPTLYSHFTTDNLSCLVMEFCPGGDLHVLRQKQPTKTFSEAAARFYVAEVLLALEYLHMLGVIYRDLKPENILVREDGHIMLSDFDLSLRCSVSPMLVRTSSVDRDEPSRPSGPCAQSCIDPLCIQPSWSNSSCFTPSLVSSTPSRTRRPRAEPLKKPSLPQLVVEPTEARSNSFVGTHEYLAPEIIRGDGHGSSVDWWTLGIFLYELLYGKTPFRGPDNDETLSNVISQGLKFPDSPALSFHARDLIRGLLVKEPEYRLGSSRGAAEIKRHPFFEGLNWALIRWTSPPETPKNIDTAATLAGTRKKKEGKCLEFRLNGDDIEFELF

SEQ ID NO: 38871 - protein, 399 aa, Zea mays subsp. mays
MAIQQGSLGLKNFKLLKQLGCGDIGTVYLAELVGSDCMFALKVMDIEYLISRKKMLRAQTEREILQMLDHPFLPTLYSHFTTDNLSCLVMEFCPGGDLHVLRQKQPTKTFSEAAARFYVAEVLLALEYLHMLGVIYRDLKPENILVREDGHIMLSDFDLSLRCSVSPMLVRTSSVDRDEPSRPSGPCAQSCIDPLCIQPSWSNSSCFTPSLVSSTPSRTRRPRAEPLKKPSLPQLVVEPTEARSNSFVGTHEYLAPEIIRGDGHGSSVDWWTLGIFLYELLYGKTPFRGPDNDETLSNVISQGLKFPDSPALSFHARDLIRGLLVKEPEYRLGSSRGAAEIKRHPFFEGLNWALIRWTSPPETPKNIDTAATLAGTRKKKEGKCLEFRLNGDDIEFELF

SEQ ID NO: 38872 - DNA, 2290 bp, Zea mays subsp. mays
actttgacgatgaaaggggtggaagatgatgaagacgatctgaagacgctaaatatggagcttaagcgggactggtccagagggactaatgcgttcgagttggctttccgtaggaacaaagagatctctgcattcttggatcagagggaaaggaccaaagtgccggctgatacttcagtttctgctccagaagctgaaagctatcaggaggaagctgctccagaagatgagggaagtagtgaagaattgagctctgtgtcagaagtagcaactgatgtttctcctcctgtatctgatgcctcctctcaggtgggaattcaggattctacttctgtggcaaatgctgctgaggaccaaactgtaggatctgaaagttcacctacaattagtgttgaactgtcctccaacgggaccccagatagctctattgtgtcttcagtttcagaaactgcagataaacctactgaacctgaagaatcttcagcggtagaagaggttcttgtaactgcaagcagcgaggcggggaaagaaccagctgctgacactgaggctgtaccagccttgactgagaaaactggtgccgaggttgctgctgctgctggagttgcacaagcaagcaccacgacagccactatttctcctacccttgtcaagcaattgcgtgaggcaactggagcaggcatgatggactgcaaaaaggctcttgctgaaacagggggtgacattgataaagctcaagaattcctacggaagaaagggttggctgctgctgacaagagggctggcagagcaacagctgagggaagagttggctcttacatacatgacagcagaatcggggtccttattgaagtgaattgtgagactgactttgtgtctcgaggtgacattttcaaagagttagttgacgatcttgccatgcaaattgctgcttgccctcaagtgcagtacatctctattgacgacgtccctgaggaggttgtgaagaaggagaccgagctggagatgcagagggaggaccttttgtcgaagcctgagcagatccgggctaagattgtcgaagggcgtgtaaagaagaggcttggagaattcgcgttgttcgaacagccattcatcaagaacgacaaggtcacaataagtgagtggctgaagcaaactatagctacaactggagagaatatgaaggtcaggagatttgcccggtacaacctaggtgaagggctggagaagaaaagccaggattttgctgctgaagttgcagcccagacagcagcgaagccgccaccagctcctcccaaggatgacaagcctgctgaaacaacagaatccgcggagaagaagccggctgttgcagtttcagcctcgttggtgaagcaactccgagacgaaaccggcgctggcatgatggactgcaagaaagctctggccgagtctgacggcgaccttcagaaggctcaggagttcctgaggaagaagggcctctcatccgcagacaagaaatcctctcggctagccgccgaaggactgatcggctcctacatccacgacagccgcatcggctgcatgatcgaggtcaactccgagaccgacttcgtggcccgcaacgacaagttcagggagctggtgaacgacctcgcgatgcaggtggtagcgtgtccgcaggtcgactacgtctcggtggacgacatcccggagagcgtcgtcggcaaggagaaggagatcgagatgcagagggaggacctgcagtcgaagcccgagagcatcagggagaagatcgtggaagggcggatcgcgaagaggctcggcgtgatggccctcctggagcagccctacatcaaggacgacagcaagacggtgaaggatctcgtgaaggagacggtcgcctcactcggggagaacattaaggtgcggaggtttgtccggtacaccctgggcgagaactgatcggtgtgaggccgggcggcgatccgatccctccgtcgcaacgcagccctggcatgagaagtcgggcacgtttttggttcaaggaggcggggcgcgtagctgttgttttatttagtctgtgactcggttccatctgtaattccgtatcacctgttactgctgttcgtggttcatgaagagtaagaggggttggttagtatgtccatcaaagcatatatatatatacacaacatcaaggcaaattgaattttgtatcttttatgtgtgcttcgtttcaaaacatgatcgaattgtagcatagacgtatgtatggtcttggccaatgtaaggtaatgtttggtttcag

SEQ ID NO: 38873 - protein, 647 aa, Zea mays subsp. mays
TLTMKGVEDDEDDLKTLNMELKRDWSRGTNAFELAFRRNKEISAFLDQRERTKVPADTSVSAPEAESYQEEAAPEDEGSSEELSSVSEVATDVSPPVSDASSQVGIQDSTSVANAAEDQTVGSESSPTISVELSSNGTPDSSIVSSVSETADKPTEPEESSAVEEVLVTASSEAGKEPAADTEAVPALTEKTGAEVAAAAGVAQASTTTATISPTLVKQLREATGAGMMDCKKALAETGGDIDKAQEFLRKKGLAAADKRAGRATAEGRVGSYIHDSRIGVLIEVNCETDFVSRGDIFKELVDDLAMQIAACPQVQYISIDDVPEEVVKKETELEMQREDLLSKPEQIRAKIVEGRVKKRLGEFALFEQPFIKNDKVTISEWLKQTIATTGENMKVRRFARYNLGEGLEKKSQDFAAEVAAQTAAKPPPAPPKDDKPAETTESAEKKPAVAVSASLVKQLRDETGAGMMDCKKALAESDGDLQKAQEFLRKKGLSSADKKSSRLAAEGLIGSYIHDSRIGCMIEVNSETDFVARNDKFRELVNDLAMQVVACPQVDYVSVDDIPESVVGKEKEIEMQREDLQSKPESIREKIVEGRIAKRLGVMALLEQPYIKDDSKTVKDLVKETVASLGENIKVRRFVRYTLGEN

SEQ ID NO: 38874 - protein, 644 aa, Zea mays subsp. mays
MKGVEDDEDDLKTLNMELKRDWSRGTNAFELAFRRNKEISAFLDQRERTKVPADTSVSAPEAESYQEEAAPEDEGSSEELSSVSEVATDVSPPVSDASSQVGIQDSTSVANAAEDQTVGSESSPTISVELSSNGTPDSSIVSSVSETADKPTEPEESSAVEEVLVTASSEAGKEPAADTEAVPALTEKTGAEVAAAAGVAQASTTTATISPTLVKQLREATGAGMMDCKKALAETGGDIDKAQEFLRKKGLAAADKRAGRATAEGRVGSYIHDSRIGVLIEVNCETDFVSRGDIFKELVDDLAMQIAACPQVQYISIDDVPEEVVKKETELEMQREDLLSKPEQIRAKIVEGRVKKRLGEFALFEQPFIKNDKVTISEWLKQTIATTGENMKVRRFARYNLGEGLEKKSQDFAAEVAAQTAAKPPPAPPKDDKPAETTESAEKKPAVAVSASLVKQLRDETGAGMMDCKKALAESDGDLQKAQEFLRKKGLSSADKKSSRLAAEGLIGSYIHDSRIGCMIEVNSETDFVARNDKFRELVNDLAMQVVACPQVDYVSVDDIPESVVGKEKEIEMQREDLQSKPESIREKIVEGRIAKRLGVMALLEQPYIKDDSKTVKDLVKETVASLGENIKVRRFVRYTLGEN

SEQ ID NO: 38875 - protein, 629 aa, Zea mays subsp. mays
MELKRDWSRGTNAFELAFRRNKEISAFLDQRERTKVPADTSVSAPEAESYQEEAAPEDEGSSEELSSVSEVATDVSPPVSDASSQVGIQDSTSVANAAEDQTVGSESSPTISVELSSNGTPDSSIVSSVSETADKPTEPEESSAVEEVLVTASSEAGKEPAADTEAVPALTEKTGAEVAAAAGVAQASTTTATISPTLVKQLREATGAGMMDCKKALAETGGDIDKAQEFLRKKGLAAADKRAGRATAEGRVGSYIHDSRIGVLIEVNCETDFVSRGDIFKELVDDLAMQIAACPQVQYISIDDVPEEVVKKETELEMQREDLLSKPEQIRAKIVEGRVKKRLGEFALFEQPFIKNDKVTISEWLKQTIATTGENMKVRRFARYNLGEGLEKKSQDFAAEVAAQTAAKPPPAPPKDDKPAETTESAEKKPAVAVSASLVKQLRDETGAGMMDCKKALAESDGDLQKAQEFLRKKGLSSADKKSSRLAAEGLIGSYIHDSRIGCMIEVNSETDFVARNDKFRELVNDLAMQVVACPQVDYVSVDDIPESVVGKEKEIEMQREDLQSKPESIREKIVEGRIAKRLGVMALLEQPYIKDDSKTVKDLVKETVASLGENIKVRRFVRYTLGEN

SEQ ID NO: 38876 - DNA, 604 bp, Zea mays subsp. mays
gatgatgtggagagagagaaacctgtgaggagcgctacaatggctgagcaggtggatgagtatgttgatattggggatgagatgccaacagccacttaccaatccatggaaatcgagaaggacgctgaaggtgcgactggctctcgtggttctggcagtggctcttcgtcgtccagtggttctgagtcgaggagctcaggggacagtgcctcaggagctggcaatgctcattctttggcttaggggaggttgttaacaataggatttgaaaatttggatgatccgagttctgttgttgggtgatttacgtagaggtagtggtaattgtaagtatgtagctctttctgagacgtgggtttgcgtaggcgtggattacacagttagtagtagataacaaactggctttctgggtgtctgttagcaccatgtgtatgtaagctgggggtggaaggtgctggggtgttaaaagtagttgatcgaccttctggtatggagggggccagggctagtgtttgtgttctttgtagtacaattgttctggtgcagacctcttatgtaattaatgatttgtgcatgacattaaagtatggttgtataagtaacg

SEQ ID NO: 38877 - protein, 80 aa, Zea mays subsp. mays
DDVEREKPVRSATMAEQVDEYVDIGDEMPTATYQSMEIEKDAEGATGSRGSGSGSSSSSGSESRSSGDSASGAGNAHSLA

SEQ ID NO: 38878 - protein, 67 aa, Zea mays subsp. mays
MAEQVDEYVDIGDEMPTATYQSMEIEKDAEGATGSRGSGSGSSSSSGSESRSSGDSASGAGNAHSLA

SEQ ID NO: 38879 - protein, 66 aa, Zea mays subsp. mays
MSMLILGMRCQQPLTNPWKSRRTLKVRLALVVLAVALRRPVVLSRGAQGTVPQELAMLILWLRGGC

SEQ ID NO: 38880 - DNA, 795 bp, Zea mays subsp. mays
agctgttgttagcaccgagaaaggccaagtctataaagcattgctcaatgagttgaatgcagaaagacgtcaatgccgatctgggatgcgagatttgttcaatacctcttttggtgcaacatttcttacagacacgggaagggaatcatcattttcctatcacattcatcaatatgccgatatttacacgagcaagcttgagaacttcttatcatatgcccctgaatcttggcttcatccacctcatgacataaagatcatgccacacaatgcgaaggtcccagcgagccttttcagtacctcctagttcatcctttctctatttcggtggagaaccaagccgtagtacccccacctatggtttctgtgcgtgaccacgtgacaggattgtggactgctgctgcattcgcttgcgttatactataactgaagcaccatatgatgcatcaatccagcagaccagcaagttagcattctctagaattgccatggaattatcagtcatgtgagtagttaaccgactcatttgcctgtatgacgaagcctctgttttccgtttaaaataaaaaaaggaagcatctgagaggccgcatacttgtgttcccatgaaaccctaccaacttgtaatggccgccaataaaacagtcacacgcaacccatctcgtttccccattttattcgcattctgctacactctttgctgcactcatgttacactgaactcgcctggtggcatctgacaagttttttgggatgagcagaagataatttgggttcgggcaacggataaattag

SEQ ID NO: 38881 - protein, 101 aa, Zea mays subsp. mays
AVVSTEKGQVYKALLNELNAERRQCRSGMRDLFNTSFGATFLTDTGRESSFSYHIHQYADIYTSKLENFLSYAPESWLHPPHDIKIMPHNAKVPASLFSTS

SEQ ID NO: 38882 - protein, 73 aa, Zea mays subsp. mays
MRDLFNTSFGATFLTDTGRESSFSYHIHQYADIYTSKLENFLSYAPESWLHPPHDIKIMPHNAKVPASLFSTS

SEQ ID NO: 38883 - protein, 65 aa, Zea mays subsp. mays
MQKDVNADLGCEICSIPLLVQHFLQTREGNHHFPITFINMPIFTRASLRTSYHMPLNLGFIHLMT

SEQ ID NO: 38884 - DNA, 1030 bp, Zea mays subsp. mays
  misc_feature (1016)..(1016): n is a, c, g, or t
cactcatctgatgccgtaacacaaggctgaatttttgttcggtctagccgacccgacgatggcgtccagcgacgggaaaccactgccaaccccggcctctgtgggcggcggcggcggcagcagcaccgcgccgcccgggcagccgaccacggtagcgtccaaggtgctggacatgggcgcggcggcgatgcagtcgttgcgccccgtgaagcaggcgaagcagcacatgtgcacgttcgcgctgtacgcgcacgacccgaagcggcaggtggagacgcaccactacgtctcccgcctcaaccaggacttcctccagtgcgccgtctatgactccgacaaagccgacgcgcgtctcatcggcgtggagtacatcgtgtcgaggaagatcttcgactcgctgccggcggaggagcagcggctgtggcactcgcacgcgcacgagatcaagtcaggcctgtggacgagcccgcacgtggcggggctgctggagaaggcggagctggaccacatggccgccacgttcggcaagttctggtgcacctgggcaggtggaccgcggcgaccgcctgccgctgggcgcccccgcgctcatggtgtccccgcaggccgaccccgccgcagccgtgcgccccgacctggtccggaagcgagacgacaggtacggcctctccacggaggagctccgcgccgctagggccgacgtcgaggcgcccgccgaggagcacccgggccaggccgactactggctccgccaccgcaagggcttcgcggtggacgtcgtgccgcacgagatgaagcgtcacgcgccgtttccgtgagccgtgaccaaccggtgttttacagtggcgcatgtgtaataaaaccaaacgatccagcaggcgtctccgtccgaactcgtgaatggcacgcgtttatttgtttttcagttcatgatgttcaaatcggcagtacgcatgtgttatggatgcgtgtgtattggatgaagtggatcggtgagaacagactttagcctcgcnaggtgttaaactag

SEQ ID NO: 38885 - protein, 211 aa, Zea mays subsp. mays
MASSDGKPLPTPASVGGGGGSSTAPPGQPTTVASKVLDMGAAAMQSLRPVKQAKQHMCTFALYAHDPKRQVETHHYVSRLNQDFLQCAVYDSDKADARLIGVEYIVSRKIFDSLPAEEQRLWHSHAHEIKSGLWTSPHVAGLLEKAELDHMAATFGKFWCTWAGGPRRPPAAGRPRAHGVPAGRPRRSRAPRPGPEARRQVRPLHGGAPRR

SEQ ID NO: 38886 - protein, 173 aa, Zea mays subsp. mays
MGAAAMQSLRPVKQAKQHMCTFALYAHDPKRQVETHHYVSRLNQDFLQCAVYDSDKADARLIGVEYIVSRKIFDSLPAEEQRLWHSHAHEIKSGLWTSPHVAGLLEKAELDHMAATFGKFWCTWAGGPRRPPAAGRPRAHGVPAGRPRRSRAPRPGPEARRQVRPLHGGAPRR

SEQ ID NO: 38887 - protein, 168 aa, Zea mays subsp. mays
MQSLRPVKQAKQHMCTFALYAHDPKRQVETHHYVSRLNQDFLQCAVYDSDKADARLIGVEYIVSRKIFDSLPAEEQRLWHSHAHEIKSGLWTSPHVAGLLEKAELDHMAATFGKFWCTWAGGPRRPPAAGRPRAHGVPAGRPRRSRAPRPGPEARRQVRPLHGGAPRR

SEQ ID NO: 38888 - DNA, 902 bp, Zea mays subsp. mays
ctctaagacacaagctatagctagtagctgtagctgccatggccaaggatctcgccttcgtcctcctcgtccttgccgcgctagccgccttctcgtcggcgaccaagctgacaatccacaacctctgcccgcaccccgtctggccgctcgtcacccccaacgccggcctcccctccatctctgacaatgccgcgcgcctcgacaccaacgcgattctctccctcaccttcccgtccaccttctgggcaggtcgcgtcgcggcccgcaccggctgcgacgacggcacgtcgccaccgcgcgggtgcttcacgggcgacgcgccgccgtccaccgtcgcgcagatcacggtccacgacagcgggaacctggacctcgccgcgtacagcgtcagcctcgtaaacgggttcaacgtgccgatggtgttgagtccgcaggcaggcggtgggcagtgtccggcgctcggctgcgccgtggacctcaactgcgactgccctccggacaaccgggccgccgaaggcaccgcgtgccgcgggcccgcggggtacttcaagaaccgttgcccgctcacgaggacgacgtcgaccgacgtggagcccgtgccgcagagctgctgcgcgcccggggagctcaagatcgtcctctgccagtcgtccatgctccagcgcggcgcctcggcggcggaggacaccgacatggtcatccgcactgtcgtcgccgacaactagagcacagagcttccgtgtcgcatgtccttctcgctttgccgtacttctacgccaggcacgatccgtcgtactacgtttcagttaacagtccgtgagcgttaattaaggggccagttttcatacaaatgtcgcagtttgaatgtttgtatttttctatgaaccctggaccttggaagt

SEQ ID NO: 38889 - protein, 228 aa, Zea mays subsp. mays
MAKDLAFVLLVLAALAAFSSATKLTIHNLCPHPVWPLVTPNAGLPSISDNAARLDTNAILSLTFPSTFWAGRVAARTGCDDGTSPPRGCFTGDAPPSTVAQITVHDSGNLDLAAYSVSLVNGFNVPMVLSPQAGGGQCPALGCAVDLNCDCPPDNRAAEGTACRGPAGYFKNRCPLTRTTSTDVEPVPQSCCAPGELKIVLCQSSMLQRGASAAEDTDMVIRTVVADN

SEQ ID NO: 38890 - DNA, 822 bp, Zea mays subsp. mays
gcgtgatctctctcccttcctcccttccggcgacgcctgggccaccgccgcggccgccctacgccaggtgcccaggtcctcgtccggcccttcgccggcgatgagcacccaccaggccaatacgctgcggttgtacctcacctgcatccggaacactctggaggcggcgatgtgcctccagaatttcccttgccaagaagtcgagaggcacaacaaaccggaggtggagctcaagacaagccctgaacttctgctgaatccggtattgatatgccgcaacgaagcagaaaaatgcttgatagagacttcaatcaactccatacgtataagcatgaaggttaagcaggcagatgaattggagaacattcttgccaagaagttccttaggtttttgtcaatgagggcagaggcattccaagtgttgaggagaaaaccggttcagggctatgatatcagtttcctgataacaaactaccattgtgaggacatgcataagcacaagctcatagatttcatcgtgcaatttatggaggatattgacaaggagatcagtgagctgaagctgtcagtaaacactcgtggccggctagtggccactgaattcttgaagcagttcttatgactcggccatggccgtagtcagtgttgattatcatggcctgcaactaagctgccgttctgcaacagctttaagatttttttacacgacagctcttgtaaatgccttgccaaagatgcattcgtggccctgggccacctgattaacagctgacaattacagtatcaggacgcacatagcgctctgagattgttcatgtgatc

SEQ ID NO: 38891 - protein, 206 aa, Zea mays subsp. mays
RDLSPFLPSGDAWATAAAALRQVPRSSSGPSPAMSTHQANTLRLYLTCIRNTLEAAMCLQNFPCQEVERHNKPEVELKTSPELLLNPVLICRNEAEKCLIETSINSIRISMKVKQADELENILAKKFLRFLSMRAEAFQVLRRKPVQGYDISFLITNYHCEDMHKHKLIDFIVQFMEDIDKEISELKLSVNTRGRLVATEFLKQFL

SEQ ID NO: 38892 - protein, 173 aa, Zea mays subsp. mays
MSTHQANTLRLYLTCIRNTLEAAMCLQNFPCQEVERHNKPEVELKTSPELLLNPVLICRNEAEKCLIETSINSIRISMKVKQADELENILAKKFLRFLSMRAEAFQVLRRKPVQGYDISFLITNYHCEDMHKHKLIDFIVQFMEDIDKEISELKLSVNTRGRLVATEFLKQFL

SEQ ID NO: 38893 - protein, 150 aa, Zea mays subsp. mays
MCLQNFPCQEVERHNKPEVELKTSPELLLNPVLICRNEAEKCLIETSINSIRISMKVKQADELENILAKKFLRFLSMRAEAFQVLRRKPVQGYDISFLITNYHCEDMHKHKLIDFIVQFMEDIDKEISELKLSVNTRGRLVATEFLKQFL

SEQ ID NO: 38894 - DNA, 1035 bp, Zea mays subsp. mays
aaaagagcaatggccgggaaggagatgacgccgaactcgaaggcggcggcgccaccggcgacgatacgcctcgtgaacttcatctccgaagaccagcttgacgaggtgaagcggacacgaggggagcgtgtggaggacggcaccgcgcagcgcgacaaacccctcttccagatcctacaggagaacaaggagaagaaggacgccgagttcaatgagcgtttcaagcacagacctccaaaggctttggatgaggatgagacagagtttcttgataaattggctttgtcaagaaaggaatatgaacagcaggtggccaatgaagaagcagaacagctccgcggtttccatgaggctgtagctgcacggtccaccgttgttcatgaactcgagactcctacagtatctagacctgagctgaagctgaactatgctagcacctacccctgtttaggagagcagacctaagccacctacaaagaggagccagcctgcgctcctgaagaacataataatttccgtgaagccgcatgccaagaaaccaaaggttgagacggaagctaaacctgctcccgaggagcggcggccttcagataggcacggctcagatcagaagcaaccagacgacacaaaggcaacgcttggctctctagtggcttatgacgacgacgacgacgaaagtggtgaggacgttgactgacagtggcggcgtttgagaattcagctgtggataacccgcaagatgatggataactgcgttcgagtgttcaggtatggatatggataccgcaagaggttactgggagagatgctgcagccttttgggttttcctcgaggagaggcacttctattgcattctaaaaatcggaagcctttacagaaattttcttgtatgtattgtacaatttgaaaacgagccgggaacattactaatggttggtacgtacgttggtaccacgttgtttgacgaaggaactctgtagatagttgttgtagtttatctgatgagcgcattttgctttcacaaggacgtttag

SEQ ID NO: 38895 - protein, 154 aa, Zea mays subsp. mays
KRAMAGKEMTPNSKAAAPPATIRLVNFISEDQLDEVKRTRGERVEDGTAQRDKPLFQILQENKEKKDAEFNERFKHRPPKALDEDETEFLDKLALSRKEYEQQVANEEAEQLRGFHEAVAARSTVVHELETPTVSRPELKLNYASTYPCLGEQT

SEQ ID NO: 38896 - protein, 151 aa, Zea mays subsp. mays
MAGKEMTPNSKAAAPPATIRLVNFISEDQLDEVKRTRGERVEDGTAQRDKPLFQILQENKEKKDAEFNERFKHRPPKALDEDETEFLDKLALSRKEYEQQVANEEAEQLRGFHEAVAARSTVVHELETPTVSRPELKLNYASTYPCLGEQT

SEQ ID NO: 38897 - protein, 146 aa, Zea mays subsp. mays
MTPNSKAAAPPATIRLVNFISEDQLDEVKRTRGERVEDGTAQRDKPLFQILQENKEKKDAEFNERFKHRPPKALDEDETEFLDKLALSRKEYEQQVANEEAEQLRGFHEAVAARSTVVHELETPTVSRPELKLNYASTYPCLGEQT

SEQ ID NO: 38898 - DNA, 875 bp, Zea mays subsp. mays
atccccaatatatccccactcttcgcctcctttctggagcagctagggttccgtcctcgatccgatccgccgagtgcacaccacctttccccactccgatcgaatcgatggccgccgagggcgagaagaagatgataaccctcaaaagctccgatggcgaggagttcgaggtggaagaggcggtggcgatggagtcgcagaccatccgccacatgatcgaggatgactgcgccgacaacggtatccctcttcctaacgtcaactccaagatcctatccaaggtaatcgagtactgcaacaagcacgtacatgccgccgccgccaagagcgagtgctcgcgcagcctcttcggcggctactccgactacccgaactacatggccaacacggagtcgttccgcgccaaggcgcggtcgcagagcgcgccgaagcagaggccgcagtacgagcggtccagctccctacgcagggcgtcggcggcgcagaggtcggcggcggcggcggcctcctccctgcacgccaagttcaccaacaaggcgtacccgggctctggcaggctggatcggcttggcttgccggccaggtactgatactgagcctgcctaattcgcgtcaggatgatgtgctgccgctgtgtctcgagcgaggaggacgacgacgaagaagtgcaatcgactagtggtagttaggttcccccgtgccttggttgtgctattaccatcaacagttttttctgtttcttgctttgggtagctacccatgtttaaagttgctggtagctgtaatgatgctataatgcgtgcttaactgctgacgaacctttttcctctacatttccgtggtatatatatatgtgccgtcaaatcatgcatggg

SEQ ID NO: 38899 - protein, 195 aa, Zea mays subsp. mays
PQYIPTLRLLSGAARVPSSIRSAECTPPFPTPIESMAAEGEKKMITLKSSDGEEFEVEEAVAMESQTIRHMIEDDCADNGIPLPNVNSKILSKVIEYCNKHVHAAAAKSECSRSLFGGYSDYPNYMANTESFRAKARSQSAPKQRPQYERSSSLRRASAAQRSAAAAASSLHAKFTNKAYPGSGRLDRLGLPARY

SEQ ID NO: 38900 - protein, 160 aa, Zea mays subsp. mays
MAAEGEKKMITLKSSDGEEFEVEEAVAMESQTIRHMIEDDCADNGIPLPNVNSKILSKVIEYCNKHVHAAAAKSECSRSLFGGYSDYPNYMANTESFRAKARSQSAPKQRPQYERSSSLRRASAAQRSAAAAASSLHAKFTNKAYPGSGRLDRLGLPARY

SEQ ID NO: 38901 - protein, 152 aa, Zea mays subsp. mays
MITLKSSDGEEFEVEEAVAMESQTIRHMIEDDCADNGIPLPNVNSKILSKVIEYCNKHVHAAAAKSECSRSLFGGYSDYPNYMANTESFRAKARSQSAPKQRPQYERSSSLRRASAAQRSAAAAASSLHAKFTNKAYPGSGRLDRLGLPARY

SEQ ID NO: 38902 - DNA, 1789 bp, Zea mays subsp. mays
atctagggctattagaaaacgtgcaaggcttctttcctcccaaatcccctgagcaaggcccccgtcggctagcgccgcagccgtcgccgtcgacgccgactctcaccggcagccgcttgcagcgcgtcccttccccgctcccggcgccatggactgcgcaaagggaaggtcgatggcggacctctacgacgagctgatgttggagatcttctcgcgcatgcccgtcaaagacctccgccattccacttacgtgtgcaaatcttggcgcaacctcatcaccgaccccctcaacggcaagaagctgccccagaccctggaaggcttcttccacggcggcgtcggagggcctcgcagctacggccatttcaccagcctgccggggagcggagtgcctccggtcgacccttccttctcttttatcaaggcaatggtgcctggggtcgagcgcatggtcctcttggattcttgcaacgggctcctgctctttgggtgcacgcgggagggcaagttcgggtacatcgtgtcaaaccctgcgaccaagaaattggtgactgtgcccgccagctccggctcttgtccgcctccacctttatttgcatttgaagcggaagtcgattatgatagtggggaaaaatatgcacacacctttctgatgtttaacccggctgtctcctcgcacttccacttgttccagatctggcaggatatgacggtggaggatgtggaaacggtgcactcttactcgtctgaaacgaaggcatggagtgacaggtcaagcaagtggcggcgaggtgaagagggcagtgaatgggggctgtggggtgaatgcctcatcaaattcaggatgggcagggctttgatcaacgatctgctgcattttgttggcttcgattctcagaaacaagaggatgtgatagttgcagtggatggggaagggaagacttgtaggatcatcgactggcatggtaaggatgtgagattaatcatttttattggtcaatcccaagaccgtctgcactgcatcggtgtcaatacgaaagcaggtcaagaccatatacacatcacgcggatgtcaatctgggttcttgaggactatgatacaaaagcatggatcctgaagcacagtgtgggctctttgcagttttttggattactgggtcgcctggtccatgatttcaatattgtggccattcatccagatcacaattctatcatcattgttcagcactggaaccagaaacttgtatcatataacatggatacccaggaactgcgtggtctccgcactcttgaaaatggctgtgcctatgtggctattaccccatacgttccctgtttcttggagtcatcagttcttgccaccaaaggttgaggttgttgctttttggagacttctctgcatgttcagcaatagcttgatcatccaagtgtggggcaaactagcagtgtgggtaaacctactagaatcaggtggtgcaaagttggattacatgtctttaggtgatctattctgatggtgctttaatgtcctcttgtaatgctgtgagaaagctctttacaagacagcatgcaggttagcattacatattactagttcgagctgcccaacacatgtaagttctcagttttgagtttcagatgctacactttgtgtttccagaatgatgtctccatcttttttgtgtgcttcctttttctcggcctatattagcgagccattactgactgaatttgtgcttggtcggtgctgtatatgtattttatgctgggaaatgcatttatcttcccc

SEQ ID NO: 38903 - protein, 407 aa, Zea mays subsp. mays
MDCAKGRSMADLYDELMLEIFSRMPVKDLRHSTYVCKSWRNLITDPLNGKKLPQTLEGFFHGGVGGPRSYGHFTSLPGSGVPPVDPSFSFIKAMVPGVERMVLLDSCNGLLLFGCTREGKFGYIVSNPATKKLVTVPASSGSCPPPPLFAFEAEVDYDSGEKYAHTFLMFNPAVSSHFHLFQIWQDMTVEDVETVHSYSSETKAWSDRSSKWRRGEEGSEWGLWGECLIKFRMGRALINDLLHFVGFDSQKQEDVIVAVDGEGKTCRIIDWHGKDVRLIIFIGQSQDRLHCIGVNTKAGQDHIHITRMSIWVLEDYDTKAWILKHSVGSLQFFGLLGRLVHDFNIVAIHPDHNSIIIVQHWNQKLVSYNMDTQELRGLRTLENGCAYVAITPYVPCFLESSVLATKG

SEQ ID NO: 38904 - protein, 399 aa, Zea mays subsp. mays
MADLYDELMLEIFSRMPVKDLRHSTYVCKSWRNLITDPLNGKKLPQTLEGFFHGGVGGPRSYGHFTSLPGSGVPPVDPSFSFIKAMVPGVERMVLLDSCNGLLLFGCTREGKFGYIVSNPATKKLVTVPASSGSCPPPPLFAFEAEVDYDSGEKYAHTFLMFNPAVSSHFHLFQIWQDMTVEDVETVHSYSSETKAWSDRSSKWRRGEEGSEWGLWGECLIKFRMGRALINDLLHFVGFDSQKQEDVIVAVDGEGKTCRIIDWHGKDVRLIIFIGQSQDRLHCIGVNTKAGQDHIHITRMSIWVLEDYDTKAWILKHSVGSLQFFGLLGRLVHDFNIVAIHPDHNSIIIVQHWNQKLVSYNMDTQELRGLRTLENGCAYVAITPYVPCFLESSVLATKG

SEQ ID NO: 38905 - protein, 391 aa, Zea mays subsp. mays
MLEIFSRMPVKDLRHSTYVCKSWRNLITDPLNGKKLPQTLEGFFHGGVGGPRSYGHFTSLPGSGVPPVDPSFSFIKAMVPGVERMVLLDSCNGLLLFGCTREGKFGYIVSNPATKKLVTVPASSGSCPPPPLFAFEAEVDYDSGEKYAHTFLMFNPAVSSHFHLFQIWQDMTVEDVETVHSYSSETKAWSDRSSKWRRGEEGSEWGLWGECLIKFRMGRALINDLLHFVGFDSQKQEDVIVAVDGEGKTCRIIDWHGKDVRLIIFIGQSQDRLHCIGVNTKAGQDHIHITRMSIWVLEDYDTKAWILKHSVGSLQFFGLLGRLVHDFNIVAIHPDHNSIIIVQHWNQKLVSYNMDTQELRGLRTLENGCAYVAITPYVPCFLESSVLATKG

SEQ ID NO: 38906 - DNA, 932 bp, Zea mays subsp. mays
agctaggatcagatcatttcaacttcccgactctcgcatcccggattgttccgccgcccgcacacgtctctcctcttccgttcctctcctgcctccagctctccacggtctctgacccgcacaactgaacccgcgatggcgcgccgcctcctcgtcgccctcctcgccgcgtcgctcctgctcccgctcgcccgcgcggactcctcctcgtccccgcccgacaccaccgcgtacgacgagctccgcctccggggcttcccgcgcggcctgctcccggccaacgtgcgggcctacacgctcgactccggctccggggacttcgccgtcgacctccgctccagctgccggatcgtgctgcccgcggggagctacctcgccgccttcagcgaccgcctcacgggccgcctcgacgaccgccgcatctcgggcctcgacggcatccgcgtcagggccttcttccgctggtggtccatcacggggatccgcgccgatggggaccagctcgtcttcgaggtcggctccgtctccgccaagttccccgcgcgggacttcaacgccagcctcgactgccccgcccaggcggcgtcctaagtcaaggaggtatcctgtcgcatgttccatgacatgtgacattctaaaggggcagttggaagccaagcacatcaatgtttttaatttcatctgtctttattgtaattgtataagtttacaatagatgcatagaacagactggatcgataaaagcgccttcacagaccaaaaacccggtatcacggtagtggttcgtgcatttcgttagaaatgccctacgtcttattttgaaaagttgtgcttgtatatcttacttattgacaatagctgtacttataagactacttgcataaagaagaaaagtgatgtgcaaggccgaaaggcccctatgcgctaaatac

SEQ ID NO: 38907 - protein, 151 aa, Zea mays subsp. mays; identical to SEQ ID NO: 36137

SEQ ID NO: 38908 - DNA, 1486 bp, Zea mays subsp. mays
tagaacatcctaatcgaaaatcttttgatttgattttgcaggatccatccgagaacgagcagccacttctccgatgccgtcctcaatggccaaatccctcctcctccctccccagttcgtctccgtctcaccccgccacccccaccgcgccggattccccgtcctcaagccccgccgcgcctcgctgctggccttcaccggcggagacgtcacgcccccgccggacgccgacagcggctccaacaccaaccctctcgtcgatgtgccccgcgcgctctggcgccgcaccctgcagcctctcggcgactatggcttcggcaagcgcagcgtctgggagggcggcgtcggtctcttcatggtctccggggccgccctcctcgccctcgccctcgcatggcttaggggattccagctccgctcccgcttccgcaagtacaacaccgtcttcgagttcacgcaggcgtgtggcatctgcgtcggcacgcccgtccggatacgaggggtcaccgtcggctccgtcgtccgcgtcgactcctccctcaggagcatcgatgccaccgttgaggttggagatgataagatcatcataccacggaattcagtggtcgaggtgaatcagtcgggtcttctaatggagacgctcattgatatcacacccaaggatccactccctgcaccttcagtagggccacttgacccaaactgcatcaaagaaggtttgattctctgtgacaaagagaggatgaaaggacagcaaggtgtaagcttagatgcattggtgggaatatttacccgactaggtagagacatggaggagattggcgttagcaaaagctataagttggctgaaaaagttgcatctataatggaagaggcacaacctcttcttacacggattgaggatttagctgaagaaatgcaacctttgctctctgaagtcggtgatagtgatctgctgaaggatgtggagactatagctaaaggcctggccgacgcgtctgttgacctaagaaggctgaagtcgtccatgctcaccccagagaacacggatcttattaagcagtctattttcacccttatatttaccctgaagaacattgagagtatcagctcggacatctctgggttcacgggggatgagacgacaaggcagaacatcaagcttctgatcaagtctctcagcaggctattatgattgtttttcaatgtgcagaacagaatgatggattgctttgctttgctttgtttgagacaggaaatgatgctggtagagtagggtgactgtgtgtgtgtctcggtggcacagaggtgtaggaagagtagcagttaattaatgttccacaaggttttggttattctggtaataagtttctttttttttcttttttctttttaaaaaaactcagatcagtattgagctgttgtaggtcatatagtaggcccatttttcatcagttgatggatcgcccttgttggctgcctgaac

SEQ ID NO: 38909 - protein, 373 aa, Zea mays subsp. mays
MPSSMAKSLLLPPQFVSVSPRHPHRAGFPVLKPRRASLLAFTGGDVTPPPDADSGSNTNPLVDVPRALWRRTLQPLGDYGFGKRSVWEGGVGLFMVSGAALLALALAWLRGFQLRSRFRKYNTVFEFTQACGICVGTPVRIRGVTVGSVVRVDSSLRSIDATVEVGDDKIIIPRNSVVEVNQSGLLMETLIDITPKDPLPAPSVGPLDPNCIKEGLILCDKERMKGQQGVSLDALVGIFTRLGRDMEEIGVSKSYKLAEKVASIMEEAQPLLTRIEDLAEEMQPLLSEVGDSDLLKDVETIAKGLADASVDLRRLKSSMLTPENTDLIKQSIFTLIFTLKNIESISSDISGFTGDETTRQNIKLLIKSLSRLL

SEQ ID NO: 38910 - protein, 369 aa, Zea mays subsp. mays
MAKSLLLPPQFVSVSPRHPHRAGFPVLKPRRASLLAFTGGDVTPPPDADSGSNTNPLVDVPRALWRRTLQPLGDYGFGKRSVWEGGVGLFMVSGAALLALALAWLRGFQLRSRFRKYNTVFEFTQACGICVGTPVRIRGVTVGSVVRVDSSLRSIDATVEVGDDKIIIPRNSVVEVNQSGLLMETLIDITPKDPLPAPSVGPLDPNCIKEGLILCDKERMKGQQGVSLDALVGIFTRLGRDMEEIGVSKSYKLAEKVASIMEEAQPLLTRIEDLAEEMQPLLSEVGDSDLLKDVETIAKGLADASVDLRRLKSSMLTPENTDLIKQSIFTLIFTLKNIESISSDISGFTGDETTRQNIKLLIKSLSRLL

SEQ ID NO: 38911 - protein, 279 aa, Zea mays subsp. mays
MVSGAALLALALAWLRGFQLRSRFRKYNTVFEFTQACGICVGTPVRIRGVTVGSVVRVDSSLRSIDATVEVGDDKIIIPRNSVVEVNQSGLLMETLIDITPKDPLPAPSVGPLDPNCIKEGLILCDKERMKGQQGVSLDALVGIFTRLGRDMEEIGVSKSYKLAEKVASIMEEAQPLLTRIEDLAEEMQPLLSEVGDSDLLKDVETIAKGLADASVDLRRLKSSMLTPENTDLIKQSIFTLIFTLKNIESISSDISGFTGDETTRQNIKLLIKSLSRLL

SEQ ID NO: 38912 - DNA, 1257 bp, Zea mays subsp. mays
accagccatgactcctccgcttctcctctccctcctgctggtggcggcgaggtgctgccgctgctgccatggctggtcgtcgtttcagaagccggcggtgactgcggtgatcgctttcggagactccattgtggacccggggaacaacaacgggctgcatacggtgatcaaggccaaccatccgccctacggcaaggacttgttcaaccacgaggccaccggacgctactccaacggcctcattccaaccgacctaattgcccaggagctgggtgtgaagctgctgcttcctgcctacttgggcgtggatctgagcccggaggacctgctcaccggcgtcagcttcgcgtccggcgccaccgggttcgacccgctgactcccctcgtagtgagcgtcatctcgctggagcagcagctcgcctacttcgacgagtaccgcggcaagctggtggatatcgccggcgaggatgagacggcgaggatcatcgacggtgcgctgttcgtggtgtgcgcgggcaccgacgacgtggccaacacctacttcacgacgccgttccgcagcgcggagtacgacatcccgagctacgtggagctgctggtgggcggcgccgaggagttcctccgcaacgtcagctccaggggcgccaggaagatcggcttcgtggggatgccgcccgtggggtgcgtgccgtcgcagcggacgctgggcggtggcctcgccagggcgtgcgagcccaagcggaacgaggcggcgcagctgtacaacgccaggatccaggagatggtcgccgacgccgaccgagacttggcgacgaccatggtggtgttcctggacatctaccgcgtcctggacgacctgatggagcgcggggacaagtacggcttctctgagaccaccaggggatgctgcggcaccggcaccatcgaggtcacggggctctgcgactcccgcttcgtctccgtctgcgacaacgtctcgcagcacgtgttcttcgacagctaccaccccaccgagagagcctacaggatcatcgtcaaggacatctttgacaactacggacaagtgctcatcggatgatatatatctaccttgcttgagcgatcgagcatgcatgttcatcttcttcatctttatgtacgttcggctagctggcccaaagcctcaaggaggcccatttatcttcttcttactcctcctcgccccaagaataattaattgtaagcatgatctgcggaatcagacggggatggtctggt

SEQ ID NO: 38913 - protein, 358 aa, Zea mays subsp. mays
PAMTPPLLLSLLLVAARCCRCCHGWSSFQKPAVTAVIAFGDSIVDPGNNNGLHTVIKANHPPYGKDLFNHEATGRYSNGLIPTDLIAQELGVKLLLPAYLGVDLSPEDLLTGVSFASGATGFDPLTPLVVSVISLEQQLAYFDEYRGKLVDIAGEDETARIIDGALFVVCAGTDDVANTYFTTPFRSAEYDIPSYVELLVGGAEEFLRNVSSRGARKIGFVGMPPVGCVPSQRTLGGGLARACEPKRNEAAQLYNARIQEMVADADRDLATTMVVFLDIYRVLDDLMERGDKYGFSETTRGCCGTGTIEVTGLCDSRFVSVCDNVSQHVFFDSYHPTERAYRIIVKDIFDNYGQVLIG

SEQ ID NO: 38914 - protein, 356 aa, Zea mays subsp. mays
MTPPLLLSLLLVAARCCRCCHGWSSFQKPAVTAVIAFGDSIVDPGNNNGLHTVIKANHPPYGKDLFNHEATGRYSNGLIPTDLIAQELGVKLLLPAYLGVDLSPEDLLTGVSFASGATGFDPLTPLVVSVISLEQQLAYFDEYRGKLVDIAGEDETARIIDGALFVVCAGTDDVANTYFTTPFRSAEYDIPSYVELLVGGAEEFLRNVSSRGARKIGFVGMPPVGCVPSQRTLGGGLARACEPKRNEAAQLYNARIQEMVADADRDLATTMVVFLDIYRVLDDLMERGDKYGFSETTRGCCGTGTIEVTGLCDSRFVSVCDNVSQHVFFDSYHPTERAYRIIVKDIFDNYGQVLIG

SEQ ID NO: 38915 - DNA, 745 bp, Zea mays subsp. mays
ttgacagcaagtccaattgttggattccccaaggtatttggttacacgatttaggagtcttcttaaagaactgttgctatgtaagtacagcaagattgctcgacttgtgttatttgtagatacaatggcgtgctcttgatgagatcaattctggagtgtgtgatgggatgacttatgaagagataaagaaaatcatgcccgaggaatttgagtcacgaaagaaggacaagctaagataccgctacccccgtggagaatcttacctcgatgtgatacagaggctggaacccgtcatcatcgagctagaacgccagcgtgcaccagtggttgtcatatctcatcaggctgtactgcgagcactgtatgcatatttcgcggaccgtcctttgagagaagttccagagatagagatgccactacacaccataatcgagatacaaatgggcgtcacgggtgtggaagagaagaggtacaaactcatggactgaatgaatacataaaagcagctggttggctgtttcatacagcaagtacacataacacagaagccttttcccttctctctctctccacacggtgttcagtgtaatttctttggaaaaaagacatgttgaacattgtaaagaaaaaactaataaggaactgtaaaaatggcatgcttactgtaacgaataaggaatacagactgggggtctccaatgcttattcagaaacatattccgtcaaaaaaaaaaaaaaaaaaaag

SEQ ID NO: 38916 - protein, 106 aa, Zea mays subsp. mays
MTYEEIKKIMPEEFESRKKDKLRYRYPRGESYLDVIQRLEPVIIELERQRAPVVVISHQAVLRALYAYFADRPLREVPEIEMPLHTIIEIQMGVTGVEEKRYKLMD

SEQ ID NO: 38917 - protein, 97 aa, Zea mays subsp. mays
MPEEFESRKKDKLRYRYPRGESYLDVIQRLEPVIIELERQRAPVVVISHQAVLRALYAYFADRPLREVPEIEMPLHTIIEIQMGVTGVEEKRYKLMD

SEQ ID NO: 38918 - DNA, 682 bp, Zea mays subsp. mays
aacttgtcacctgcagagaaagaaagaagccctagattttgtcaaaaggcggttgcagaacaaaaaaccatggccggaattggaccgataactcaggattgggagccggtggtgatccgtaagaaacccgctaacgccgctgccaagcgcgacgagaaaactgtcaacgccgctcgtcgatccggcgccgatatcgagaccgtcagaaaattcaatgctggaaccaacaaggcggcatcaagcggcacatctctgaacacaaaaatgcttgatgatgacactgagaaccttactcatgaacgtgtgcctactgagctaaagaaagccattatgcaagccaggacagacaagaagctaacccagtcccaacttgctcaaatcatcaatgagaagccacaagtgattcaagagtatgagtctggcaaagctatacccaaccagcaaatcctttctaagctggagagagcgcttggagctaagcttcgtggaaagaagtgagccaagttctactgatgtagcaagtaacaagaatcaatgctttcgtctaatgccgtaactttgccaagaagaatattttctgattgtaagaaagcaaaaccgtttgaatgtttgtttcgttgatggaatctctatctcataaactcatatcaatataataacttgggtcttttcatcacataag

SEQ ID NO: 38919 - protein, 165 aa, Zea mays subsp. mays
NLSPAEKERSPRFCQKAVAEQKTMAGIGPITQDWEPVVIRKKPANAAAKRDEKTVNAARRSGADIETVRKFNAGTNKAASSGTSLNTKMLDDDTENLTHERVPTELKKAIMQARTDKKLTQSQLAQIINEKPQVIQEYESGKAIPNQQILSKLERALGAKLRGKK

SEQ ID NO: 38920 - protein, 142 aa, Zea mays subsp. mays
MAGIGPITQDWEPVVIRKKPANAAAKRDEKTVNAARRSGADIETVRKFNAGTNKAASSGTSLNTKMLDDDTENLTHERVPTELKKAIMQARTDKKLTQSQLAQIINEKPQVIQEYESGKAIPNQQILSKLERALGAKLRGKK

SEQ ID NO: 38921 - DNA, 2152 bp, Zea mays subsp. mays
ctcgtccacccattcctccgctcttccttaattcctcatttcctccacgtacgcgtgcatactctgcgagtccaggagatttttttccccttcttcacgatactctcgacgagagtgtctccatggccggaaaaggagacgggccggcgatcggcatcgacctcggtacgacctactcgtgcgtcggggtgtggcagcatgaccgagtcgagatcatcgccaacgaccagggcaaccgtacaacgccgtcttatgtcgcgttcaccgattcggagaggctcgtcggcgacgccgccaagaaccaggtcgccatgaaccccatcaacaccgtcttcgacgcgaagcggctcatcggccggcgcttctctgacacgtcggtgcagagtgacgccaagctatggcctttcaaagtgatcccgggctccggcgacaagcccatgatcggggtgcagttcaggggcgaggagaaacagttctcggccgaggagatcagctccatgatcctgaacaagatgaaggagacggccgaggcttacctcggcaccaccatcaagaacgctgtcgtcaccgtcccggcctacttcaacgactcccagcgccaggccaccaaggacgccggcgtcatctccggcctcaacgtcatgcgcatcatcaacgagcccaccgccgcggccatcgcatacgggctcgacaagaagtcgagcagcgacggcgagaagaacgtcctcatcttcgacctcggcggcggtacctttgacgtctcgctcctcaccatcgaggagggcatctttgaggtcaaggccaccgccggcgacacccacctgggaggcgaggacttcgacaaccggctcgtgaaccacttcgtccaggagttcaagaggaagaacaagaaggacatcactggcaaccccagggcgctccggcgactgaggaccgcctgcgagagggctaagaggacgctctcctccaccgcccaaaccaccatcgagatcgactcgctctatgagggcatcgacttctacacgaccatcacccgtgcccggttcgaggagctcaacatggacctcttccgcaagtgcatggagcccgtggagaagtgcctccgcgacgccaagatggacaagagcagcgtgcacgacgtcgttctcgtgggcggctccactcgcatcccccgcgtgcagcagctgctccaggacttcttcaacggcaaggagttgtgcaagagcatcaacccagacgaggctgtcgcgtacggagcggccgtccaggccgccatcctcactggcgagggcaatgagaaggttcaggatctgctcctgctcgacgtctcgccgctctcgctcggcctggagacggccggaggcgtcatgactgtgctcatccccaggaacaccaccatcccgacaaagaaggagcaggtcttctccacttactccgacaaccagcccggcgtgctcatccaggtgtacgaaggtgagagggccaggaccaaagacaacaatctgctcggcaagttcgagctctctggcatccctccggcgcccaggggcgtcccccagatcaccgtgtgtttcgacatggacgcgaacggcatcctcaacgtgtcagcggaggacaagaccaccggacagaagaataagatcacgatcaccaacgataagggacggctaagtaaggaggagatcgagaagatggtgcaggaggcagagaagtacaaagccgaggacgaggaacaccagaagaaggtgaacgccaagaacacgctcgagaactatgcctacaatatgcgcaacaccatcagagacgacaagatcgcctccaagctaccggtggacgacaagaaaaagatcgatgacgccgtcgagggggccatcaattggctcgacaacaaccagctcgccgaggttgatgagtttgaggacaagatgaaggagctggagggcatttgcaaccccatcatcgcgaagatgtatcagggcgccgctggtcctgacatggccggtggcatggatcgggatgcttcgccggctggtggcagcggtgctggacccaagatcgaagaagtcgactaaatgaggaaattcttatatatgtagttttgcttaaataattgcgtcaattacaaagtggatcttattattatttttatgcg

SEQ ID NO: 38922 - protein, 689 aa, Zea mays subsp. mays
RPPIPPLFLNSSFPPRTRAYSASPGDFFPLLHDTLDESVSMAGKGDGPAIGIDLGTTYSCVGVWQHDRVEIIANDQGNRTTPSYVAFTDSERLVGDAAKNQVAMNPINTVFDAKRLIGRRFSDTSVQSDAKLWPFKVIPGSGDKPMIGVQFRGEEKQFSAEEISSMILNKMKETAEAYLGTTIKNAVVTVPAYFNDSQRQATKDAGVISGLNVMRIINEPTAAAIAYGLDKKSSSDGEKNVLIFDLGGGTFDVSLLTIEEGIFEVKATAGDTHLGGEDFDNRLVNHFVQEFKRKNKKDITGNPRALRRLRTACERAKRTLSSTAQTTIEIDSLYEGIDFYTTITRARFEELNMDLFRKCMEPVEKCLRDAKMDKSSVHDVVLVGGSTRIPRVQQLLQDFFNGKELCKSINPDEAVAYGAAVQAAILTGEGNEKVQDLLLLDVSPLSLGLETAGGVMTVLIPRNTTIPTKKEQVFSTYSDNQPGVLIQVYEGERARTKDNNLLGKFELSGIPPAPRGVPQITVCFDMDANGILNVSAEDKTTGQKNKITITNDKGRLSKEEIEKMVQEAEKYKAEDEEHQKKVNAKNTLENYAYNMRNTIRDDKIASKLPVDDKKKIDDAVEGAINWLDNNQLAEVDEFEDKMKELEGICNPIIAKMYQGAAGPDMAGGMDRDASPAGGSGAGPKIEEVD

SEQ ID NO: 38923 - protein, 649 aa, Zea mays subsp. mays
MAGKGDGPAIGIDLGTTYSCVGVWQHDRVEIIANDQGNRTTPSYVAFTDSERLVGDAAKNQVAMNPINTVFDAKRLIGRRFSDTSVQSDAKLWPFKVIPGSGDKPMIGVQFRGEEKQFSAEEISSMILNKMKETAEAYLGTTIKNAVVTVPAYFNDSQRQATKDAGVISGLNVMRIINEPTAAAIAYGLDKKSSSDGEKNVLIFDLGGGTFDVSLLTIEEGIFEVKATAGDTHLGGEDFDNRLVNHFVQEFKRKNKKDITGNPRALRRLRTACERAKRTLSSTAQTTIEIDSLYEGIDFYTTITRARFEELNMDLFRKCMEPVEKCLRDAKMDKSSVHDVVLVGGSTRIPRVQQLLQDFFNGKELCKSINPDEAVAYGAAVQAAILTGEGNEKVQDLLLLDVSPLSLGLETAGGVMTVLIPRNTTIPTKKEQVFSTYSDNQPGVLIQVYEGERARTKDNNLLGKFELSGIPPAPRGVPQITVCFDMDANGILNVSAEDKTTGQKNKITITNDKGRLSKEEIEKMVQEAEKYKAEDEEHQKKVNAKNTLENYAYNMRNTIRDDKIASKLPVDDKKKIDDAVEGAINWLDNNQLAEVDEFEDKMKELEGICNPIIAKMYQGAAGPDMAGGMDRDASPAGGSGAGPKIEEVD

SEQ ID NO: 38924 - protein, 586 aa, Zea mays subsp. mays
MNPINTVFDAKRLIGRRFSDTSVQSDAKLWPFKVIPGSGDKPMIGVQFRGEEKQFSAEEISSMILNKMKETAEAYLGTTIKNAVVTVPAYFNDSQRQATKDAGVISGLNVMRIINEPTAAAIAYGLDKKSSSDGEKNVLIFDLGGGTFDVSLLTIEEGIFEVKATAGDTHLGGEDFDNRLVNHFVQEFKRKNKKDITGNPRALRRLRTACERAKRTLSSTAQTTIEIDSLYEGIDFYTTITRARFEELNMDLFRKCMEPVEKCLRDAKMDKSSVHDVVLVGGSTRIPRVQQLLQDFFNGKELCKSINPDEAVAYGAAVQAAILTGEGNEKVQDLLLLDVSPLSLGLETAGGVMTVLIPRNTTIPTKKEQVFSTYSDNQPGVLIQVYEGERARTKDNNLLGKFELSGIPPAPRGVPQITVCFDMDANGILNVSAEDKTTGQKNKITITNDKGRLSKEEIEKMVQEAEKYKAEDEEHQKKVNAKNTLENYAYNMRNTIRDDKIASKLPVDDKKKIDDAVEGAINWLDNNQLAEVDEFEDKMKELEGICNPIIAKMYQGAAGPDMAGGMDRDASPAGGSGAGPKIEEVD

SEQ ID NO: 38925 - DNA, 803 bp, Zea mays subsp. mays
atcctaatcgaaaactcgagtctggtcccccacccctcagcgcgacgaaggtaagatgttcctgcggaggatcctgaccggcgggggcggcctggcggccctgagggcggcgcgcgccgtgaaggagacgacggggatcgtgggccttgaggtggtgcctaacgcgcgagaggttctggtagggctctacgagcgcacgctcaaagagatcaaggccgtccccgaagacgagggttaccgcaaggccgttgaatccttcaccggtcaccgcctccagatctgccaggaggaggaggactggaagcgcatcgaggaccgaatcggatgcgggcaggtcgaggagctcatcgaggaggccgaggacgagctcaagctcatcgctaaaatgattgaatgggatccatggggtgttcccgatgactacgaatgtgaggtgattgaagacgacaccccaattcctaagcatgttcctcagcaccggcctgttcctcttcctgaggagttcttcaaggcactagatgctgtcaaatctgatcctgctcttcaaggcgatgctcctcctcaagtgaaggcgtaaggatggctgttcctggctaacgtcatttcacattttgccgcggtgggtagggactggtttcttgtgtcatttgccagcaatgcgcttgctctgagcagaataaatttctggtgagtaccatcaaagtgtgaatttgaacttagtgattcggcacagtaaacttgttgcccatgaaatactcgatgccctgaacatcgtttgttttgacgttataatcgatgttgac

SEQ ID NO: 38926 - protein, 173 aa, Zea mays subsp. mays
MFLRRILTGGGGLAALRAARAVKETTGIVGLEVVPNAREVLVGLYERTLKEIKAVPEDEGYRKAVESFTGHRLQICQEEEDWKRIEDRIGCGQVEELIEEAEDELKLIAKMIEWDPWGVPDDYECEVIEDDTPIPKHVPQHRPVPLPEEFFKALDAVKSDPALQGDAPPQVKA

SEQ ID NO: 38927 - DNA, 2143 bp, Zea mays subsp. mays
gagagagagagagagcatagtagtccccccccccccacgatcccccagtcccctcccctcacggctgcatgcccgcatccggattccggtccatccggcagccagacgctgccgccgtaaattccccttccgcgtctgtctggccggtggccgctgtggttttgtaggctagtgcgtgccgtcctcggacctctcctctcgtcctccaccaccatgactgaggcccagtctccactatccgccaccatggcgaaggaggcccagtcgtcgccgtccgccaccgtagcgcaggcgacggctctgccgcagctcgtattattcaactccttgacgaagagggaggagcccttccagccccgggtggaggggaaggtagggatgtacgtctgtggcgtcactccctacgactttagccacatcggccacgcgcgtgcctacgtcgccttcgacgtcctctacaggtacctgaaattcttggggtatgaagttgaatatgtccgtaatttcacggatatcgacgacaagattattaagcgtgcaaatgaacgcggtgaaacagttacaagtttgagtagccggtttatcaatgaatttcttcttgatatgactgagctccagtgtttacctcctacctgtgagccacgtgtaacagagcacattgagcatattatagagttgataaccaagataatggagaatgacaaagcctatgctatggaaggagatgtttacttttcagtcgaaagttttcctgaatatctcagtttatctggaagaaaattcgatcaaaatcaggcaggggcacgggttgcttttgatacacgaaagcgtaatcctgcagactttgcactctggaaggctgcaaaggagggcgaacctttttgggatagcccttggggccgtggaagaccgggatggcatattgaatgcagcgcaatgagtgctcactatttaggacatctattcgatattcatggtggggggaaagatttgatttttcctcatcatgagaatgagcttgcacaaagccgagctgcttatcctgagagtgaggtgaagtgctggatgcataatggctttgttaacaaggatgataaaaaaatggcaaaatcagataataactttttcacgattagagatatcactgctctttaccatccattggctttaagatttttcttgatgcgcactcattatagatcagatgtgaaccattctgatcaagcacttgagattgcatctgatcgtgtctattacatttttcagactctatatgactgcgaggaagtattagctacatatcgtgaagagggtatttctctctcagtgccgttcgaggagcaaaatctgattgataagcaccattcagaattcttgaaatatatgtcgaatgatcttaaaaccacagatgttctggatcgttgcttcatggagctgctgaaggccataaacagcagtttgaatgatttgaagaaactgcaacagaaaatagaacagcaaaagaagaaacagcaacagcagaagaagcagcaacagaagcaacagcaattgcaaaaacagccagaacattatattcaagctctgattgcactggaaatagaacttaaaaataaactgtctatacttggtctgatgccatcttcatctttggcagaggtactgaagcaattgaaggacaaagcactaaagagagcggggctgactgaagaaaaattgcaagagcagattgagcagagaaacgttgcaaggaagaataaacagtttgagatatctgatggaatcaggaaaaaccttgctaccaagggcatcgccctgatggatgaaccttctggtacagtgtggagaccatgcgaaccagaggggccgcacccactcaacaaatgatggtaaaatgagatttttgcctgagggcagctacacattttgaactaacaaaatcaccatctctggatgcagtattcttcactcaggggtagggggtccaggttgactcgccagtcgccagttgaaacttgcatttctggttgtgtaagaagcaatggaccccatatatatactttactccttgcgaggtttgagttttggttttggatataagacttggcaattccatttcaatgaaacagatgaaattttgcttggt

SEQ ID NO: 38928 - protein, 556 aa, Zea mays subsp. mays
MTEAQSPLSATMAKEAQSSPSATVAQATALPQLVLFNSLTKREEPFQPRVEGKVGMYVCGVTPYDFSHIGHARAYVAFDVLYRYLKFLGYEVEYVRNFTDIDDKIIKRANERGETVTSLSSRFINEFLLDMTELQCLPPTCEPRVTEHIEHIIELITKIMENDKAYAMEGDVYFSVESFPEYLSLSGRKFDQNQAGARVAFDTRKRNPADFALWKAAKEGEPFWDSPWGRGRPGWHIECSAMSAHYLGHLFDIHGGGKDLIFPHHENELAQSRAAYPESEVKCWMHNGFVNKDDKKMAKSDNNFFTIRDITALYHPLALRFFLMRTHYRSDVNHSDQALEIASDRVYYIFQTLYDCEEVLATYREEGISLSVPFEEQNLIDKHHSEFLKYMSNDLKTTDVLDRCFMELLKAINSSLNDLKKLQQKIEQQKKKQQQQKKQQQKQQQLQKQPEHYIQALIALEIELKNKLSILGLMPSSSLAEVLKQLKDKALKRAGLTEEKLQEQIEQRNVARKNKQFEISDGIRKNLATKGIALMDEPSGTVWRPCEPEGPHPLNK

SEQ ID NO: 38929 - protein, 545 aa, Zea mays subsp. mays
MAKEAQSSPSATVAQATALPQLVLFNSLTKREEPFQPRVEGKVGMYVCGVTPYDFSHIGHARAYVAFDVLYRYLKFLGYEVEYVRNFTDIDDKIIKRANERGETVTSLSSRFINEFLLDMTELQCLPPTCEPRVTEHIEHIIELITKIMENDKAYAMEGDVYFSVESFPEYLSLSGRKFDQNQAGARVAFDTRKRNPADFALWKAAKEGEPFWDSPWGRGRPGWHIECSAMSAHYLGHLFDIHGGGKDLIFPHHENELAQSRAAYPESEVKCWMHNGFVNKDDKKMAKSDNNFFTIRDITALYHPLALRFFLMRTHYRSDVNHSDQALEIASDRVYYIFQTLYDCEEVLATYREEGISLSVPFEEQNLIDKHHSEFLKYMSNDLKTTDVLDRCFMELLKAINSSLNDLKKLQQKIEQQKKKQQQQKKQQQKQQQLQKQPEHYIQALIALEIELKNKLSILGLMPSSSLAEVLKQLKDKALKRAGLTEEKLQEQIEQRNVARKNKQFEISDGIRKNLATKGIALMDEPSGTVWRPCEPEGPHPLNK

SEQ ID NO: 38930 - protein, 501 aa, Zea mays subsp. mays
MYVCGVTPYDFSHIGHARAYVAFDVLYRYLKFLGYEVEYVRNFTDIDDKIIKRANERGETVTSLSSRFINEFLLDMTELQCLPPTCEPRVTEHIEHIIELITKIMENDKAYAMEGDVYFSVESFPEYLSLSGRKFDQNQAGARVAFDTRKRNPADFALWKAAKEGEPFWDSPWGRGRPGWHIECSAMSAHYLGHLFDIHGGGKDLIFPHHENELAQSRAAYPESEVKCWMHNGFVNKDDKKMAKSDNNFFTIRDITALYHPLALRFFLMRTHYRSDVNHSDQALEIASDRVYYIFQTLYDCEEVLATYREEGISLSVPFEEQNLIDKHHSEFLKYMSNDLKTTDVLDRCFMELLKAINSSLNDLKKLQQKIEQQKKKQQQQKKQQQKQQQLQKQPEHYIQALIALEIELKNKLSILGLMPSSSLAEVLKQLKDKALKRAGLTEEKLQEQIEQRNVARKNKQFEISDGIRKNLATKGIALMDEPSGTVWRPCEPEGPHPLNK

SEQ ID NO: 38931 - DNA, 1000 bp, Zea mays subsp. mays
aaggtgaaagtcgatgccagtagtagctacagcagttaatgcgaaaaactgaagcatgccacgcctgaccgacccccttctcgcctaatgtccgtgccccgactgcgtctccgccccgactcacccgcagcctgtctctgctcggcggcggccgtctcgactgcgggagaggggagcgccccttcgccgatctgatcgggagctgcaggccaaacggcgaggcgagcccatcaggaaccaccatggcagcggcagccgccgactccgatcccgccgcagctgtggccgacatgtccacctgcgcccattgtcaacgagagatcccttcttcgaacatcgacttgcattctgtacattgtgcccgtaacctccaaaagtgccagcactgtggagaaatgattcctaggaaacttatggatgaacactatgatgcaaaccatgccccgatcagttgctctctttgcaaagaaacaatagaacgtgtgaggtgggatcttcataaaggcgaaaagtgcccacaaagaatcgtcgcttgtgaatattgcgagtttgaattgcctgcagttgatctccatgagcatcaggatgtatgtggaaaccgaacagaactttgccaaacatgcaggaagtatattagattgtgtgaatggatagggcacgaaatacagtgccatacaagctcaaatggttttgcagacacatccagtgccagagcaattccagagagagagctacgaccgccgccgccggtgcggccggcacgaccagcacgtcctgctcatgtttcaccacacaagcggctcctcttcacaatcgctgtcactggaatagcagttatggttggctccatactgttccaaagggacgagagtttctagctccagtggccatggacttactctgtatgtcatgttgtttcttgaccgggagagtcatgccacaggaggtgtatttatgtataataatcgaatcagtgcataaatcgagtttgtttgagagc

SEQ ID NO: 38932 - protein, 211 aa, Zea mays subsp. mays
MAAAAADSDPAAAVADMSTCAHCQREIPSSNIDLHSVHCARNLQKCQHCGEMIPRKLMDEHYDANHAPISCSLCKETIERVRWDLHKGEKCPQRIVACEYCEFELPAVDLHEHQDVCGNRTELCQTCRKYIRLCEWIGHEIQCHTSSNGFADTSSARAIPERELRPPPPVRPARPARPAHVSPHKRLLFTIAVTGIAVMVGSILFQRDESF

SEQ ID NO: 38933 - protein, 195 aa, Zea mays subsp. mays
MSTCAHCQREIPSSNIDLHSVHCARNLQKCQHCGEMIPRKLMDEHYDANHAPISCSLCKETIERVRWDLHKGEKCPQRIVACEYCEFELPAVDLHEHQDVCGNRTELCQTCRKYIRLCEWIGHEIQCHTSSNGFADTSSARAIPERELRPPPPVRPARPARPAHVSPHKRLLFTIAVTGIAVMVGSILFQRDESF

SEQ ID NO: 38934 - protein, 160 aa, Zea mays subsp. mays
MIPRKLMDEHYDANHAPISCSLCKETIERVRWDLHKGEKCPQRIVACEYCEFELPAVDLHEHQDVCGNRTELCQTCRKYIRLCEWIGHEIQCHTSSNGFADTSSARAIPERELRPPPPVRPARPARPAHVSPHKRLLFTIAVTGIAVMVGSILFQRDESF

SEQ ID NO: 38935 - DNA, 1378 bp, Zea mays subsp. mays
ctctttctcttccaaggagaacaaccaccgtctctctctcccccgtctatctcttcttggagcctggagaagaggaaggatcagggaacgggggaagaggttgctgccacagctcaggtctcaagtttggattcagacaagtagacaaacaccagttggttaagatggcagctggtttccagatcggtgtgatcgggtcacttgcactctctgttgcatcttcagtttccattgtcctctgcaacaaagctctcatcagcacacttggttttccattcgctacaacattaacaagctggcatctgatggtgaccttctgcaccctccatgtggcacagcgcttacgtttcttcgagcccaaggcaattgatggacagacagtcatactctttgggttgctgaatggcacgtcaattggtcttctcaatctgagtttaggattcaactccattggattctaccagatgacaaaattggcgatcatacctttcactgtgctattggagactatcttcttgaagaaaagattcagcgagagtatcaagctttctcttctggtcttacttcttggagtaggaattgcttcagttactgatctcaagctaaatctgcttgggtccatcctttctggcctcgccattgccaccacctgtgttggccaaattctcacaaatacaatacagaagaggttgaaggtctcctcaacgcaacttctgtaccaatctgcgccttaccaggcggcaattctgtttgcatctgggccttttgtagatcaactccttactaaccggagtgtctttgcacacaaatactctgctacagttctgggtttcgttgtcctctcttgcttgattgcggtgtctgtgaacttcagtacatttcttgtgattggaacaacatccccagtgacgtaccaggtgcttggtcaccttaagacatgtctggttctatcatttggctacactctattacatgatcctttcactctaaggaacatattgggcattctaattgccatatttgggatggcactatactcctatttctctgtaagagagggcaagaagaagtcagcaaatgatgccctgccagtttcacagatgccagataaggaggttgaaccgcttttggcaactaaagacagcaatgacaccaagaaagcaaatggtttatctcacgactgctagggcttttcttgtagtttaggtctagtatgaactgcccttagaatttaatggacttggaaagccattcttttcattcttgatttcctttttaggaaaggaagattttaaaatttgtagataatgtgtattttgacgttaaagttattgtttgattgtattctacacacagcagttccatctgaagttttact

SEQ ID NO: 38936 - protein, 394 aa, Zea mays subsp. mays
LSLPRRTTTVSLSPVYLFLEPGEEEGSGNGGRGCCHSSGLKFGFRQVDKHQLVKMAAGFQIGVIGSLALSVASSVSIVLCNKALISTLGFPFATTLTSWHLMVTFCTLHVAQRLRFFEPKAIDGQTVILFGLLNGTSIGLLNLSLGFNSIGFYQMTKLAIIPFTVLLETIFLKKRFSESIKLSLLVLLLGVGIASVTDLKLNLLGSILSGLAIATTCVGQILTNTIQKRLKVSSTQLLYQSAPYQAAILFASGPFVDQLLTNRSVFAHKYSATVLGFVVLSCLIAVSVNFSTFLVIGTTSPVTYQVLGHLKTCLVLSFGYTLLHDPFTLRNILGILIAIFGMALYSYFSVREGKKKSANDALPVSQMPDKEVEPLLATKDSNDTKKANGLSHDC

SEQ ID NO: 38937 - protein, 340 aa, Zea mays subsp. mays
MAAGFQIGVIGSLALSVASSVSIVLCNKALISTLGFPFATTLTSWHLMVTFCTLHVAQRLRFFEPKAIDGQTVILFGLLNGTSIGLLNLSLGFNSIGFYQMTKLAIIPFTVLLETIFLKKRFSESIKLSLLVLLLGVGIASVTDLKLNLLGSILSGLAIATTCVGQILTNTIQKRLKVSSTQLLYQSAPYQAAILFASGPFVDQLLTNRSVFAHKYSATVLGFVVLSCLIAVSVNFSTFLVIGTTSPVTYQVLGHLKTCLVLSFGYTLLHDPFTLRNILGILIAIFGMALYSYFSVREGKKKSANDALPVSQMPDKEVEPLLATKDSNDTKKANGLSHDC

SEQ ID NO: 38938 - protein, 293 aa, Zea mays subsp. mays
MVTFCTLHVAQRLRFFEPKAIDGQTVILFGLLNGTSIGLLNLSLGFNSIGFYQMTKLAIIPFTVLLETIFLKKRFSESIKLSLLVLLLGVGIASVTDLKLNLLGSILSGLAIATTCVGQILTNTIQKRLKVSSTQLLYQSAPYQAAILFASGPFVDQLLTNRSVFAHKYSATVLGFVVLSCLIAVSVNFSTFLVIGTTSPVTYQVLGHLKTCLVLSFGYTLLHDPFTLRNILGILIAIFGMALYSYFSVREGKKKSANDALPVSQMPDKEVEPLLATKDSNDTKKANGLSHDC

SEQ ID NO: 38939 - DNA, 1560 bp, Zea mays subsp. mays
gatacaaatgaaacggatctgtgaccgcctacgacagtgtagtatatatatacactacacagtgtagctagtatacctcgcccactctaaagcgaagcagcaagcgctctgtgaccgactgtgatcacacaccacgcgtccatggtcgtcatgggcaagcacgatgacgatgagaagcagcagcaccagcagatggagatggaggacgtacatgaagtaggagccgtcgaggtgctgccgctggagaatgaggcggaggcggcgctggtgcgcaagatctccggcctggccgccgccatcgcgaagctgccgtcgctgagcccgtcgccggaggtgaacgcgctgttcacggacctggtcacggcctgcatcccgcgcagcaccgtggacgtggagcgcctgggcccggagctgcagcgcatgcgcgcggggctcatccgccgctgcgccgacgccgaggcccagctggaggcgcactactcggacctgctggcggccttggaggacaacccgctggaccacctgccgctcttcccctacttgggcaactacctgctgctgggcgagctggagcacggcctgctggcgcgccacgtcccgggcccgccgcccgcccgcgtcgccttcgtggggtccggcccgctcccgctcagctccctcgtgctcgccgcgcgccacctccccgccgccgccttcgacaactacgacatctgcgcggaggccaacggccgggcgcgccgcctcgtgcgcgccgacgccgcgctcgccgcgcgcatggcgttccgcacctccgacgtggcccacgtcacgcgggacctggccgcctacgacgtcgtcttcctggcggcgctcgtgggcatggcggccgaggagaaggcgcgcgtggtggaccacctcgggaggcacatggcgcctggcgccgccctggtggtgcgcagcgcgcacggcgcgcgcgccttcctgtaccccgtcgtcgaccccgacgagatccgccgcgccggcttcgacgtgctcgccgtgcaccacccggagggggaggtgatcaactccgtcatcgtcgcgcgtaagcccgtgcccgtccccgtcgccggagtggggcacgcgcacgcgcacgcccacgggcacggcgccgtgctcagccggccctgctgcctctgctgcgagatggaggcccggacgcaccagaagatggaggaggtggccatggagcagctgccgtcctaggcaggcaggcacacggcacacaccacaagcatggatgccagttttacatctatctgatcgatctagtaaatagtaatcccctactacgtctatgtgcccacaccgcatggatatggtaataatccgcacagggtgcgcctaatttatatccgctagctaagggcatgtacagtagagagacaccaaaacggttctccaagcacaggagacaactaagagactttattgtacaatgaagtgtctataaacgtagtctattaataaatacagaattaaatgtatttgttaaaaaaaaaaaaaaaaaaaaaaaaaaaaaaaaaaaaaaaaaaaaaaaag

SEQ ID NO: 38940 - protein, 360 aa, Zea mays subsp. mays
MVVMGKHDDDEKQQHQQMEMEDVHEVGAVEVLPLENEAEAALVRKISGLAAAIAKLPSLSPSPEVNALFTDLVTACIPRSTVDVERLGPELQRMRAGLIRRCADAEAQLEAHYSDLLAALEDNPLDHLPLFPYLGNYLLLGELEHGLLARHVPGPPPARVAFVGSGPLPLSSLVLAARHLPAAAFDNYDICAEANGRARRLVRADAALAARMAFRTSDVAHVTRDLAAYDVVFLAALVGMAAEEKARVVDHLGRHMAPGAALVVRSAHGARAFLYPVVDPDEIRRAGFDVLAVHHPEGEVINSVIVARKPVPVPVAGVGHAHAHAHGHGAVLSRPCCLCCEMEARTHQKMEEVAMEQLPS

SEQ ID NO: 38941 - protein, 357 aa, Zea mays subsp. mays
MGKHDDDEKQQHQQMEMEDVHEVGAVEVLPLENEAEAALVRKISGLAAAIAKLPSLSPSPEVNALFTDLVTACIPRSTVDVERLGPELQRMRAGLIRRCADAEAQLEAHYSDLLAALEDNPLDHLPLFPYLGNYLLLGELEHGLLARHVPGPPPARVAFVGSGPLPLSSLVLAARHLPAAAFDNYDICAEANGRARRLVRADAALAARMAFRTSDVAHVTRDLAAYDVVFLAALVGMAAEEKARVVDHLGRHMAPGAALVVRSAHGARAFLYPVVDPDEIRRAGFDVLAVHHPEGEVINSVIVARKPVPVPVAGVGHAHAHAHGHGAVLSRPCCLCCEMEARTHQKMEEVAMEQLPS

SEQ ID NO: 38942 - protein, 343 aa, Zea mays subsp. mays
MEMEDVHEVGAVEVLPLENEAEAALVRKISGLAAAIAKLPSLSPSPEVNALFTDLVTACIPRSTVDVERLGPELQRMRAGLIRRCADAEAQLEAHYSDLLAALEDNPLDHLPLFPYLGNYLLLGELEHGLLARHVPGPPPARVAFVGSGPLPLSSLVLAARHLPAAAFDNYDICAEANGRARRLVRADAALAARMAFRTSDVAHVTRDLAAYDVVFLAALVGMAAEEKARVVDHLGRHMAPGAALVVRSAHGARAFLYPVVDPDEIRRAGFDVLAVHHPEGEVINSVIVARKPVPVPVAGVGHAHAHAHGHGAVLSRPCCLCCEMEARTHQKMEEVAMEQLPS

SEQ ID NO: 38943 - DNA, 901 bp, Zea mays subsp. mays
atcgcccgtgccctgcggtgttctactcactcccagctgcgacaatccccctcatcgcccgccccccctggtctcgtctctccttcgcgcatctcaccgccatctcactcccgaaccccccttcctttgcttcccgcgtctaatttagcgccagaacatttgaattccccgcaacttccgcttccagcggcttctcgaaccttccggaggcgccgccgatcgaccccggctccatccccttgcccccctagggtttcgcgttcccctcggggatgggggacgccgccaccgccgcagcggcggcggcagcgtcgcccgcttgcgccgcgcggaagcggcggcgcggcgacgacagcgcggggctgaggcgggtggcggagatcgtgatggtcctggccgcggccggggaggtacgcggcgggaggcagcccacggccgcggagcgcgcgctggcggccgaggcgcgggagactctcgccaccgccgtcgccgagagggccgtgcggcccgaggatctgttcccgggggaagcggtgcgcgcggtcgtcgaggatctcgggctcaaccgctccaaggacccagctgccatggggtttcgcccgcccaaggcctccatcgccgataggctcatgcttactaagcgcaaggttttgccaactctctcgtttgcacccattcccgcacagtttactagccattgtggtggctttgaaattcttaactggggtgataaatgtgatgtgagaacgcttgtgtgactattggactgtattagtttgtatggtatgacactgctgtttgcatggcacaaggtattgcttctgaatgatacattagcgaataatgattcccagggattcttgtatcacactgcttgtatatggatatgctctgttcttcc

SEQ ID NO: 38944 - protein, 161 aa, Zea mays subsp. mays
MGDAATAAAAAAASPACAARKRRRGDDSAGLRRVAEIVMVLAAAGEVRGGRQPTAAERALAAEARETLATAVAERAVRPEDLFPGEAVRAVVEDLGLNRSKDPAAMGFRPPKASIADRLMLTKRKVLPTLSFAPIPAQFTSHCGGFEILNWGDKCDVRTLV

SEQ ID NO: 38945 - protein, 123 aa, Zea mays subsp. mays
MVLAAAGEVRGGRQPTAAERALAAEARETLATAVAERAVRPEDLFPGEAVRAVVEDLGLNRSKDPAAMGFRPPKASIADRLMLTKRKVLPTLSFAPIPAQFTSHCGGFEILNWGDKCDVRTLV

SEQ ID NO: 38946 - protein, 121 aa, Zea mays subsp. mays
IARALRCSTHSQLRQSPSSPAPPGLVSPSRISPPSHSRTPLPLLPASNLAPEHLNSPQLPLPAASRTFRRRRRSTPAPSPCPPRVSRSPRGWGTPPPPQRRRQRRPLAPRGSGGAATTARG

SEQ ID NO: 38947 - DNA, 1017 bp, Zea mays subsp. mays
tggaggttctcttagtaaaggtggagatataacccagcccaggtttattcacaatgaatccggtcgtttcgagtgccggtttactagtgtgtccattggggtttctcctgctatcatgttcaaagggatggaaggttctaccttgggtgtttggagtgctcatggcgagggaagagctttcttcccagatgaaaatgttctagctactgtagtgaagtctaatctggcacctgtgcgatattgcgatgattttaacaacataaccgagacctaccccttcaatcctaatggttctccactaggtattggagccctttgctcccctgatgggagacaccttgctatgatgccacatccggagcgttgcttcatgatgtggcaattcccatggtatcccaaggaatggcaggttgagaagagtggccccagcccttggctgcgtatgttccagaatgcaagggaatggtgttcatagtgcagggcagtgcccggctgtagcgatgcggatggttgttttcatctgatgaccccttccttttgcggaataaagaggtgttcgacccgcagcgcgttatccaagctgataacaaacgtgtcaaatttgaagttttatacatagaaaactgccaggtttttgcgtagcctatgccaaagatgcgtaaactgtcagccccatcagggcttgtttgggtaatcttagattggagtgaattgaggtggtataaggtatattgaagtgtaatataaactaatttccctttaaatccctaaaatacatctcaatccacttcaatccctctttatccaaacaaagcctcagcgaatttcccaatcaacgtagagaatgcttgctgcgttactcaaatctgatgcttatgcaatggtcgtttttgtgctgtctgtctgatgatgagtaagtatgagttcattcgcaaccagacaagtcattagtatgaattcagtcgcaaccagacaagtcattgtaatagcttgagataattcatctggtgatgtggc

SEQ ID NO: 38948 - protein, 157 aa, Zea mays subsp. mays
GGSLSKGGDITQPRFIHNESGRFECRFTSVSIGVSPAIMFKGMEGSTLGVWSAHGEGRAFFPDENVLATVVKSNLAPVRYCDDFNNITETYPFNPNGSPLGIGALCSPDGRHLAMMPHPERCFMMWQFPWYPKEWQVEKSGPSPWLRMFQNAREWCS

SEQ ID NO: 38949 - protein, 119 aa, Zea mays subsp. mays
MFKGMEGSTLGVWSAHGEGRAFFPDENVLATVVKSNLAPVRYCDDFNNITETYPFNPNGSPLGIGALCSPDGRHLAMMPHPERCFMMWQFPWYPKEWQVEKSGPSPWLRMFQNAREWCS

SEQ ID NO: 38950 - protein, 115 aa, Zea mays subsp. mays
MEGSTLGVWSAHGEGRAFFPDENVLATVVKSNLAPVRYCDDFNNITETYPFNPNGSPLGIGALCSPDGRHLAMMPHPERCFMMWQFPWYPKEWQVEKSGPSPWLRMFQNAREWCS

SEQ ID NO: 38951 - DNA, 777 bp, Zea mays subsp. mays
catcaacttcgtctcagcatgcattacagggagcgctccgctcacagcggtgcaactgttgtgggtgaatatgattatggatacattaggggctctagctctagcaacggagcctccaaacgatgacatgatgaagagaccacctgtcgggcgaggggaaagcttcatcaccaaggtcatgtggagaaatatcattgggcaaagtttgtatcagttggttgtgctcggagccctcatgtttggcggggaacagtttctgaacatcaagggcgcggattccaaatctgttgtcaacactctcatattcaactccttcgtgttctgccaggtgttcaacgaaataaacagcagagaaatggagaagatcaacgtgttccgcggcatggtcaccaactggatcttcatcgcgatcatagccgcgacggtcctgttccaagtggtgatcgtagagctgctaggcacctttgccagcaccgtcccactcgactggcggctttggctgctcagcgtcggcctcgggtcggtcagcttggtcgtcggtgccgtcctcaagtgcgtaccagttgccaaatccaacgcagctcctgcgagtgccaacggctacgccccgctccccagcggtcctgacgacatttagctgaagaagaggggatgcatggagaaaagaagttgcatccgatttttgcgtcttgtttgtaataagtaatgaaccacggtctaggctcagctttagcagattgttctatatatatatatatatatatagccttgtcctgc

SEQ ID NO: 38952 - protein, 211 aa, Zea mays subsp. mays
INFVSACITGSAPLTAVQLLWVNMIMDTLGALALATEPPNDDMMKRPPVGRGESFITKVMWRNIIGQSLYQLVVLGALMFGGEQFLNIKGADSKSVVNTLIFNSFVFCQVFNEINSREMEKINVFRGMVTNWIFIAIIAATVLFQVVIVELLGTFASTVPLDWRLWLLSVGLGSVSLVVGAVLKCVPVAKSNAAPASANGYAPLPSGPDDI

SEQ ID NO: 38953 - protein, 188 aa, Zea mays subsp. mays
MIMDTLGALALATEPPNDDMMKRPPVGRGESFITKVMWRNIIGQSLYQLVVLGALMFGGEQFLNIKGADSKSVVNTLIFNSFVFCQVFNEINSREMEKINVFRGMVTNWIFIAIIAATVLFQVVIVELLGTFASTVPLDWRLWLLSVGLGSVSLVVGAVLKCVPVAKSNAAPASANGYAPLPSGPDDI

SEQ ID NO: 38954 - protein, 186 aa, Zea mays subsp. mays
MDTLGALALATEPPNDDMMKRPPVGRGESFITKVMWRNIIGQSLYQLVVLGALMFGGEQFLNIKGADSKSVVNTLIFNSFVFCQVFNEINSREMEKINVFRGMVTNWIFIAIIAATVLFQVVIVELLGTFASTVPLDWRLWLLSVGLGSVSLVVGAVLKCVPVAKSNAAPASANGYAPLPSGPDDI

SEQ ID NO: 38955 - DNA, 546 bp, Zea mays subsp. mays
aaaaccaaaccgcctccagctccagcctcctgtcctgctcccttcctcccctgcctgcctgccgcgcaccactccactcgagtgactcgagtcgtcctcctcccaccacctcccgtccgttgcgttgctcctgcccgcgcctcctccatccaccacaccagtccgtcgttaaagctgcggcatcggcagcacacgccgacgggtacaaggagcactcattgcctccccatctcgtgtaggctctccccctcctccgcgctccgtccgtctctcatcaccgttccgccgccgccccacctctccctcctctcgccgccgcctccgaacccgccacggcgcggcggagatccaaccggacggatctggatcgacctactccgacaccgggccccccgatcacgagcatggagtcggccgcggcggcggcggaggaggaggtgtgcgcgtggtgggtggtacgtgcttcgacgcgccactgtttgtcgcggcgatcatgtactaccctgctgcgttttctggttatcaatgagatgatttatttgattc

SEQ ID NO: 38956 - protein, 177 aa, Zea mays subsp. mays
KTKPPPAPASCPAPFLPCLPAAHHSTRVTRVVLLPPPPVRCVAPARASSIHHTSPSLKLRHRQHTPTGTRSTHCLPISCRLSPSSALRPSLITVPPPPHLSLLSPPPPNPPRRGGDPTGRIWIDLLRHRAPRSRAWSRPRRRRRRRCARGGWYVLRRATVCRGDHVLPCCVFWLSMR

SEQ ID NO: 38957 - DNA, 1017 bp, Zea mays subsp. mays
accccttcacttgcttggtcttccactcacccctctctcgttattcacccggtctcctctcctgcaaagaggaagatgagctcgctacacgccacacgagcggagcttggcctggttgtcctgtacctgaacaaagccgaggcccgggacaagatctgcagggcgatccagtacggctccaagttcgtaagcaacgggcagcctggcactgcgcaggaggtcgacagatcgaccaccttggctcgcaaagtcttccggctcctcaagtgggtcaatgatctgcatgctcttatcagcccgccggccaaagggactccgctcaccctcgttctgcttggcaaatccaaaaacgcgctgctttcgacgttcttgttcttggatcagtttgtgtggctcggacgaacggggatcgtcaagaacaaggaggcgacggaccgcgttgccaggttatccctgtactgctggatggcttcttctgcctgtgcaggtctagttgagcttggagagcttaaaaggctatcgagatcgatgaggaagcttgcaagagagctgagggacacagataaatatgagaacgagcagtaccaggacaaaatgaggcagtcagatgaacggctcctggccctggtcaaggcggccatggacgtggtcgtggccgtcgggcttcttcagctggcgcccaagaaggtcactccgagagtgacaggagcctttgggttcgtcacctcgcttatctcctgctatcagcaacttccttcccgcgctcctgttgccaaagtcaaagtttgagaggtgtcgccgtcctagtaaaaaaaaaagaggcgacgctggaaatcgatctctgcttcaacaatggatcgtaatataattttattatgcgaatataaggcaggctagctatgtattttttttattaaaaaaatagtacaacaaaatagaacaccagtgattgcacgtatgggcttatcactatcttctctttttgcctagcaatggacaagtaatgttcacgtgatc

SEQ ID NO: 38958 - protein, 262 aa, Zea mays subsp. mays
TPSLAWSSTHPSLVIHPVSSPAKRKMSSLHATRAELGLVVLYLNKAEARDKICRAIQYGSKFVSNGQPGTAQEVDRSTTLARKVFRLLKWVNDLHALISPPAKGTPLTLVLLGKSKNALLSTFLFLDQFVWLGRTGIVKNKEATDRVARLSLYCWMASSACAGLVELGELKRLSRSMRKLARELRDTDKYENEQYQDKMRQSDERLLALVKAAMDVVVAVGLLQLAPKKVTPRVTGAFGFVTSLISCYQQLPSRAPVAKVKV

SEQ ID NO: 38959 - protein, 237 aa, Zea mays subsp. mays
MSSLHATRAELGLVVLYLNKAEARDKICRAIQYGSKFVSNGQPGTAQEVDRSTTLARKVFRLLKWVNDLHALISPPAKGTPLTLVLLGKSKNALLSTFLFLDQFVWLGRTGIVKNKEATDRVARLSLYCWMASSACAGLVELGELKRLSRSMRKLARELRDTDKYENEQYQDKMRQSDERLLALVKAAMDVVVAVGLLQLAPKKVTPRVTGAFGFVTSLISCYQQLPSRAPVAKVKV

SEQ ID NO: 38960 - DNA, 918 bp, Zea mays subsp. mays
tcaatgtctcaagaggaggctttgaggcatttgggacatgccaagacacatttcgaagaagccttatctgtacgagatagaacaatcgaggctactaagttggtattgcggtctgctcggaataagggtgcacctggaaaaatgaccagggaaacgataatgaaatattccactcgtgtttcctatcagatggatgtggtgaaggccctcaatagtatagatggctctcagtggaaaacttccctttttgggaatccaacagaccctgaaactctgaggcgaaggtgcatggttgttgaaactctggctgaaaagcattttgatttagctttcagaatgcttcatgagtttgatctcccagctgttgatatttatgctggggtagctgcatccctcgcagaaaggaaaaaagggggccagttgacagagttcttgaagaatataagggggactatagatgatgatgaatgggatcaggttattggtgctgctataaatgtttatgccaacaagcataaagaaagaccagatcgccttatcgacatgctaatcagcaatcacaggaaagtacttgcttgtgttgtctgtggacgtctaaaaagtgcattccaaatagccgcacgaagtggaagtgtcgctgatgttcaatatgttgctcatcaggcattacatgcaaatgcattgacagtgcttgatatgtgtaagcaatggctcgcgcagtacatgtgataccatagatacttgctgagagagttctcacgtgaagacagaaaaactaaggggcatttggtttgaagagtcaacctattttagatgatgttgtgtatcataagtttattttataaatttggtggaataaattcgttctccatattattactaattatgagcttatgatgaatgaaatgctaatggatc

SEQ ID NO: 38961 - protein, 242 aa, Zea mays subsp. mays
SMSQEEALRHLGHAKTHFEEALSVRDRTIEATKLVLRSARNKGAPGKMTRETIMKYSTRVSYQMDVVKALNSIDGSQWKTSLFGNPTDPETLRRRCMVVETLAEKHFDLAFRMLHEFDLPAVDIYAGVAASLAERKKGGQLTEFLKNIRGTIDDDEWDQVIGAAINVYANKHKERPDRLIDMLISNHRKVLACVVCGRLKSAFQIAARSGSVADVQYVAHQALHANALTVLDMCKQWLAQYM

SEQ ID NO: 38962 - protein, 241 aa, Zea mays subsp. mays
MSQEEALRHLGHAKTHFEEALSVRDRTIEATKLVLRSARNKGAPGKMTRETIMKYSTRVSYQMDVVKALNSIDGSQWKTSLFGNPTDPETLRRRCMVVETLAEKHFDLAFRMLHEFDLPAVDIYAGVAASLAERKKGGQLTEFLKNIRGTIDDDEWDQVIGAAINVYANKHKERPDRLIDMLISNHRKVLACVVCGRLKSAFQIAARSGSVADVQYVAHQALHANALTVLDMCKQWLAQYM

SEQ ID NO: 38963 - protein, 195 aa, Zea mays subsp. mays
MTRETIMKYSTRVSYQMDVVKALNSIDGSQWKTSLFGNPTDPETLRRRCMVVETLAEKHFDLAFRMLHEFDLPAVDIYAGVAASLAERKKGGQLTEFLKNIRGTIDDDEWDQVIGAAINVYANKHKERPDRLIDMLISNHRKVLACVVCGRLKSAFQIAARSGSVADVQYVAHQALHANALTVLDMCKQWLAQYM

SEQ ID NO: 38964 - DNA, 915 bp, Zea mays subsp. mays
gtgatgaaggctgtacatctgctacttctgcccgttcgctcagcgcgcctgggtcaccaggaacttgaagggtttgcaggacaagatggagctggtggccatcgatctgcaggacaaaccggcttggtacaaggacaaggtttacgcacagggcacggtgccttccctggagcacgacagcgaggtcaggggcgagagcttggacctgatcaggtacatcgacagcaactttgacggccccgcgctgctcccagaggatgctgcgaagaggcagtttgctgacgaactgttcgcgtctgccaacgcgttcaccaaagccctctactcgccgttgctgtcccacgcggccgtgtcagacgaagttgttgcggctctggataaactcgaagctgacctatccaagttcgacgacgggcccttcttcctaggccaattcagcttggtacctcgctgcattcttcccggcctgaaacgtggtttgatcgcccaagatattttttttactctttctaataacaatatgctcgaccccccttttcaggcggatgtagcgtacgttacgattctggaaagggttcagatatactattcccatcttaggaactacgacatcgcccaaggcaggtccaacctacaggaattcatcgacgagatgaacaagatcgaagcgtatgcgcagaccaagaacgatcctctgttcttgcttgatcttgccaagaaccatcttaagattgcctgaagatgtgacaaagcagccttagtccgttgatcggtggaagaccactcgtcagtgttgagttgagtgtttgatcaataaaatacggcatgctgtaagggttgttttacgctattgataatacactgtactgttcagctgttgaactctatttcttagccatgccaagtgcttttctc

SEQ ID NO: 38965 - protein, 217 aa, Zea mays subsp. mays
MELVAIDLQDKPAWYKDKVYAQGTVPSLEHDSEVRGESLDLIRYIDSNFDGPALLPEDAAKRQFADELFASANAFTKALYSPLLSHAAVSDEVVAALDKLEADLSKFDDGPFFLGQFSLVPRCILPGLKRGLIAQDIFFTLSNNNMLDPPFQADVAYVTILERVQIYYSHLRNYDIAQGRSNLQEFIDEMNKIEAYAQTKNDPLFLLDLAKNHLKIA

SEQ ID NO: 38966 - DNA, 977 bp, Zea mays subsp. mays
aatcaacaacaatatccagaccttctctgagaatcaaatcaaacaggaagctcacagaagtccaaaattacagttataattcatctgtcacccttgaccccagtctgatccagccatgtttagaaacaattacgataacgattcggtgactttctcaccgcaaggccgtatcttccaggtggaatatgctcaagaagctgtcaaacagggttccgttgtggtcggattagttagcaagacacatgctgttctcgtggggttgaagcgaaacgcagaagaactctcgtcgtaccagaaaaaagtcatcgaaatcgactcacacatgggcatcgccattgccggcctctcctccgacgcccgggtcctttccaacttcatgaaacagcaatctctcggctcacgaatgacatacggccgcgccatccccctagaccggatcgtcacccaaatcggtgatcgcgcacaaaccaacacacaacattacggcaaacgaccatacggtgttggcctcttagttgcgggtgtcgatgaggcaggcccgcatttattcgagtttcaaccttccggtatgacgcaggagatgcttgcatgcgcgattggggctcggtcacagatggcgaggacttatctggaaagaaatctggccgagtttgcggattgttcgcgcgaggagttgattaaccatggcctgaaggccttgagggagactctttcgcaggataaggagcttaggattgataataccacggttggagttgtgggacttgtccccaaggattcggcgacaccttcctccaagggtactaagctagagaactttaagctatatgatggacaggacgttggtgcgctattggaggcgttggatggcgcagctaccgagggtggtgaaatggaggttgatacacagtgatggattagcgttctatctcttcaatagatcaatttctcattatgaatggataatcatactcgtt

SEQ ID NO: 38967 - protein, 265 aa, Zea mays subsp. mays
MFRNNYDNDSVTFSPQGRIFQVEYAQEAVKQGSVVVGLVSKTHAVLVGLKRNAEELSSYQKKVIEIDSHMGIAIAGLSSDARVLSNFMKQQSLGSRMTYGRAIPLDRIVTQIGDRAQTNTQHYGKRPYGVGLLVAGVDEAGPHLFEFQPSGMTQEMLACAIGARSQMARTYLERNLAEFADCSREELINHGLKALRETLSQDKELRIDNTTVGVVGLVPKDSATPSSKGTKLENFKLYDGQDVGALLEALDGAATEGGEMEVDTQ

SEQ ID NO: 38968 - protein, 196 aa, Zea mays subsp. mays
MGIAIAGLSSDARVLSNFMKQQSLGSRMTYGRAIPLDRIVTQIGDRAQTNTQHYGKRPYGVGLLVAGVDEAGPHLFEFQPSGMTQEMLACAIGARSQMARTYLERNLAEFADCSREELINHGLKALRETLSQDKELRIDNTTVGVVGLVPKDSATPSSKGTKLENFKLYDGQDVGALLEALDGAATEGGEMEVDTQ

SEQ ID NO: 38969 - protein, 178 aa, Zea mays subsp. mays
MKQQSLGSRMTYGRAIPLDRIVTQIGDRAQTNTQHYGKRPYGVGLLVAGVDEAGPHLFEFQPSGMTQEMLACAIGARSQMARTYLERNLAEFADCSREELINHGLKALRETLSQDKELRIDNTTVGVVGLVPKDSATPSSKGTKLENFKLYDGQDVGALLEALDGAATEGGEMEVDTQ

SEQ ID NO: 38970 - DNA, 1064 bp, Zea mays subsp. mays
gaaactcccatggcagtgaaatgggaggataggagcattgaggttcgagaaggatcatggtcatacattgctagtacaagctctgttggttatgctcctgatagtgggcacaggaacagtgatgaaagatcaactggagaataaggtagtttggagcttatcaacaggagatacgctgacaataagtttgggagatgaactcagctttcagttaaaaaatgacagctcagaagaagaggcaaggctgcttgtcgggaggaggttgagctacagagtaaacacagataatgcatcgagcaacctagtcgaggaggagcaatacctcacacttgttcgtaagtcaccgtatcatcatggtgacagagcaacagtgcttctaaactggaaattacttgctgtggagttcttacctgaagaggatgcagtttttgttcttctcctatgcatggtgattgcacggaccatgacagagatcaggagagaagatgtggctgggcttttagtgcggcggaggataagtgaagcaagagccgggcagagagactggggttcggtgatgcttcctggctcgctttcaccggatcctcatctgcagccttggtaccggaacgcaacgcaggttttgagctctgcggagacaggaccaatgctcacaaagtactcacctgctgacgggaaggacatgttgtacaggcaagctcttataccctgatgaagccctgatagagattattaccataccatcaggacttgcctgatagataaaaaaaacgaacccaatcttcctgggtatcgcagggaaattatttcatttcctcaatgctatgacatacgacatttgtacaggacaattttttgtggttcgagctgttgtttcactaatgatgattgtcctttcatacgaatccagtgattgctgtcatatattgtttgtactgagaattttacacatttcatttcaagtttgtctggtttctgtagtttgacaatgaactaaaagaagagcttatgtccatttgaacaaactgattatagaggataaacgattcagaatctgaaaaaag

SEQ ID NO: 38971 - protein, 206 aa, Zea mays subsp. mays
MLLIVGTGTVMKDQLENKVVWSLSTGDTLTISLGDELSFQLKNDSSEEEARLLVGRRLSYRVNTDNASSNLVEEEQYLTLVRKSPYHHGDRATVLLNWKLLAVEFLPEEDAVFVLLLCMVIARTMTEIRREDVAGLLVRRRISEARAGQRDWGSVMLPGSLSPDPHLQPWYRNATQVLSSAETGPMLTKYSPADGKDMLYRQALIP

SEQ ID NO: 38972 - protein, 196 aa, Zea mays subsp. mays
MKDQLENKVVWSLSTGDTLTISLGDELSFQLKNDSSEEEARLLVGRRLSYRVNTDNASSNLVEEEQYLTLVRKSPYHHGDRATVLLNWKLLAVEFLPEEDAVFVLLLCMVIARTMTEIRREDVAGLLVRRRISEARAGQRDWGSVMLPGSLSPDPHLQPWYRNATQVLSSAETGPMLTKYSPADGKDMLYRQALIP

SEQ ID NO: 38973 - DNA, 947 bp, Zea mays subsp. mays
atcacccctcgttgtcatctcatatcctgagccagagatcaaagaaaccagagggagcgaggcatggcagcaggcttgcaggtgtttggccagccggcgtctactgatgtctccagggttctgacatgcctgtttgagaagaaactggagttcgatcttgtccgcatcgatacgttcaagacgcatcacaagcttcccgagttcatcaggcttcgggatcctaatgggcaagtgaccttgaagcacggcgacaaaactctcgttgattcgagggacatctgccggtacgtctgcacccagtttccaaacgatggaaacaagagcctttacggatccggcgctctagaacgggcgtcgatagaacagtggcttcaggcggaggctcagaacttcgggccccccagctccgcgctcgtcttccagctggcgttcgtccctcacctcactcacctgggcgttcgtcaggaccctgccgtgatcgccgagaacgaggataagctgaagcaggtccttgatgtctacgacgagatactctcgaggaacgagtacctggctggcgacgagttcaccctggccgacctctcccacctcccgaactcgcactacatcgtgaacaccgagagaggaaggaagctcttcactaacaagaagaacgtggccaagtggtacgagaagctctcgaagcgcgagacgtggaagcaggtcgctaagatgcagaaggaacatcctggtgcgttcgagtgattgcttgtcttggggggagctgcgagtgcaccatcatgaatggcttcatcgtctgtgtcggtctggctctacagttcattttgttttgagtgatccattgtttaattcctcctatcagtgttgtcgtgtgcaccaaaaataatgtgaagcccagctgtgatgtatatgatccttttgctctaatctatcatgacgtataagct

SEQ ID NO: 38974 - protein, 226 aa, Zea mays subsp. mays
MAAGLQVFGQPASTDVSRVLTCLFEKKLEFDLVRIDTFKTHHKLPEFIRLRDPNGQVTLKHGDKTLVDSRDICRYVCTQFPNDGNKSLYGSGALERASIEQWLQAEAQNFGPPSSALVFQLAFVPHLTHLGVRQDPAVIAENEDKLKQVLDVYDEILSRNEYLAGDEFTLADLSHLPNSHYIVNTERGRKLFTNKKNVAKWYEKLSKRETWKQVAKMQKEHPGAFE

SEQ ID NO: 38975 - DNA, 364 bp, Zea mays subsp. mays
atcaccaatcagtcagtcacagctcacagcaaacaccgcgaagccgcccccgctcccaaacccgaccgagcaaagcgcaaagccccccaaccgcggatcaatccgcagcatcgatggcgcccaaggcggagaaaaagccggcggcgaagaagcccgcggaggaggagcccgcgaccgagaaggcggagaaggctccggcaggggcggcttcgcggtgtttgctgtgagcagtgagggacaattagttgttatcgtttgagttggaattattgtttggtttgcaattttctcaaggtgaactttgtaatcggttaggatgtgttgtggaccattatcttatcctacaatattatcgtatctgttt

SEQ ID NO: 38976 - protein, 85 aa, Zea mays subsp. mays
SPISQSQLTANTAKPPPLPNPTEQSAKPPNRGSIRSIDGAQGGEKAGGEEARGGGARDREGGEGSGRGGFAVFAVSSEGQLVVIV

SEQ ID NO: 38977 - protein, 77 aa, Zea mays subsp. mays
ITNQSVTAHSKHREAAPAPKPDRAKRKAPQPRINPQHRWRPRRRKSRRRRSPRRRSPRPRRRRRLRQGRLRGVCCEQ

SEQ ID NO: 38978 - protein, 74 aa, Zea mays subsp. mays
HQSVSHSSQQTPRSRPRSQTRPSKAQSPPTADQSAASMAPKAEKKPAAKKPAEEEPATEKAEKAPAGAASRCLL

SEQ ID NO: 38979 - DNA, 936 bp, Zea mays subsp. mays
ctgaatgtctttattctgagcacacgggctggcggacttggtatcaaccttacttctgctgatacatgtatcctttatgacagtgactggaatcctcagatggatcagcaggccatggatcgatgccaccggattggtcaaacacgcccagtgcatgtatataggctggctacctcatattctgttgaggagcggatcatcaagaaagcttttgggaagttaaagctagagcatgtggtgataggcaagggacagtttgaacaagaaagagcaaagcctaacgctttagaggagggggagctgctggcgctgcttagggacgagcaggacgaggaagatcggatgatccagaccgacatcagcgacgaagacctcttgaagctgatggaccggagcgacctgtccggaccacctggtgctgccgatgccgctccactgatcccgctgaaaggccctggctgggaggtcgtggtcccaaccaagagcggtggcggtatgctctcgtcgctcaccagctgagcgatgccggcaccatgtttggggtgcccattttgctagtcactcatcatgtggacgatggggcgcttgttggccggtcgccgatcaggcggatattttgcatgtatgcccccctacaaactgttgatctgggtgttgagcctgcaacagtagggttaggttatttcctcccgtgtccgtgccagtgacacgcaagtcggattgagttatgctgtgaacttctgatgagtcgctgcaagccctttctgacttgagctttttgctgcttctgttgctgcgttctatgatgtagtaacagtagctgatggtttacaccaaagcggagatggatgccctctatgatgtagtccttgctatataacttgaacactgatgtgattttctgtagtgtcaactgccatgctttatcggtttttc

SEQ ID NO: 38980 - protein, 172 aa, Zea mays subsp. mays
LNVFILSTRAGGLGINLTSADTCILYDSDWNPQMDQQAMDRCHRIGQTRPVHVYRLATSYSVEERIIKKAFGKLKLEHVVIGKGQFEQERAKPNALEEGELLALLRDEQDEEDRMIQTDISDEDLLKLMDRSDLSGPPGAADAAPLIPLKGPGWEVVVPTKSGGGMLSSLTS

SEQ ID NO: 38981 - protein, 139 aa, Zea mays subsp. mays
MDQQAMDRCHRIGQTRPVHVYRLATSYSVEERIIKKAFGKLKLEHVVIGKGQFEQERAKPNALEEGELLALLRDEQDEEDRMIQTDISDEDLLKLMDRSDLSGPPGAADAAPLIPLKGPGWEVVVPTKSGGGMLSSLTS

SEQ ID NO: 38982 - protein, 134 aa, Zea mays subsp. mays
MDRCHRIGQTRPVHVYRLATSYSVEERIIKKAFGKLKLEHVVIGKGQFEQERAKPNALEEGELLALLRDEQDEEDRMIQTDISDEDLLKLMDRSDLSGPPGAADAAPLIPLKGPGWEVVVPTKSGGGMLSSLTS

SEQ ID NO: 38983 - DNA, 1056 bp, Zea mays subsp. mays
atctccgcggggatccccaggctagctaggccagagatgggcaactcgagcggtcgggcggaagacctcgcggacgccgacatggacgacggtaacaacgtgcgtcgtgcctcttcctcctctgcgggctacgtccggggcggtgggtcgtcatcatccccaccggtgagcccgccgcggccgcattcaccacggatgttcgtgccccagagtcctgtaactccgttgcaaagagctgcagaagtgcctcctccggtgttcaaccaaatattgatgaatcaacaacaggaagattctgatggcccgcctcaaaagaaaattcccacgttgctcatgtggactcttggagggaggaatatctacgttgaaggatcatgggacaactggacatcaaagaaactcgttgagaaatccggaaaagatcacaccattcttttgatgctttcatctggagttcaccgttatagattcattgtagatggagaaagaagatttatacccgaccttccctgcgaaactgacaacatgggtcagattgtgaacctagtagatgttcatgacttcgttcctgacagcgtggaaagtgtatctgagctgatggctcctccctccccggactccagctacggtttccatgttcccggcgagaaggagttctccaaggagcctcctcagctgccgtcccagctctacctcggcgtgctgaattcccggagcaccgaagaaggctgcgcgaggccgaggcacgtcgtcctcgaccatctctacatcgagaagggctggggcgcacagccgctggtggccctcggctacacccacaggttccgctccaagtacgtcacctgcgtcctgtacaaggccatcgagcggtagcctagctaaccattgctgtgctgttgtgggccggcaactatagctagccgtggtggacttggcagttcattcaggtttagaagtctctcctgcataatttgttcatctgctaaactaaagaggtgggtgcaaatccatgtgaatcttgttttttttagctgccagagcttacatattcttatc

SEQ ID NO: 38984 - protein, 290 aa, Zea mays subsp. mays
ISAGIPRLARPEMGNSSGRAEDLADADMDDGNNVRRASSSSAGYVRGGGSSSSPPVSPPRPHSPRMFVPQSPVTPLQRAAEVPPPVFNQILMNQQQEDSDGPPQKKIPTLLMWTLGGRNIYVEGSWDNWTSKKLVEKSGKDHTILLMLSSGVHRYRFIVDGERRFIPDLPCETDNMGQIVNLVDVHDFVPDSVESVSELMAPPSPDSSYGFHVPGEKEFSKEPPQLPSQLYLGVLNSRSTEEGCARPRHVVLDHLYIEKGWGAQPLVALGYTHRFRSKYVTCVLYKAIER

SEQ ID NO: 38985 - protein, 278 aa, Zea mays subsp. mays
MGNSSGRAEDLADADMDDGNNVRRASSSSAGYVRGGGSSSSPPVSPPRPHSPRMFVPQSPVTPLQRAAEVPPPVFNQILMNQQQEDSDGPPQKKIPTLLMWTLGGRNIYVEGSWDNWTSKKLVEKSGKDHTILLMLSSGVHRYRFIVDGERRFIPDLPCETDNMGQIVNLVDVHDFVPDSVESVSELMAPPSPDSSYGFHVPGEKEFSKEPPQLPSQLYLGVLNSRSTEEGCARPRHVVLDHLYIEKGWGAQPLVALGYTHRFRSKYVTCVLYKAIER

SEQ ID NO: 38986 - protein, 263 aa, Zea mays subsp. mays
MDDGNNVRRASSSSAGYVRGGGSSSSPPVSPPRPHSPRMFVPQSPVTPLQRAAEVPPPVFNQILMNQQQEDSDGPPQKKIPTLLMWTLGGRNIYVEGSWDNWTSKKLVEKSGKDHTILLMLSSGVHRYRFIVDGERRFIPDLPCETDNMGQIVNLVDVHDFVPDSVESVSELMAPPSPDSSYGFHVPGEKEFSKEPPQLPSQLYLGVLNSRSTEEGCARPRHVVLDHLYIEKGWGAQPLVALGYTHRFRSKYVTCVLYKAIER

SEQ ID NO: 38987 - DNA, 1085 bp, Zea mays subsp. mays
acaccctcgttttctcccgctctagctctctgctcacagccgcaagctccatcttcctccctgctgcagctcccgagcgccctgccctttgctccagcttgccgcgtgctctagcgtctgtgccgtggagcccctggcgcgggttcttctgcgcccggccatcctctctctccatcaccatggagcttcttttctccagccgcgccctgctcggttccatggccaacgttccccaagctcctccctccagtccagccgcggtgctccctgcgcgcctgctcccgcgcgcgttcctctgctcgtcgcgcccagcgagtctccatggtcaagcacgcgcggatctcctctgagctcgcccccggcctctactccttccagccggtcgagtctcgactgcgctcggcctccagctctgttgtcgcgcagctcgtcggcgttgcccctgtttccatggctgaccgggcggctcctctgcgtcgtcgttctctgggcccgggcatggggcttcctcgccgtcgcgcgcgctccttcctttgctctgctcggccatggacgccatgcagcagctccctgctcgtgcccaactccctgcgtacgcctgcgcccgagctgaacttcctcgccgcgccctgcgctctgctcacctcggctcctagttcggcgcgtgattttggagctctgcgcgaatggcgtgcgatttggtgctctgcggcaagcgcttcgtgtgggtggtgtggttcccaaaccgcgtgatgcactggctcgatgcccagaccccggcctccatcgtgctcgtctgcctcggcagcaagtacttcatgtcggagcagcggcagcaacaccctcctttgcgtcgtgctcactagatcgggcctcgcgcgtccatctgtgcaattcctgttcaattcatgttcggctatcggtttcgctggttgtcgatttcctattcgccatggtcagcctagctcgccaaccgtcgcgtcctctttacctgttgagttgtgtgttgccgcgttcacctcattgtgtcatcatggacttgtcggcgtactgcgctcgtctcaactcgaacgagttgaattgcc

SEQ ID NO: 38988 - protein, 143 aa, Zea mays subsp. mays
MVKHARISSELAPGLYSFQPVESRLRSASSSVVAQLVGVAPVSMADRAAPLRRRSLGPGMGLPRRRARSFLCSARPWTPCSSSLLVPNSLRTPAPELNFLAAPCALLTSAPSSARDFGALREWRAIWCSAASASCGWCGSQTA

SEQ ID NO: 38989 - protein, 115 aa, Zea mays subsp. mays
TLVFSRSSSLLTAASSIFLPAAAPERPALCSSLPRALASVPWSPWRGFFCARPSSLSITMELLFSSRALLGSMANVPQAPPSSPAAVLPARLLPRAFLCSSRPASLHGQARADLL

SEQ ID NO: 38990 - protein, 106 aa, Zea mays subsp. mays
MPRPRPPSCSSASAASTSCRSSGSNTLLCVVLTRSGLARPSVQFLFNSCSAIGFAGCRFPIRHGQPSSPTVASSLPVELCVAAFTSLCHHGLVGVLRSSQLERVEL

SEQ ID NO: 38991 - DNA, 912 bp, Zea mays subsp. mays
acactgagaagcagtcaaggaaaagagcagagaagacaaacaagaagtttagtgttgccttagctaacactgaagcttctttgcacgcagtgatgaaagaacttgaaagggagaggaaatataaaggaagacttgagaagatctgcaacgagctcatcagaggcattgatgaggacaaagctgtggtgcaggcactgaagagggaaaccgagaaggcacaacaagagctccagaaagagcgtgaaatgcttcaacttgcagatgagtggcgtgaacaaagggttcagatgaagcttttagaagcacgggttcaatttgaggagaaaaatgcagctgttaatcagctgcgcgatgaactccaagcttatctggatactaagaaagagcaggaaccgttgaatgatccaatggaactgtcccatgcatctgaaattggcgccactgcagctgatttagttcctgacagaaatggtggaaacttcagcgaagacgcctcagaaggcagtgatatacactccattgagctgaacgtcgatggcatcaacaggacctacacctggagctacactcctacctcaaaaggcaggcagaggagcccatcaaggcatgaaccgttttcggatagagggatggatggcgtgaactcgtggcgtttagagcaaagttttcgggacatggatgaagaactggagggagactgggcagaagggtgcagcaacggaatgctgaacttggatcatgatgaggagaggtatctggctatcaagaatctcagagagcagatgttggccgggtcggggttcatcctgtcacaaggtagagaaaatgctaaaagagagtattgtgggttgtaagataaactgaacaagaaaatttaaaagtaaggtgccgtatgaatcgctgcttgatgct

SEQ ID NO: 38992 - protein, 283 aa, Zea mays subsp. mays
TEKQSRKRAEKTNKKFSVALANTEASLHAVMKELERERKYKGRLEKICNELIRGIDEDKAVVQALKRETEKAQQELQKEREMLQLADEWREQRVQMKLLEARVQFEEKNAAVNQLRDELQAYLDTKKEQEPLNDPMELSHASEIGATAADLVPDRNGGNFSEDASEGSDIHSIELNVDGINRTYTWSYTPTSKGRQRSPSRHEPFSDRGMDGVNSWRLEQSFRDMDEELEGDWAEGCSNGMLNLDHDEERYLAIKNLREQMLAGSGFILSQGRENAKREYCGL

SEQ ID NO: 38993 - protein, 253 aa, Zea mays subsp. mays
MKELERERKYKGRLEKICNELIRGIDEDKAVVQALKRETEKAQQELQKEREMLQLADEWREQRVQMKLLEARVQFEEKNAAVNQLRDELQAYLDTKKEQEPLNDPMELSHASEIGATAADLVPDRNGGNFSEDASEGSDIHSIELNVDGINRTYTWSYTPTSKGRQRSPSRHEPFSDRGMDGVNSWRLEQSFRDMDEELEGDWAEGCSNGMLNLDHDEERYLAIKNLREQMLAGSGFILSQGRENAKREYCGL

SEQ ID NO: 38994 - protein, 202 aa, Zea mays subsp. mays
MLQLADEWREQRVQMKLLEARVQFEEKNAAVNQLRDELQAYLDTKKEQEPLNDPMELSHASEIGATAADLVPDRNGGNFSEDASEGSDIHSIELNVDGINRTYTWSYTPTSKGRQRSPSRHEPFSDRGMDGVNSWRLEQSFRDMDEELEGDWAEGCSNGMLNLDHDEERYLAIKNLREQMLAGSGFILSQGRENAKREYCGL

SEQ ID NO: 38995 - DNA, 1097 bp, Zea mays subsp. mays
gattcccggatggatgtgccggcccggcccggcccgctcggcgctcgtgcttctccccagtcccgtccatccaaagcgttttgcacttgtgcacaaactgcggctgctgtagatacgcgcgccgccactccaaggtccaagcctcccttgctcccgccaccgcccctcaccatgggcagcgccgccacctctccgcagccgtctgggaatctgacgcaggacgagctcaagcgcgtggcggcgcaccgcgcgttggagttcgtggagtccggcatgacgctgggcctgggcacgggttccacggccgcgcacgcgctggaccgcctgggcgacctcctccgcgcgggcgcgctgcccggggtcgccggcgttcccacctccctcaagacggaggcccacgccgcccgcgtcgggatcccgctgcttccgctcgacgccgcctcgggcgccagcatccgcctctccatcgacggcgccgacgaggtcgacccggacctcaacctcgtcaagggccgcggcgggtcgctgctccgggagaagatgatcgagggcgccggcgatcggttcgtcgtcatcgtcgacgagtccaagctcgtgccgaggctcggctgcacgggcgccgtccccgtcgaggtcatccccttcggcgcaccccacacgctcggcctcatccgcaaggtgttcgatggagtgcctggcttccacgccaggctgaggacggtccccgccgccaatggggaggactcggacgcgccgttcctcaccgacaacggcaactacatcgtggagatgttcttcgaggacggtatccgcggcgacctgctggacatcagcgatcgtctgctccggatcaccggcgtcatcgagcatggcatgtttcttggcatggccactacagtcatcgtcgctaacaaggacggcaccgtcacagtcatcaacaagaagaagtaataatctacaagtagcctgtatgtgtgcgtccgtgtgtgatccagctacctaagttctgctcgttaccgttgtgaaaccatcattttgttttatcatctcatatctttcctactggtgattccaatatatcttatttattatccctc

SEQ ID NO: 38996 - protein, 316 aa, Zea mays subsp. mays
DSRMDVPARPGPLGARASPQSRPSKAFCTCAQTAAAVDTRAATPRSKPPLLPPPPLTMGSAATSPQPSGNLTQDELKRVAAHRALEFVESGMTLGLGTGSTAAHALDRLGDLLRAGALPGVAGVPTSLKTEAHAARVGIPLLPLDAASGASIRLSIDGADEVDPDLNLVKGRGGSLLREKMIEGAGDRFVVIVDESKLVPRLGCTGAVPVEVIPFGAPHTLGLIRKVFDGVPGFHARLRTVPAANGEDSDAPFLTDNGNYIVEMFFEDGIRGDLLDISDRLLRITGVIEHGMFLGMATTVIVANKDGTVTVINKKK

SEQ ID NO: 38997 - protein, 313 aa, Zea mays subsp. mays
MDVPARPGPLGARASPQSRPSKAFCTCAQTAAAVDTRAATPRSKPPLLPPPPLTMGSAATSPQPSGNLTQDELKRVAAHRALEFVESGMTLGLGTGSTAAHALDRLGDLLRAGALPGVAGVPTSLKTEAHAARVGIPLLPLDAASGASIRLSIDGADEVDPDLNLVKGRGGSLLREKMIEGAGDRFVVIVDESKLVPRLGCTGAVPVEVIPFGAPHTLGLIRKVFDGVPGFHARLRTVPAANGEDSDAPFLTDNGNYIVEMFFEDGIRGDLLDISDRLLRITGVIEHGMFLGMATTVIVANKDGTVTVINKKK

SEQ ID NO: 38998 - protein, 302 aa, Zea mays subsp. mays
FPDGCAGPARPARRSCFSPVPSIQSVLHLCTNCGCCRYARRHSKVQASLAPATAPHHGQRRHLSAAVWESDAGRAQARGGAPRVGVRGVRHDAGPGHGFHGRARAGPPGRPPPRGRAARGRRRSHLPQDGGPRRPRRDPAASARRRLGRQHPPLHRRRRRGRPGPQPRQGPRRVAAPGEDDRGRRRSVRRHRRRVQARAEARLHGRRPRRGHPLRRTPHARPHPQGVRWSAWLPRQAEDGPRRQWGGLGRAVPHRQRQLHRGDVLRGRYPRRPAGHQRSSAPDHRRHRAWHVSWHGHYSHRR

SEQ ID NO: 38999 - DNA, 1152 bp, Zea mays subsp. mays
acaagctgtcacaaactcagcacacaatcacactgacacacacaccaccaccacggcaccgctagtgagaagcggagcgggaggacacgcggcgcggactgcgatggctcgtgcgctcggcgcttgcgtgctgctcgccgtcctgctcggtgccctggcgccggcggcggccgcgcgcgcccacgacgaccagggcagcggggccggcatacggcagccgagcggcgagtaccgcgggaggaaggtgggggccaggacggaggtgcgggacgtggagggcgacggcgaggtgcaggagctcggccggttctccgtcgccgagtacaaccggcagctccgagaaggtggcggcggcggcggcaggctcgagttcggcagggtggtggcggcgcagcggcaggtggtgtcggggctcaagtactacctccccacccattcactcgccttgcgcttcctcgccgccccagttccccaccccctgctcacccacccgtcccctcctgctcgcccatggctcccatcgctgtcggcgacgccctccccgacggccagctcgggtggttcgacgagaacgaccagctgcagcaggtctccgtccacgcgctcgccgccggcaagaaggtcatcctcttcggcgtccccggcgccttcaccccgacctgcagcaaccagcatgtgccaggcttcatcacacaggctgagcagctcaaagccaagggtgtagacgagatcctgcttatcagcgttaacgaccccttcgtcatgaaggcgtgggcgaagacctaccccgagaacaagcacgtgaagttcctcgccgacggatctggagcgtacaccaaggcgctcgacctcgagctcgatctcacggacaaaggtctgggcgtgcgctcgaagaggttcgctctcctggccgacgacctcacggtcaccgtcgcaaacatcgaggaaggcgggcagttcacgatctctggcgctgaggagatcctgaaggcgctttagaagccgcagcaacgatcggtctagtttgaactcgcctttgaataacttgtcgttggacaaggtctagttcggtgttgtgtatggaacggtcgtcactgagtcatgcacgatttggtatccgtgtgtttatgttcgccggtttgaggaactctc

SEQ ID NO: 39000 - protein, 240 aa, Zea mays subsp. mays
QAVTNSAHNHTDTHTTTTAPLVRSGAGGHAARTAMARALGACVLLAVLLGALAPAAAARAHDDQGSGAGIRQPSGEYRGRKVGARTEVRDVEGDGEVQELGRFSVAEYNRQLREGGGGGGRLEFGRVVAAQRQVVSGLKYYLPTHSLALRFLAAPVPHPLLTHPSPPARPWLPSLSATPSPTASSGGSTRTTSCSRSPSTRSPPARRSSSSASPAPSPRPAATSMCQASSHRLSSSKPRV

SEQ ID NO: 39001 - protein, 206 aa, Zea mays subsp. mays
MARALGACVLLAVLLGALAPAAAARAHDDQGSGAGIRQPSGEYRGRKVGARTEVRDVEGDGEVQELGRFSVAEYNRQLREGGGGGGRLEFGRVVAAQRQVVSGLKYYLPTHSLALRFLAAPVPHPLLTHPSPPARPWLPSLSATPSPTASSGGSTRTTSCSRSPSTRSPPARRSSSSASPAPSPRPAATSMCQASSHRLSSSKPRV

SEQ ID NO: 39002 - protein, 162 aa, Zea mays subsp. mays
MAPIAVGDALPDGQLGWFDENDQLQQVSVHALAAGKKVILFGVPGAFTPTCSNQHVPGFITQAEQLKAKGVDEILLISVNDPFVMKAWAKTYPENKHVKFLADGSGAYTKALDLELDLTDKGLGVRSKRFALLADDLTVTVANIEEGGQFTISGAEEILKAL

SEQ ID NO: 39003 - DNA, 866 bp, Zea mays subsp. mays
ctctccgttccgttccgttccgtcccctccaccccgcacctgcagccgcgggatgaccggcggcggccgcggcgcgtgcgcggtgtgcaagcaccagcggcgcaagtgcgagcccaactgcgagctggccgcctacttcccggcgcacaggatgaacgacttccgcgcgctgcacctcgtcttcggggtggccaacctcaccaagctcatcaaggccaacgccagcgaggccggccggcgccgcgccgccgagacgctcacctgggaggcccgctggagggagtgcgacccctcggacgggtgctaccgcgaggtggcctgcctgcgccgcgacaacgccgtgctgcgcgccgagaacgccgcgctgcggcggcagctggccgagcagcagctgctctggtccagcgcctgcagcactggcggcagcgcgcttctggccgagcagcagctgctgccgccgtgtgggggcaataataatgggcttctgacggcgagtagcagagctcatcatgcaccggcagcagctctggcggcaacgcacaccgcgctggcctgctaccgtggcagcatgccggtgtgtactattactatgacagcggacgacggcagcggcaggaggccggcgtcggatgctgccgccatcgccgggagagggagtggtgctcaggtcgacgcttctagggataacaagagcagcgcctgcaggtgaggatgctcagatcgattccttgtgctctcagctactgcaaaagatagctgtgtgtggatacttgcattggcttctctccattgtttatgcaactgcaggtgatgctagctggccggctatactgctaattaacaactgcaaagaaagcaagataccc

SEQ ID NO: 39004 - protein, 235 aa, Zea mays subsp. mays
SPFRSVPSPPPRTCSRGMTGGGRGACAVCKHQRRKCEPNCELAAYFPAHRMNDFRALHLVFGVANLTKLIKANASEAGRRRAAETLTWEARWRECDPSDGCYREVACLRRDNAVLRAENAALRRQLAEQQLLWSSACSTGGSALLAEQQLLPPCGGNNNGLLTASSRAHHAPAAALAATHTALACYRGSMPVCTITMTADDGSGRRPASDAAAIAGRGSGAQVDASRDNKSSACR

SEQ ID NO: 39005 - protein, 218 aa, Zea mays subsp. mays
MTGGGRGACAVCKHQRRKCEPNCELAAYFPAHRMNDFRALHLVFGVANLTKLIKANASEAGRRRAAETLTWEARWRECDPSDGCYREVACLRRDNAVLRAENAALRRQLAEQQLLWSSACSTGGSALLAEQQLLPPCGGNNNGLLTASSRAHHAPAAALAATHTALACYRGSMPVCTITMTADDGSGRRPASDAAAIAGRGSGAQVDASRDNKSSACR

SEQ ID NO: 39006 - protein, 185 aa, Zea mays subsp. mays
MNDFRALHLVFGVANLTKLIKANASEAGRRRAAETLTWEARWRECDPSDGCYREVACLRRDNAVLRAENAALRRQLAEQQLLWSSACSTGGSALLAEQQLLPPCGGNNNGLLTASSRAHHAPAAALAATHTALACYRGSMPVCTITMTADDGSGRRPASDAAAIAGRGSGAQVDASRDNKSSACR

SEQ ID NO: 39007 - DNA, 1056 bp, Zea mays subsp. mays
ctattcacgatgatcagtgtgcggacatccatatcgatgcagttctttccacgcttcttcttgctgtattttttggttttccatatctacttcttctcatatacctatggcttctcatatctggctttctctgctacggcagcattcatgcaacacctgattttatatttttggaaccgttttgaggtgccagctctccagagattcatgcgaagccgagcacacattcaccagcaaacaggtgtccacattacatcctcaactatctacacttctaccttacacattgctagggtaaatgtgagggaccctggtacaataaacgatggcctcggtgctgctcgtgaagcagatgccctattggttcaggatgagtctaccaggagccagcaagagggtcaacagaatggaatttctgagccagctgccaacaatgctctccagtatcaagagcaaaaccctcagcgagctggaagtacccctgcaggctcaggctccctcaacccatttgggtcccttttgctgtggttgctgggaggcggtgcttctgatggcatagtttctttcttctctatgttcagagatgttcgtgatcatggtcaagattacaccgatccacctcgaaatggaaatgatcaggtgacatagaatcatggggatgaaagtgggccaatgactgaactcgagtgcttgggcggcagcagtctctttctaatatgatataatgccagcacctcccttcaaaaggataatgacgaatattggtggcaactatacagactggtgtcgctggagatgccatgttagtattatctgtttctcacttttttagttagtaggtaagggtgaaggttgtatctatattcattacatgtgcacattccctaccgtctgaatgggagcgcccgtcccagtcctgtacagaaatgtcaactcacagcagattgtgcacattctttttgtactcccatgggcgggtgctggcctggaacatgcagtgtgtgcaccactgtcactgaattggacagttaatggtttggatacatcgttgcatgt

SEQ ID NO: 39008 - protein, 215 aa, Zea mays subsp. mays
LFTMISVRTSISMQFFPRFFLLYFLVFHIYFFSYTYGFSYLAFSATAAFMQHLILYFWNRFEVPALQRFMRSRAHIHQQTGVHITSSTIYTSTLHIARVNVRDPGTINDGLGAAREADALLVQDESTRSQQEGQQNGISEPAANNALQYQEQNPQRAGSTPAGSGSLNPFGSLLLWLLGGGASDGIVSFFSMFRDVRDHGQDYTDPPRNGNDQVT

SEQ ID NO: 39009 - protein, 212 aa, Zea mays subsp. mays
MISVRTSISMQFFPRFFLLYFLVFHIYFFSYTYGFSYLAFSATAAFMQHLILYFWNRFEVPALQRFMRSRAHIHQQTGVHITSSTIYTSTLHIARVNVRDPGTINDGLGAAREADALLVQDESTRSQQEGQQNGISEPAANNALQYQEQNPQRAGSTPAGSGSLNPFGSLLLWLLGGGASDGIVSFFSMFRDVRDHGQDYTDPPRNGNDQVT

SEQ ID NO: 39010 - protein, 203 aa, Zea mays subsp. mays
MQFFPRFFLLYFLVFHIYFFSYTYGFSYLAFSATAAFMQHLILYFWNRFEVPALQRFMRSRAHIHQQTGVHITSSTIYTSTLHIARVNVRDPGTINDGLGAAREADALLVQDESTRSQQEGQQNGISEPAANNALQYQEQNPQRAGSTPAGSGSLNPFGSLLLWLLGGGASDGIVSFFSMFRDVRDHGQDYTDPPRNGNDQVT

SEQ ID NO: 39011 - DNA, 1091 bp, Zea mays subsp. mays
agttgctcggctcggctgtgcctgtgtccccccgaaaatggcctcgtccccgctcttcacctcgctccggctgcccgtgcccaccatcataccgcgctgtgcttctccgccgcacggcgtgccctcggcggacgacgccgtccctcggccggcgcctctcgtggcggccgctagccacaggagggagctggtggtaggggcggcgctgaccgcggtgctgttgccgagggcgccgctgccggcccaggcgcgcgaggtcgcggtcggcacgtacctgccaccggcgccgtccaacccgggcttcgtcttcttccgcgccacctccaaggacacccccgcgctccgcgccggcaatgtggaaccgtacgagttcatcctgccgccgacctggaagcagacgcgcgtcgccaacatcctgtccgggaactactgccagcccaagtgcgccgagccgtgggtggaggtgaagttcgaggacgagaagcagggcaaggtgcaggtggtggcctcgccgctcatccgcctcaccaacaagcccaacgccacgatcgaggacatcggcagccccgagaggctgatcgcctcgctggggcctttcgtcaccggcaacaccttcgactccgacgagctcgtcgacaccaacgtcgagaacgtcgatggacagacttactacagctacgtgctggagactccattggcgctaacaggttcgcacaacctggccaaggccaccgccaaggggagcacggtggtgctgttcgtcgcaagcgccaacgacaagcagtggccggcgtcgcagaaggttctgaaagccatagtggactcgtttcaaatatgactggtttgggtgatgcgttacgttgttggcaacatctatcggcctttttgacttgagttcagttgagttgcttgtacccgaagctctaaaatacgaggtatatataagcttataaagccaaaagggaaaagaaggcactgcttgttttaggcttgagtcacggttgctgttcgtagcttgtcgaagacgacatgtcagatgtacatgtacacggaaatgaactttttcagtaacgaaatgctggttaatatcc

SEQ ID NO: 39012 - protein, 278 aa, Zea mays subsp. mays
VARLGCACVPPKMASSPLFTSLRLPVPTIIPRCASPPHGVPSADDAVPRPAPLVAAASHRRELVVGAALTAVLLPRAPLPAQAREVAVGTYLPPAPSNPGFVFFRATSKDTPALRAGNVEPYEFILPPTWKQTRVANILSGNYCQPKCAEPWVEVKFEDEKQGKVQVVASPLIRLTNKPNATIEDIGSPERLIASLGPFVTGNTFDSDELVDTNVENVDGQTYYSYVLETPLALTGSHNLAKATAKGSTVVLFVASANDKQWPASQKVLKAIVDSFQI

SEQ ID NO: 39013 - protein, 266 aa, Zea mays subsp. mays
MASSPLFTSLRLPVPTIIPRCASPPHGVPSADDAVPRPAPLVAAASHRRELVVGAALTAVLLPRAPLPAQAREVAVGTYLPPAPSNPGFVFFRATSKDTPALRAGNVEPYEFILPPTWKQTRVANILSGNYCQPKCAEPWVEVKFEDEKQGKVQVVASPLIRLTNKPNATIEDIGSPERLIASLGPFVTGNTFDSDELVDTNVENVDGQTYYSYVLETPLALTGSHNLAKATAKGSTVVLFVASANDKQWPASQKVLKAIVDSFQI

SEQ ID NO: 39014 - DNA, 1079 bp, Zea mays subsp. mays
atccccgccccgggcaccgcgagctagctagctactgacacccggcgccggcgccgagtacaatacaaggaaagcagcatggtgttcgagcagcatgaggaggaggcggtggcgccgggcgcggtgcacgggcaccggctctccacggtggtgccgagctcggtgacgggggaggtggactacgcgctggcggacgcggacctggccttcaagctgcactacctgcgcggggtgtactactaccggtccggggacggcctcgccaccaaggtgctcaaggaccccatgttcccgtggctggacgaccacttccccgtggccggccgcgtccgccgcgccgaggcggagggggacggcgcgccgcgccggccctacatcaagtgcaacgactgcggcgtgcgcatcgtggaggccaggtgcgaccgcgacatggccgagtggatccgcgacgccgcgcccggcaggatcaggcagctctgctacgacaaggtgctcggccccgagctcttcttctcgccgctgctctacgtccagatcacaaacttcaaatgcggtgggctggcgctggggttcagctgggcgcacctcatcggcgacatcccgtcgtccgccacctgcttcaacaagtgggcgcagatcctcagcggcaagaagccggaagccaccgtcctcaccccgccgaaccagccgctgcagggccagtcccccgcggcgccgcgctccgtcaagcaggtcgggcccatggaggacctctggctggtccccgcgggccgcgacatggcgtgctactccttccacgtcagcgacgcggtgctcaagaagctccaccagcagcagaatgggcgccaggacgcggccgctggcaccttcgagctcgtgtcggcgctggtgtggcaggcggtggccaagatcaggggcgacgtggacaccgtgaccgtggtcagcgccgacgctgccgcgcggagcggcaagtcgctggccaacgagatcaaggtcgggtacgtggagtcggcggggtcgtcgccggcgaagacggacgtcgcggagctggcggcgctgctggccaagaacgtggtcga

SEQ ID NO: 39015 - protein, 333 aa, Zea mays subsp. mays
MVFEQHEEEAVAPGAVHGHRLSTVVPSSVTGEVDYALADADLAFKLHYLRGVYYYRSGDGLATKVLKDPMFPWLDDHFPVAGRVRRAEAEGDGAPRRPYIKCNDCGVRIVEARCDRDMAEWIRDAAPGRIRQLCYDKVLGPELFFSPLLYVQITNFKCGGLALGFSWAHLIGDIPSSATCFNKWAQILSGKKPEATVLTPPNQPLQGQSPAAPRSVKQVGPMEDLWLVPAGRDMACYSFHVSDAVLKKLHQQQNGRQDAAAGTFELVSALVWQAVAKIRGDVDTVTVVSADAAARSGKSLANEIKVGYVESAGSSPAKTDVAELAALLAKNVV

SEQ ID NO: 39016 - protein, 264 aa, Zea mays subsp. mays
MFPWLDDHFPVAGRVRRAEAEGDGAPRRPYIKCNDCGVRIVEARCDRDMAEWIRDAAPGRIRQLCYDKVLGPELFFSPLLYVQITNFKCGGLALGFSWAHLIGDIPSSATCFNKWAQILSGKKPEATVLTPPNQPLQGQSPAAPRSVKQVGPMEDLWLVPAGRDMACYSFHVSDAVLKKLHQQQNGRQDAAAGTFELVSALVWQAVAKIRGDVDTVTVVSADAAARSGKSLANEIKVGYVESAGSSPAKTDVAELAALLAKNVV

SEQ ID NO: 39017 - protein, 216 aa, Zea mays subsp. mays
MAEWIRDAAPGRIRQLCYDKVLGPELFFSPLLYVQITNFKCGGLALGFSWAHLIGDIPSSATCFNKWAQILSGKKPEATVLTPPNQPLQGQSPAAPRSVKQVGPMEDLWLVPAGRDMACYSFHVSDAVLKKLHQQQNGRQDAAAGTFELVSALVWQAVAKIRGDVDTVTVVSADAAARSGKSLANEIKVGYVESAGSSPAKTDVAELAALLAKNVV

SEQ ID NO: 39018 - DNA, 1097 bp, Zea mays subsp. mays
aatttttcacctacccccctagccgccacaagccattttccctgccttcttctcctctcacgcgcagcttccttcttctctgttcatggcacacggcagcagcacctcccatggcaccggcgaagctccagctccaagctccctgcaccctcctccccacgtgcaacacctctgctcccctttccatggcgcctagcagggagcacaaccggcgtcgttttcctcccatggcgctcccctgttgaagccccttgccgacgacctgctcaaaggatgaagcccaacaccccagccatggcgcccttccccagcgacgcccctctacagctcgcccctctctgtccatggccgaactcccctgtagaagctccccacggcgcctttcatctccaagtacagcaagcaggcacccctccctgtccccatgctgtgagcccctccccatgcgtctccctccttgctccccaccctcaggctcctagcgcgcagcgcattttctgggtccgagctcgagcagcgcctagagcgaacccctgccgcgcctgagatccaagcagccatggagggcagccgcaccctttctctgtggtcaccaatcgtcctgctccttttcccctggtgtgctcaacgcctggtgcttcgacctcggcgagttcccctgcgagcgacacctcggctcgactccctctcccggctgtgagctcctctgtttgcgccggtccaccgcagcagcctcaacatcccctctgcgttgcgccctcgacgtgctcgacaaaatgccgcagcgagcagcggtcatgagatcccctccgtgttgcttgcatcggcccgatctgcgcagtccctgtcgcgacgccaaaattcttcgcaccttgtcgttgtcacgcttcgcgcgtcgtttctcgacagaaagccaaaccgacatgcacgcatgcgcaactccactcgggtttcggccaggttgttcgccttgaatgattcgcgatctgttttatttacgtatttggtcgatgatgtgtgtgtgtgaatatgtgcgtgaaattataattgtataaatgaacacgtatatagaagaaaatgaagtagaacaagaactc

SEQ ID NO: 39019 - protein, 181 aa, Zea mays subsp. mays
NFSPTPLAATSHFPCLLLLSRAASFFSVHGTRQQHLPWHRRSSSSKLPAPSSPRATPLLPFPWRLAGSTTGVVFLPWRSPVEAPCRRPAQRMKPNTPAMAPFPSDAPLQLAPLCPWPNSPVEAPHGAFHLQVQQAGTPPCPHAVSPSPCVSLLAPHPQAPSAQRIFWVRARAAPRANPCRA

SEQ ID NO: 39020 - protein, 90 aa, Zea mays subsp. mays
MKPNTPAMAPFPSDAPLQLAPLCPWPNSPVEAPHGAFHLQVQQAGTPPCPHAVSPSPCVSLLAPHPQAPSAQRIFWVRARAAPRANPCRA

SEQ ID NO: 39021 - DNA, 1091 bp, Zea mays subsp. mays
ccaactacttcgccgaggcgctcatcgccgaggcggagcaggacagcaagatcgtggccatccacgcggccatgggcggcggcacggggctcaactacttcctccgccgcttcccgagccggtgcttcgacgtcgggatcgcggagcagcacgccgtcacgttcgcggccggcctggcctgcgagggcctcaagcccttctgcgccatctactcgtctttcctgcagcgcggctacgaccaggtcgtgcacgacgtcgatctgcagaagctaccggtgcggttcgccatggacagggccgggctggtcggcgcggacgggccgacccactgcggtgcgttcgacgtcgcgtacatggcctgcctgcccaacatggtcgtcatggccccgtccgacgaggccgagctctgccacatggtcgccaccgccgcggccatcgacgaccgcccgtcctgcttccgctacccgagaggcaacggcgttggcgtcccgttgcctcccaactacaaaggcactcccctcgaggtcggcaaaggcaggatcctgcttgagggcgaccgggtggcgctgctggggtacgggtcggcagtgcagtactgcctgactgccgcgtccctggtgcagcgccacggcctcaaggtcaccgtcgccgacgcgaggttctgcaagccgctggaccacgccctgatcaggagcctggccaagtcccacgaggtgctcatcaccgtggaggaaggctccatcggcgggttcggctcgcacgtcgcccagttcatggccctggacggccttctcgacggcaaactcaagtggcgaccgctggtgcttcctgacaggtacatcgaccatggatcgccggccgatcagctggccgaggctgggctgacgccgtcacacatcgccgcgtcggtgttcaacatcctggggcagaacagggaggctcttgccatcatggcagtgccaaacgcgtagaacttgtgctgatctgggcctatagagatgattgtacattttgtcgttaactagagtgtctgaacttgggagattagtcttctttggatgaaagtgtcgccggaacaacagttaccgttg

SEQ ID NO: 39022 - protein, 322 aa, Zea mays subsp. mays
NYFAEALIAEAEQDSKIVAIHAAMGGGTGLNYFLRRFPSRCFDVGIAEQHAVTFAAGLACEGLKPFCAIYSSFLQRGYDQVVHDVDLQKLPVRFAMDRAGLVGADGPTHCGAFDVAYMACLPNMVVMAPSDEAELCHMVATAAAIDDRPSCFRYPRGNGVGVPLPPNYKGTPLEVGKGRILLEGDRVALLGYGSAVQYCLTAASLVQRHGLKVTVADARFCKPLDHALIRSLAKSHEVLITVEEGSIGGFGSHVAQFMALDGLLDGKLKWRPLVLPDRYIDHGSPADQLAEAGLTPSHIAASVFNILGQNREALAIMAVPNA

SEQ ID NO: 39023 - protein, 299 aa, Zea mays subsp. mays
MGGGTGLNYFLRRFPSRCFDVGIAEQHAVTFAAGLACEGLKPFCAIYSSFLQRGYDQVVHDVDLQKLPVRFAMDRAGLVGADGPTHCGAFDVAYMACLPNMVVMAPSDEAELCHMVATAAAIDDRPSCFRYPRGNGVGVPLPPNYKGTPLEVGKGRILLEGDRVALLGYGSAVQYCLTAASLVQRHGLKVTVADARFCKPLDHALIRSLAKSHEVLITVEEGSIGGFGSHVAQFMALDGLLDGKLKWRPLVLPDRYIDHGSPADQLAEAGLTPSHIAASVFNILGQNREALAIMAVPNA

SEQ ID NO: 39024 - protein, 227 aa, Zea mays subsp. mays
MDRAGLVGADGPTHCGAFDVAYMACLPNMVVMAPSDEAELCHMVATAAAIDDRPSCFRYPRGNGVGVPLPPNYKGTPLEVGKGRILLEGDRVALLGYGSAVQYCLTAASLVQRHGLKVTVADARFCKPLDHALIRSLAKSHEVLITVEEGSIGGFGSHVAQFMALDGLLDGKLKWRPLVLPDRYIDHGSPADQLAEAGLTPSHIAASVFNILGQNREALAIMAVPNA

SEQ ID NO: 39025 - DNA, 1028 bp, Zea mays subsp. mays
attctcccgaatctcatcgcgcctcgcactctccccgctccagccatagcggcgagggccggatcggttccggagacagcgcccatgtcttcgaagtcttggatctggacgcggttatggggctggtggtgagcgccgccatgaggagcggctggacgatggtgttgggaatggagggaccaccgatggcaagctgagtctgcgggcaggcccgaggtgttgacactgccttggtccctcttcacaaaatcaccacggtggcgcatgcgggtggccttcgcctgcagcgtatgtgggcagcgtacgaccaaggccatcaatcctcatgcctacaccgatggaactatgtttgttcagatttgtaatgcagttgttcaatgcaactcttgtcctcccaatttttttgtgcagtaatgtttggctggccaaaaggatttggcaatcgcttatctttgactcaataccttatgacctcgaaaaggtttgaacccgttagggactaaagatgccaaaggttgctgtggagaagttcgtgagtttatctattctgataatgggactgtaaccatggtatatcatgtgaatatttaaaggaactgatagagagatacaatcaatctcaaatgaacttaaggataataagggtcaacatgagatatgttgttctaaaattgaaacaataaagggtaaatggcttccaactatgtggattcattcgtaactttcaagaaatggcagtcgctcactactaacagtttatctacagcctaatgaaattcgttggtagtgtccacttcatatgccataagttgaagagcataaatattctgaaagctcacggtaaaagcatcaaggatagttacatgctaaatggctatgcactaaagactaaacataggccgtgcaggtcaaggaatgcctacgagagtaactcctactagaattacttctcttgattttaacattcataagacaaaaatgcaaacagatccaagggaacttgataagattcgtcagagttatttgtt

SEQ ID NO: 39026 - protein, 64 aa, Zea mays subsp. mays
SPESHRASHSPRSSHSGEGRIGSGDSAHVFEVLDLDAVMGLVVSAAMRSGWTMVLGMEGPPMAS

SEQ ID NO: 39027 - protein, 56 aa, Zea mays subsp. mays
MKFVGSVHFICHKLKSINILKAHGKSIKDSYMLNGYALKTKHRPCRSRNAYESNSY

SEQ ID NO: 39028 - protein, 53 aa, Zea mays subsp. mays
MPTPMELCLFRFVMQLFNATLVLPIFLCSNVWLAKRIWQSLIFDSIPYDLEKV

SEQ ID NO: 39029 - DNA, 714 bp, Zea mays subsp. mays
gaggaggacctccgcagcaagagcgacctcctgctgagctcgaacccggtgcacaagaaggtgcccgtcctcatccacaacggcgtgcccgtctgtgagtcgcgggtcatcgtggagtacctcgacgaagtctacagcgccacgggcccccgcttcctccctgccgacccatacgagcgtgccatggcgcgcttctgggcctcattcatcgacgaaaagttcttggcgtcgtggctaaaggcaggaaggggcaagacggacgaggagaaggccgaagggttgaagctgacactcgcggccgtagaaaccttggaaggggcgttcatggagtgctccaaggggaagcccttctttggaggctatagcgtcggctacctggacatcgcgctcggggccctggtagcgtggatgcgcgccgccgaggcgcgtcatggtctcaggctcttcgacgactccaggagtccgctgctggagaagtgggtggagcgcttcagcgagctggacgaggtcgtggcggtcatgccggacatcgaccggctagtagagctcggcaaggtgagggaggttgttgcggctgcagcagctcccgtaaacagctgaacggaacgcgtctcgcggtattgaggtggtcaataagtcggagaaagatcttgatacctgtgtgtaacaagcgaatggtgtaataaagaatccaattagggtgccatttggttc

SEQ ID NO: 39030 - protein, 138 aa, Zea mays subsp. mays
MARFWASFIDEKFLASWLKAGRGKTDEEKAEGLKLTLAAVETLEGAFMECSKGKPFFGGYSVGYLDIALGALVAWMRAAEARHGLRLFDDSRSPLLEKWVERFSELDEVVAVMPDIDRLVELGKVREVVAAAAAPVNS

SEQ ID NO: 39031 - protein, 199 aa, Zea mays subsp. mays
EEDLRSKSDLLLSSNPVHKKVPVLIHNGVPVCESRVIVEYLDEVYSATGPRFLPADPYERAMARFWASFIDEKFLASWLKAGRGKTDEEKAEGLKLTLAAVETLEGAFMECSKGKPFFGGYSVGYLDIALGALVAWMRAAEARHGLRLFDDSRSPLLEKWVERFSELDEVVAVMPDIDRLVELGKVREVVAAAAAPVNS

SEQ ID NO: 39032 - DNA, 1049 bp, Zea mays subsp. mays
cggacatcccaatcgaatcagatgagaagctggaggctgctccacgatttccttcggcgcctgctcaaacccaccgatactcccgcccaaatccgcccggcatcacacctttccacaaaatccggccaggctgcgacgcaatccgctgccgccgacccaacccgcgcggtgtcgctcctggccgagcgggactggttcgctcggatcaactcagagttcgccgccccactccggcagctgggcccgcgcttcgtcgtccgcgcgctgcagcacgccgccggcgagccgctcctctgcgtgcgcctctacgtctgggcatcgaggttcggtcagcacttcgcgcgggaccggtccgtgcggcgcgcgctcggggacgccctgttgcggcgcgggcccgtggtgctctccgcggcactggtcgccgacgtacggagctgtggctgcgaggtctcggaggagctgctgtgcgcgctggtggagagctggggcaggctcgggctgggcactacgcgcacgaggtgttcgtgcaagtgccgcgcctgggactgcggcccagcacggccatttacaatgctgtgatcgccgcatcggtgagggcaggcgcggtggacgccgcgtacctcaggttccagcagatgcctgcggacgggtgtcggccggactgcttcacgtacaataccctggtgcacggagtctgccgacgcgggatcgtcgacgaggcgttaaggctggtgaagcaaatggagcgggcagggatcaggccgaatgctgtcacatacaccatgttggtcgatgggttctgcaatgctagcagagttgaagaagctgtttgtgtgttggagaggatgaaggagaagggagtgtcagcaactgaggctacatacaggtctctggttcatggtgcatttcgttgccttgaaaaagaaagggcatacaggatgctgagtgagtggattgagagtgatcctactctgcattcaattgcatatcatactttgctgtattgcctctcgaagaatgatatggacaaagaggcagttgaacttgtg

SEQ ID NO: 39033 - protein, 349 aa, Zea mays subsp. mays
DIPIESDEKLEAAPRFPSAPAQTHRYSRPNPPGITPFHKIRPGCDAIRCRRPNPRGVAPGRAGLVRSDQLRVRRPTPAAGPALRRPRAAARRRRAAPLRAPLRLGIEVRSALRAGPVRAARARGRPVAARARGALRGTGRRRTELWLRGLGGAAVRAGGELGQARAGHYAHEVFVQVPRLGLRPSTAIYNAVIAASVRAGAVDAAYLRFQQMPADGCRPDCFTYNTLVHGVCRRGIVDEALRLVKQMERAGIRPNAVTYTMLVDGFCNASRVEEAVCVLERMKEKGVSATEATYRSLVHGAFRCLEKERAYRMLSEWIESDPTLHSIAYHTLLYCLSKNDMDKEAVELV

SEQ ID NO: 39034 - protein, 192 aa, Zea mays subsp. mays
RTSQSNQMRSWRLLHDFLRRLLKPTDTPAQIRPASHLSTKSGQAATQSAAADPTRAVSLLAERDWFARINSEFAAPLRQLGPRFVVRALQHAAGEPLLCVRLYVWASRFGQHFARDRSVRRALGDALLRRGPVVLSAALVADVRSCGCEVSEELLCALVESWGRLGLGTTRTRCSCKCRAWDCGPARPFTML

SEQ ID NO: 39035 - protein, 185 aa, Zea mays subsp. mays
MRSWRLLHDFLRRLLKPTDTPAQIRPASHLSTKSGQAATQSAAADPTRAVSLLAERDWFARINSEFAAPLRQLGPRFVVRALQHAAGEPLLCVRLYVWASRFGQHFARDRSVRRALGDALLRRGPVVLSAALVADVRSCGCEVSEELLCALVESWGRLGLGTTRTRCSCKCRAWDCGPARPFTML

SEQ ID NO: 39036 - DNA, 1203 bp, Zea mays subsp. mays
aaatggaagtgtttcttcagattttgcgggatctgccagattccacaaggtcttgcaaggtcaagaattgttgggtttcaaaacccatgatggtcctgctatttctcttctcaggcaactgaagcaagaaatttgcagtacagtgatgaacggagtaacaataacttagggatcccaagacttggtgttaggtctccaactggaatccctgggtttccctaccattgctcaggctttggcgaatctcaaagattccaaaaggtcttgcaaggtcaagaagtgtttcatcctttccgaggaggatgtttggctgatggccatataagaactgctggcatgtatcaacctgacggtaggcatgtatctggtgcagcttataaatggtctgcaccacaagggtatgatttcccacagccagcaaaaccggtttttctgttgcaagaatcatccccatcatctgtgatgatgtttccacaaactagatctaagataactcacttggaatatgagtactcaagacatgaggatggtagacttgataggactgttcctactcaagacatgggaagaagcaatcaaacattatctctttggcctcatcttgtttcaggcgaagcaatagaagaatgtactggaactgtgaatatgcactcccccgtcagtggtgcagagcatgaatcaaacaatgagagtacagttgaaaatggctgcaaaatctttggtatctcattggctgaaaagatccgatcatgcgatgaagcagactcttgtagtgcaaaatgtaattctcggctccagcctttgaagtcacaaatgccaaaatcgctaggcagctgtttggccactgttcacgagcaaaggcctgttgttggcagggtggttgacgtctcggcgacagatatgtgatctgatccacatggcatatccttgtagaatatgcaggaaggactaccgagtgcaactttcatggcctgaaccacatcctggatgaaagattgctgaaggtgaccttatgattcttgaaacagggatgtttgacaaatttgtaatgtacttttgggctttaagtatcttattatcttaagctacctagtaatcagcacttgtaccttaaggtgtgcgttatggcaagttcttttagagggcttgtttggactagcaccatctcccaagtactcgttgcattgtttctttgccccgggt

SEQ ID NO: 39037 - protein, 189 aa, Zea mays subsp. mays
MYQPDGRHVSGAAYKWSAPQGYDFPQPAKPVFLLQESSPSSVMMFPQTRSKITHLEYEYSRHEDGRLDRTVPTQDMGRSNQTLSLWPHLVSGEAIEECTGTVNMHSPVSGAEHESNNESTVENGCKIFGISLAEKIRSCDEADSCSAKCNSRLQPLKSQMPKSLGSCLATVHEQRPVVGRVVDVSATDM

SEQ ID NO: 39038 - protein, 147 aa, Zea mays subsp. mays
MMFPQTRSKITHLEYEYSRHEDGRLDRTVPTQDMGRSNQTLSLWPHLVSGEAIEECTGTVNMHSPVSGAEHESNNESTVENGCKIFGISLAEKIRSCDEADSCSAKCNSRLQPLKSQMPKSLGSCLATVHEQRPVVGRVVDVSATDM

SEQ ID NO: 39039 - protein, 146 aa, Zea mays subsp. mays
MFPQTRSKITHLEYEYSRHEDGRLDRTVPTQDMGRSNQTLSLWPHLVSGEAIEECTGTVNMHSPVSGAEHESNNESTVENGCKIFGISLAEKIRSCDEADSCSAKCNSRLQPLKSQMPKSLGSCLATVHEQRPVVGRVVDVSATDM

SEQ ID NO: 39040 - DNA, 1024 bp, Zea mays subsp. mays
aatcgaaggaacaatgaaggcagtaacattgagatgtccagtgtgcaaaatattgctaatgaagaaaagtctagcgaacctttcaattttgagagcttgtaccccctaacacgacttccaaaggagggagatctgattgcctaccgattggttgagctgtcttccatgttgtgtccggagctctcttcgtaccgtgtgggaaaagttctggtatatgatcccgtatcattgcgtatcattctcgtacccgttcaagagtatccaatcaccaccgaggaaaaagaaaacaaggacgagtcagatatgcttgtggatttgtcaccgtacaaggaagatggctccttggagatcgagtactcttcacttgttgatgtaaggctactgaagggtatcgaaacatgcaacgaagttggatcagcaccggccggaaggccagttaccttgcacaaaaacgaaggcaatattgagagccagaaaccacccttggtgtcaaacaacactaaaggcgaagaacgcacactaggaaagtcagaaagtacggtctgggaaaaaaatggtgagcccagtgataaggttgatcttctgcaaaatggctgggcaacatggaaacaaaatgctagtacgtcagcttggtcttacagagccctcaggagcagcgcccttggcccgacgatggcaattctacgagggaagaacagccagagtaaaccacccaatcgaaagaacgccaagtgatgcctaagtatttaataacttcagtgatacctatgtaatccaaagttgatccgatcctttggagaaggccaagcaagtcgaggtagttggtcttatatatgtaactgcaattactgccctgcctattttgaaaattccaaagtggtgactgatgcaaagggaactttttagaccagtcaagactcattactatgtgatgccagcttatttaatgttgatgaaaattcactaaaattgatctttattgtacatcactcagatcttcagctttggaattgcttgatttatt

SEQ ID NO: 39041 - protein, 244 aa, Zea mays subsp. mays
NRRNNEGSNIEMSSVQNIANEEKSSEPFNFESLYPLTRLPKEGDLIAYRLVELSSMLCPELSSYRVGKVLVYDPVSLRIILVPVQEYPITTEEKENKDESDMLVDLSPYKEDGSLEIEYSSLVDVRLLKGIETCNEVGSAPAGRPVTLHKNEGNIESQKPPLVSNNTKGEERTLGKSESTVWEKNGEPSDKVDLLQNGWATWKQNASTSAWSYRALRSSALGPTMAILRGKNSQSKPPNRKNAK

SEQ ID NO: 39042 - protein, 233 aa, Zea mays subsp. mays
MSSVQNIANEEKSSEPFNFESLYPLTRLPKEGDLIAYRLVELSSMLCPELSSYRVGKVLVYDPVSLRIILVPVQEYPITTEEKENKDESDMLVDLSPYKEDGSLEIEYSSLVDVRLLKGIETCNEVGSAPAGRPVTLHKNEGNIESQKPPLVSNNTKGEERTLGKSESTVWEKNGEPSDKVDLLQNGWATWKQNASTSAWSYRALRSSALGPTMAILRGKNSQSKPPNRKNAK

SEQ ID NO: 39043 - protein, 189 aa, Zea mays subsp. mays
MLCPELSSYRVGKVLVYDPVSLRIILVPVQEYPITTEEKENKDESDMLVDLSPYKEDGSLEIEYSSLVDVRLLKGIETCNEVGSAPAGRPVTLHKNEGNIESQKPPLVSNNTKGEERTLGKSESTVWEKNGEPSDKVDLLQNGWATWKQNASTSAWSYRALRSSALGPTMAILRGKNSQSKPPNRKNAK

SEQ ID NO: 39044 - DNA, 1152 bp, Zea mays subsp. mays
catgcaatcttggggatgtgtgccgcttttctcattcatcccttgctcctaaaccagtatgcaagttctatctcacactacagggttgtcgaaatggcagatcttgtccatactctcatgattctggctcattggtctctgcacctgtcacatctggaatatgctctcaggaaagcagaggcacctcattgtgcgatacaaggttgcttcctgctgatggagatgggcatattcttgtcgtgaatgacaaaaccctgcagttctctagtaagcttagccagttttacgatgccggtaagattgttgcttctacacctggtcttcagtctgctgagtcttattcagttccaaagggcctcaagatactcgagaatttggccgatccatctagtctaatcactgggcttgagcatgaattgccagttccttgggcaaaacttaagcgagttttctggttcgatggctttggtaacgatgagtcagccaccgagcaggctctcttgcagaagttcttcgcgagtattgccatcaagattttgtcggaacagctgtccggcctgcaggtcatcctgatcatgaaaaacacgagatacattcagttgcaggtggaaagattggcgcgggagtgcttctttttcctcagcgaatcgtttctgtgtgatgaagcaaatctaggatggttctcagatacctccacgcacacaagaaggatgcaagtggcagcaccggtgacctatgtcttcaacttgcaccctccctcctctactcagtttggggattatccggcggaacttcgggaggctttacgcagggattagttaggccaggttatccacgtgaatagctagtgtcatctggatttcgtagcagtgaaccttgttcgtggtattggcactgaagccctttctgtctgtgagttgtgagcttgcttactcgttcttagtaagacgctgaggaatattgcataactccattcaggtgtcaactgtcggtcgtctcatggacagcttattaggccgctgcttgcaaatatcatttgtgggtgggcgtaaatatgcttgacctggtaagttaacgtacgtttgagtgcttttgttgactgcgaaattgtaccttcacgatgtcatctattgtatgcagacgaaagcattc

SEQ ID NO: 39045 - protein, 271 aa, Zea mays subsp. mays
CNLGDVCRFSHSSLAPKPVCKFYLTLQGCRNGRSCPYSHDSGSLVSAPVTSGICSQESRGTSLCDTRLLPADGDGHILVVNDKTLQFSSKLSQFYDAGKIVASTPGLQSAESYSVPKGLKILENLADPSSLITGLEHELPVPWAKLKRVFWFDGFGNDESATEQALLQKFFASIAIKILSEQLSGLQVILIMKNTRYIQLQVERLARECFFFLSESFLCDEANLGWFSDTSTHTRRMQVAAPVTYVFNLHPPSSTQFGDYPAELREALRRD

SEQ ID NO: 39046 - DNA, 975 bp, Zea mays subsp. mays
ataaaggggcattggcttgggatcacctctgcatctcgcctgggatctgctagcttgatctctcctagtcctagcccattcgcttctcctgttcgtcgctcttaatttgcttgctcgatccctggcagtggcagctgctgcaatggcttccggtggcgcgtcgtcactggccttggccgcgctgctcctcgtgagctgcgcctcggcggcggtggcgaccaagtacaccgtcggggacgcgtccggctggacgaccaccggcgactacgccacctgggccagcggcaagaagttcaaagtcggcgacagtctcgagttcaaatacgccggcggggcgcacacggtggacgaggtgagcgcggcggactacgccgcctgctcctccagcaacgcgctcagcaccgacagcgccggcgccacgaccgtgaccctcaagacggccggcaagcactacttcatctgcggcgtggcgggccattgcagcagcggcatgaagctcgcggtggacgtggccaaggcggtgaccgccccggcgccggccccagccgcggccccggccccggccgcggacacagccccagatgcccccgacaccacgccgtcgaccccgacgtccccctcgagctccggcggccgcacgcccaagagcccagacacgacggtcctgtcgccgccggacaagaagtccacctcctccggcgccaccgggctcagcgccgcggcgtgggccggcttgggcctggccgggctcgtggccgtgcacctcggcgcgttctaggccagcccgctggcctggccagggaggagacagtgccgtgtgttgttgttaggctgcacgtcatggattggattggtgtattggttgagggacttgactgcttaccagagagagatctcttttggttcagggaactgtgctgtagacctgtagttggataccttggatgttatgctatcagttttgctgttgttatc

SEQ ID NO: 39047 - protein, 211 aa, Zea mays subsp. mays
MASGGASSLALAALLLVSCASAAVATKYTVGDASGWTTTGDYATWASGKKFKVGDSLEFKYAGGAHTVDEVSAADYAACSSSNALSTDSAGATTVTLKTAGKHYFICGVAGHCSSGMKLAVDVAKAVTAPAPAPAAAPAPAADTAPDAPDTTPSTPTSPSSSGGRTPKSPDTTVLSPPDKKSTSSGATGLSAAAWAGLGLAGLVAVHLGAF

SEQ ID NO: 39048 - DNA, 598 bp, Zea mays subsp. mays
gagcagcggccacgcattctcccttccctggactattcttggtgggtggagagagccgcagaaggcagctggaagaggagaggaccgcgcgaggctccgtgccggcgagttcgggtgcttttcctgcggtccgagatgcgatcgttgggacccgggagacagcgcagctcgggttcgggttcgggggggcggtagccacctgagcaggatgtttaactggaacgacgagcagcaccaggtcgaagcacataagaggccagtgtggtcacgtagaaaaccagaggaaagaggtaaaagtaaaatatccagcagtacaagtggcttctcccacagcaaagtagagagttcatcgacgaatttgcaaactcctatggaacctgtacagactcctcaatatgcactgttccaggatagcaaattcgtcgatgaactctctaccttgttgctggcaaagcgtagttctgtacctcctctatcgttgtcctaccactctaggtctatcccttgatctaggtttctatggtctgaagatttgtgattttctccgcactgttgttgctatccccgtgtcgtaataatacgatgttttaagcggttg

SEQ ID NO: 39049 - protein, 168 aa, Zea mays subsp. mays
SSGHAFSLPWTILGGWREPQKAAGRGEDRARLRAGEFGCFSCGPRCDRWDPGDSAARVRVRGGGSHLSRMFNWNDEQHQVEAHKRPVWSRRKPEERGKSKISSSTSGFSHSKVESSSTNLQTPMEPVQTPQYALFQDSKFVDELSTLLLAKRSSVPPLSLSYHSRSIP

SEQ ID NO: 39050 - protein, 99 aa, Zea mays subsp. mays
MFNWNDEQHQVEAHKRPVWSRRKPEERGKSKISSSTSGFSHSKVESSSTNLQTPMEPVQTPQYALFQDSKFVDELSTLLLAKRSSVPPLSLSYHSRSIP

SEQ ID NO: 39051 - DNA, 934 bp, Zea mays subsp. mays
agagaatacaggggagaagccgagagccgaacgaagagaccgagcccccgccgcccgcggcgtctgttcctttcgtgccgcttcgtggtggcgccgtggcgcccaccaccacctcacctctcagtctctcaccacctatagcaataccacgagtccacgatccatggaatagactagactacaccgctcggccggtgacgacgacggcgacagccgacagtctatccccaactacgctctgcaccagcgccttatccgccgcctggggtttgttctggcgcggtggcagttgataaaggcgggagggattagagcaaggagagggatcggcgatgagcttcgcggatctggaggcgggggctctcagggcgcccctcgggaggaaagcgagaggggggccaaacgacgcgagagcgctcgtcttccagataaccaccgcggtggcctcgtaccgccgcctcctcaactcgctcggcacgcccaaggacaccatcacgcttcgtgataacctgcataagactagtcagaacatccttcaattagcaaaggatgcgaaagataagctccaaaaggctgctgaagcagacaagagcactgatacaagtgcagacaagaggatagctgatatgaagcttgccaaagattttgctgccacaatggaggagttcaggaaacttcagagtcttgcgattcagagggagacggcatataagccagttgttccacagaatacgcagtcaaactattctacagatgagcgaagttccgaatctggtaatatgcctgagcagcgtgcattactcgctgaatcaatgagacaagaggtgctgcaattggacaatgaaattgtttacaatgaagctataattgaggaaagggagcaagccattcaagatatccaacagcagattggtgaagtacatgaagtgttcaa

SEQ ID NO: 39052 - protein, 200 aa, Zea mays subsp. mays
MSFADLEAGALRAPLGRKARGGPNDARALVFQITTAVASYRRLLNSLGTPKDTITLRDNLHKTSQNILQLAKDAKDKLQKAAEADKSTDTSADKRIADMKLAKDFAATMEEFRKLQSLAIQRETAYKPVVPQNTQSNYSTDERSSESGNMPEQRALLAESMRQEVLQLDNEIVYNEAIIEEREQAIQDIQQQIGEVHEVF

SEQ ID NO: 39053 - protein, 102 aa, Zea mays subsp. mays
MKLAKDFAATMEEFRKLQSLAIQRETAYKPVVPQNTQSNYSTDERSSESGNMPEQRALLAESMRQEVLQLDNEIVYNEAIIEEREQAIQDIQQQIGEVHEVF

SEQ ID NO: 39054 - DNA, 936 bp, Zea mays subsp. mays
cacctgtgaaagcgagcacacgcaacgcagctacgcaagcaagcctgttctctgtcgattgaggccgctacacggcggcaatggagggaagaagggcggccgtgtcgttggtggcagcagtgtcgctgctgctggcgtgctcgcgatccccattcccggtcgtcgccgctgatgagggcgagccggcggtgggggccccggacacgaaccagctgtgcgtgagcaagtgcgggacgtgcccgacgatctgcacggcgtcgccgccgacgatcctgccgatgacagcgccgccgccgccggcccttgcgctgctgccgctgtcgcccccgccgccctacctccagctggtgctgccgccgccgccgcctggggacgtgtacgacctgctgcctccggtgacgcctctcacgagcccgccggagtccccctgcacgaccccgccttcgtcctcatcgtcgtcgacggagcctccgccgtcgccgccctcctcctccccgccgccgccgaagagcggcggcgacggtggcagtggctcgtcctcgcacttctcgtccccgccgtcgtcgtcaaacccgtactactacctgtacctctccggcggcgccagggcccgcggcggcgcgtccagcagcgcttgcgcggcgctcgtcctcgccgcgttcctgcccgccgtcgccctcttcaagtgacgcgcgctctgttggttactagttactactgccatccatcagtcggctactgtccagaccggccggcgttaagactaggacatgcattacgtactctcttcgttttggcatccgattcgatgatgatctgtcgacctttccgatgccagatgattgatcgatgcagacagtacgtagttgtgtttacattttgttcattgtaccttaatgattttgtaaagtggattctgatgatggtttattgtgt

SEQ ID NO: 39055 - protein, 202 aa, Zea mays subsp. mays
MEGRRAAVSLVAAVSLLLACSRSPFPVVAADEGEPAVGAPDTNQLCVSKCGTCPTICTASPPTILPMTAPPPPALALLPLSPPPPYLQLVLPPPPPGDVYDLLPPVTPLTSPPESPCTTPPSSSSSSTEPPPSPPSSSPPPPKSGGDGGSGSSSHFSSPPSSSNPYYYLYLSGGARARGGASSSACAALVLAAFLPAVALFK

SEQ ID NO: 39056 - protein, 136 aa, Zea mays subsp. mays
MTAPPPPALALLPLSPPPPYLQLVLPPPPPGDVYDLLPPVTPLTSPPESPCTTPPSSSSSSTEPPPSPPSSSPPPPKSGGDGGSGSSSHFSSPPSSSNPYYYLYLSGGARARGGASSSACAALVLAAFLPAVALFK

SEQ ID NO: 39057 - DNA, 825 bp, Zea mays subsp. mays
aatcttatcctcttctcattctcctttctccctcttgtgtcttccaccaggaacaagccgccgccgcacgcctccgcttgctcccacccgcgcccgccggtgcacccgccccggccccgcccgtcgcggctgcccccaccccgcccgcccctaccaccggcgcggccgcctccggccccggccccaaacgctgcacccaacagccccagccgtcccactcccagggtccatctcagtcgccgtcgcagaccacgcagcaggcgtcaccccagcagcagcaggtggcggcggtggcagcggcataggcacaagcacagacccaggcggcatgggtacgaagccccgagatggagatggcgctgcaggacgccatgcgggtctgcaatccggacgtcaatacgcccttccagtccatcgaggacgctgtcaacaggctgcatatggcgaggcgatgtctagtcagcacggaccatactatgactagaggacctcacctattgatccccaggctgtgtatgcaagtggtgggaaaagctcatggaaggtacacaatgtttgctaacgtcatcgacttgagccaggtgagggttcagcgtggaggtttgtcgaggtctgctgctagtagctcccgtcgctccactcaagatccagcaaaagtggagcaactgcgcgaagaacttaggcgaaatcctcttcgctagtggaggtatcgaccatcactcgtcactgtaacccgatggtgatcgacgaccatgagcttccatgttattgtgttctgatacttgagaattttattatgagtatgatgatgagatgtgtcttatc

SEQ ID NO: 39058 - protein, 160 aa, Zea mays subsp. mays
ILSSSHSPFSLLCLPPGTSRRRTPPLAPTRARRCTRPGPARRGCPHPARPYHRRGRLRPRPQTLHPTAPAVPLPGSISVAVADHAAGVTPAAAGGGGGSGIGTSTDPGGMGTKPRDGDGAAGRHAGLQSGRQYALPVHRGRCQQAAYGEAMSSQHGPYYD

SEQ ID NO: 39059 - protein, 152 aa, Zea mays subsp. mays
NLILFSFSFLPLVSSTRNKPPPHASACSHPRPPVHPPRPRPSRLPPPRPPLPPARPPPAPAPNAAPNSPSRPTPRVHLSRRRRPRSRRHPSSSRWRRWQRHRHKHRPRRHGYEAPRWRWRCRTPCGSAIRTSIRPSSPSRTLSTGCIWRGDV

SEQ ID NO: 39060 - protein, 117 aa, Zea mays subsp. mays
MEMALQDAMRVCNPDVNTPFQSIEDAVNRLHMARRCLVSTDHTMTRGPHLLIPRLCMQVVGKAHGRYTMFANVIDLSQVRVQRGGLSRSAASSSRRSTQDPAKVEQLREELRRNPLR

SEQ ID NO: 39061 - DNA, 580 bp, Zea mays subsp. mays
agagcgagactgcgagagacagcgcgaaggtagagagagtgtgtggaacagtggaagcagcagcaaacgcgaccatggcgggtggcgccggcgggcgggacccgctcgtcgcctccgagatccacggcttcctcacctgcgcagacttgaactttgacaagctgatgatggaggctgggacacgctggttccggccgaatgagatctatgcggtgctggcgaactatgcaaggttcaaggtccatgctcagcccatcgacaaaccaattagtggtactgttgttctatatgatcgtaaagttgtccggaacttccgtaaagatggccataactggaagaaaaagaaagatggcaagactgtccaagaagcccatgaaaaactaaagattggtaatgaagaaaaggttcatgtgtattatgctcgaggagaggatgatccaaatttctttcgcagatgctactggctactttggacaccaaattcttaacctaggtcttgtttgggtgcacacacgtatctagttcaatttacttgtattgaggttcattgaagtggaaaatcaactagttttcccccttc

SEQ ID NO: 39062 - protein, 161 aa, Zea mays subsp. mays
SETARDSAKVERVCGTVEAAANATMAGGAGGRDPLVASEIHGFLTCADLNFDKLMMEAGTRWFRPNEIYAVLANYARFKVHAQPIDKPISGTVVLYDRKVVRNFRKDGHNWKKKKDGKTVQEAHEKLKIGNEEKVHVYYARGEDDPNFFRRCYWLLWTPNS

SEQ ID NO: 39063 - protein, 137 aa, Zea mays subsp. mays
MAGGAGGRDPLVASEIHGFLTCADLNFDKLMMEAGTRWFRPNEIYAVLANYARFKVHAQPIDKPISGTVVLYDRKVVRNFRKDGHNWKKKKDGKTVQEAHEKLKIGNEEKVHVYYARGEDDPNFFRRCYWLLWTPNS

SEQ ID NO: 39064 - protein, 107 aa, Zea mays subsp. mays
MMEAGTRWFRPNEIYAVLANYARFKVHAQPIDKPISGTVVLYDRKVVRNFRKDGHNWKKKKDGKTVQEAHEKLKIGNEEKVHVYYARGEDDPNFFRRCYWLLWTPNS

SEQ ID NO: 39065 - DNA, 977 bp, Zea mays subsp. mays
caaacactttgccgcaccgcgaccactccgcttggcgcccggcgccagccagccagccatgttcacggacggcatgtcgaggctggcggtggcggtgagcgtcacggtggccctcagcctggccatcttcctcaccatcctggcgctcctcctcgcggacctaatctgcgcgcacctccggcgccggcggctccgcgccgaggcgccccggtcgaagctgggcctcggcctgtcgctggcggcttcgtcaccggcgcgcgccgacggcgcgtcgtcgtcggccacgacggcgctcgccggtacgccgccctcctactacgcgcacggcgtcctgcacgcgccctgcaccaaggacctcctcctcgccatccccaggctggagggcgccgtgtggcggtggtcgccgccgacgccgtcgtcgggctcgtcggggggcggctcctcggcgggcggcgacgggttcatgtgcatctccaacccggtgtacgaccgggccgcggccgcccccggcggggacacgccgctcgggatcacggaggaggcggacgcgtacgggtacggcgaggaggacgcccgcgggttctcgccgccgctgtcggcgatgaggaagctaccgccgctgggtgtcctggccgcgtaccccccaccgccgcggccgagcttcaccgatgccatgccgacaatggcagcaccggtgaccgacaccaaccgggcctcctcctcttcgtccgcctactttttctcttcgtggtcgtccaagtaagagatcacctgtgacgtacgcggattgtagtgagatggaggtggtcagcagcttcgatttcattcattattttggccgttttttcctcgttctgtcatatcattgtcatctacggagtacggagtagtaccatcgcctcggtcctgctagctcctcctgcacactccatgtcctacgactacgataaccgaagcttttgcttggtgttttatcc

SEQ ID NO: 39066 - protein, 258 aa, Zea mays subsp. mays
QTLCRTATTPLGARRQPASHVHGRHVEAGGGGERHGGPQPGHLPHHPGAPPRGPNLRAPPAPAAPRRGAPVEAGPRPVAGGFVTGARRRRVVVGHDGARRYAALLLRARRPARALHQGPPPRHPQAGGRRVAVVAADAVVGLVGGRLLGGRRRVHVHLQPGVRPGRGRPRRGHAARDHGGGGRVRVRRGGRPRVLAAAVGDEEATAAGCPGRVPPTAAAELHRCHADNGSTGDRHQPGLLLFVRLLFLFVVVQVRDHL

SEQ ID NO: 39067 - protein, 253 aa, Zea mays subsp. mays
KHFAAPRPLRLAPGASQPAMFTDGMSRLAVAVSVTVALSLAIFLTILALLLADLICAHLRRRRLRAEAPRSKLGLGLSLAASSPARADGASSSATTALAGTPPSYYAHGVLHAPCTKDLLLAIPRLEGAVWRWSPPTPSSGSSGGGSSAGGDGFMCISNPVYDRAAAAPGGDTPLGITEEADAYGYGEEDARGFSPPLSAMRKLPPLGVLAAYPPPPRPSFTDAMPTMAAPVTDTNRASSSSSAYFFSSWSSK

SEQ ID NO: 39068 - protein, 234 aa, Zea mays subsp. mays
MFTDGMSRLAVAVSVTVALSLAIFLTILALLLADLICAHLRRRRLRAEAPRSKLGLGLSLAASSPARADGASSSATTALAGTPPSYYAHGVLHAPCTKDLLLAIPRLEGAVWRWSPPTPSSGSSGGGSSAGGDGFMCISNPVYDRAAAAPGGDTPLGITEEADAYGYGEEDARGFSPPLSAMRKLPPLGVLAAYPPPPRPSFTDAMPTMAAPVTDTNRASSSSSAYFFSSWSSK

SEQ ID NO: 39069 - DNA, 1123 bp, Zea mays subsp. mays
aacaattaggcccgactagcacaacaagcggcacgcacggcgttaacctccccagcgtgaaataattgctacctatttctctcgccggcgacgagcctccgcggaaaccagtgccaagccagagagtgcttctttctccgccagactgctgctccgcgcgagaagagccaccacggagtctgcgtgactcgggacagtggagaaaatcagcggcacagcgtgggtctcgcgacctccagcgaacgagatccctaagtttcgatccactgtcccagtggatttgggactgcgatggaggagcagttcatcctccgcgtgccgccatccgtcgcagagcggatcgagcgcctcatgaatgaatccgccgcctcctcctccaaccccgacgaggcctccctggacctctccttctcagaggatggaagaaatggcacatttatgatcggtaatgagagctttcctgcatctctcttggatctacctgctgtggtggagtcatacaaaacatatgatgattctgtactaattaaaactgctgatgttggtcagatgattatggtaagagaagaaaatgatcctgctccagaaggagtcgagtacaagcatgggcttactcctccaatgagggatgcacgcaggcgacgtttccgcagagaaccagacttgaacgcagagctggttaaccaagttgagaagcatcttatcagtatcatgcatggagtatctgtcaaccagaacgccagtgcgacaggaggcgaataaggtggtgatcgtaagaaacctccagtagctcgtgcagcaaagcagcctggggttcaggagcccgccgcgaatggagaggaagctgatcctgagaggagcgacagtgatgattcagataactgaaatggaggacctggactgggtgcagcctcagtggtccaggcgagccatgccaaacttcgcaatttgaataaatcagaatgtatatatttgtaacaaacaatgtgtttgttgttcgctgaagcatgtactgtcacggtaaacatgatgtgacgctataatgccaaacaagatgatgttactgcatgtactagcaaaatagttataaataacaactgctaagtagcattttattggatct

SEQ ID NO: 39070 - protein, 156 aa, Zea mays subsp. mays
MEEQFILRVPPSVAERIERLMNESAASSSNPDEASLDLSFSEDGRNGTFMIGNESFPASLLDLPAVVESYKTYDDSVLIKTADVGQMIMVREENDPAPEGVEYKHGLTPPMRDARRRRFRREPDLNAELVNQVEKHLISIMHGVSVNQNASATGGE

SEQ ID NO: 39071 - protein, 136 aa, Zea mays subsp. mays
MNESAASSSNPDEASLDLSFSEDGRNGTFMIGNESFPASLLDLPAVVESYKTYDDSVLIKTADVGQMIMVREENDPAPEGVEYKHGLTPPMRDARRRRFRREPDLNAELVNQVEKHLISIMHGVSVNQNASATGGE

SEQ ID NO: 39072 - protein, 107 aa, Zea mays subsp. mays
MIGNESFPASLLDLPAVVESYKTYDDSVLIKTADVGQMIMVREENDPAPEGVEYKHGLTPPMRDARRRRFRREPDLNAELVNQVEKHLISIMHGVSVNQNASATGGE

SEQ ID NO: 39073 - DNA, 671 bp, Zea mays subsp. mays
acgttgcttgctcccaagatcaagcgcctcccgcctccagcactctaactcaggggacacgatcgccatggccgccacatcgaccgccgccgccgtgctgtccccgccgtccgtggccgggctccgcctggcgccgtctcccggccgggcgcgcgtgtcgttccgcgcggcgccggcgccggcgcggcggtccgtggcggcgcgcgcggagctgagctcggcgctggtgatcagcctgagcacgggcgtgtcgctcttcctgggccgcttcgtcttcttcaacttccagcgggagaacgtggcgaagcaggtgcccgcgcagaacggcaagacgcacttcgacgccggcgacgagcgcgccaaggagttcgcggccctgctcaagtccaacgaccccgtgggcttcaacctcgtcgacgtcctcgcctggggctcgctcggccacatcgtcgcctactacatcctcgccacctccagcaacggatacgaccccaacttcttctgagcggtcgtcgaggatgtattctacagacagccgtgtgcgtgcgtgtgtgcttgtcatgtatccgatcaaagtttggttaatttggacaagtagtgcaactgcagaataattggtatttgtatagtgcaccatgccaacatgaatttgatctgtctctgtcttcact

SEQ ID NO: 39074 - protein, 167 aa, Zea mays subsp. mays
RCLLPRSSASRLQHSNSGDTIAMAATSTAAAVLSPPSVAGLRLAPSPGRARVSFRAAPAPARRSVAARAELSSALVISLSTGVSLFLGRFVFFNFQRENVAKQVPAQNGKTHFDAGDERAKEFAALLKSNDPVGFNLVDVLAWGSLGHIVAYYILATSSNGYDPNFF

SEQ ID NO: 39075 - protein, 145 aa, Zea mays subsp. mays
MAATSTAAAVLSPPSVAGLRLAPSPGRARVSFRAAPAPARRSVAARAELSSALVISLSTGVSLFLGRFVFFNFQRENVAKQVPAQNGKTHFDAGDERAKEFAALLKSNDPVGFNLVDVLAWGSLGHIVAYYILATSSNGYDPNFF

SEQ ID NO: 39076 - DNA, 832 bp, Zea mays subsp. mays
atgttgctccagacacatctaaatcacatcactccattccatctgaggaagtaaatgccatgaggggagacctcatgctgtggcctccagttgttgtgatacataacagctcgactggtcatgaggcaaaggatactgatgcaaagattgtgtccatagaagaaatcgaaggtgtattggcagatattggggtagcgcatgagaaggctagggttagccatggaagatcagccaatcagagcgtgttcctggtgaagttccagccaacaatatctgggttccaagaagccatgagagtgcatacccatttctccaccagaaaccatggcaaggaagagttccagctgatgaaaggcagcaaaggtaagaaggctgcctccactgatagcctggaagagctgctgtatgcgcatattggggtcgtggaagacctggggctgctggatgagggaacaaagaagagatgcaaggtcatgaggaagaaggaaattgaggcaaatgcagaggcaacactgaatttagaagtttattaggtctagtactaggatccgaaccatttgaagtggtcctcttttgcttcatcttgcagctgcttgcttgtccttgcggctgtaacgtcaaaagaagaaaagaagtgtaaattctgcttttgccattaaagagtgacgaaactcagttggcttctgtctgctggggaaggcctgcctcggtttgcatggcatggcaaggacataattttgtggctagatggggacaccttaacggcaaaagcagaattacctggtcgaagaaccgagtttaatctttatattatggaatcccttcttttttt

SEQ ID NO: 39077 - protein, 176 aa, Zea mays subsp. mays
VAPDTSKSHHSIPSEEVNAMRGDLMLWPPVVVIHNSSTGHEAKDTDAKIVSIEEIEGVLADIGVAHEKARVSHGRSANQSVFLVKFQPTISGFQEAMRVHTHFSTRNHGKEEFQLMKGSKGKKAASTDSLEELLYAHIGVVEDLGLLDEGTKKRCKVMRKKEIEANAEATLNLEVY

SEQ ID NO: 39078 - protein, 157 aa, Zea mays subsp. mays
MRGDLMLWPPVVVIHNSSTGHEAKDTDAKIVSIEEIEGVLADIGVAHEKARVSHGRSANQSVFLVKFQPTISGFQEAMRVHTHFSTRNHGKEEFQLMKGSKGKKAASTDSLEELLYAHIGVVEDLGLLDEGTKKRCKVMRKKEIEANAEATLNLEVY

SEQ ID NO: 39079 - protein, 152 aa, Zea mays subsp. mays
MLWPPVVVIHNSSTGHEAKDTDAKIVSIEEIEGVLADIGVAHEKARVSHGRSANQSVFLVKFQPTISGFQEAMRVHTHFSTRNHGKEEFQLMKGSKGKKAASTDSLEELLYAHIGVVEDLGLLDEGTKKRCKVMRKKEIEANAEATLNLEVY

SEQ ID NO: 39080 - DNA, 590 bp, Zea mays subsp. mays
acgatatttctcactccattccaccattacagggggggcgagcgggaccggtccaggcacgcgcacgccgcacccgttcgaaagacgaccgcatcggcgtcggcgatgatgcgatcgggcgcgcgcggcggcgacgcggaggaagaggtggaccggaagccggtgatcaagcctggcgtccacgtgacgctcaaggtgcaggacacggcggggcgcacggtggttttcaccgtgcggaggacccaggagctgcaggcgctcatggacgcctactacgccagcgtgccggacgtcgcgtacggcacgggaaggttcctgtacgacggcgggcggctgacgggggcgcacacgcctgcggagctcgggatggaggaacaggacgagatcgacttcttcaccgagctgttgggtggcggccgacatgctgctgctgaacctggacgcccggtggtcgcgtaactccctgctcatcgtcgtatgacttagctttgcgcgggcctgggaggaaggagcacactgctcgctgctcatatcgttgtgcgcgcttgcttttgatgaatctgatgaagttattatgcatcgttacattt

SEQ ID NO: 39081 - protein, 152 aa, Zea mays subsp. mays
TIFLTPFHHYRGGERDRSRHAHAAPVRKTTASASAMMRSGARGGDAEEEVDRKPVIKPGVHVTLKVQDTAGRTVVFTVRRTQELQALMDAYYASVPDVAYGTGRFLYDGGRLTGAHTPAELGMEEQDEIDFFTELLGGGRHAAAEPGRPVVA

SEQ ID NO: 39082 - protein, 143 aa, Zea mays subsp. mays
DISHSIPPLQGGRAGPVQARARRTRSKDDRIGVGDDAIGRARRRRGGRGGPEAGDQAWRPRDAQGAGHGGAHGGFHRAEDPGAAGAHGRLLRQRAGRRVRHGKVPVRRRAADGGAHACGARDGGTGRDRLLHRAVGWRPTCCC

SEQ ID NO: 39083 - protein, 117 aa, Zea mays subsp. mays
MMRSGARGGDAEEEVDRKPVIKPGVHVTLKVQDTAGRTVVFTVRRTQELQALMDAYYASVPDVAYGTGRFLYDGGRLTGAHTPAELGMEEQDEIDFFTELLGGGRHAAAEPGRPVVA

SEQ ID NO: 39084 - DNA, 1042 bp, Zea mays subsp. mays
agtggatcaacagactatgaaggagattatgcagaagaggattcacagatgatgaggcagaagcgctcacatcggcctgaacttggggaaccggttgttttgcggtgccaaccatacaagtttcctctcgctgagctcctcctaccattagagtgttctccagttgagtatttccggctatggcctagcctaccagccatggtggagtgcactggcacatacacatatgaaggcagtggtttcaaggccaccgctgctcagcagtatgacagctctcccttcctcagtggattgaagtcgatttcttctaagcccttccatcaagtctgctcacatttcatccggacagtagctggattccagttatgttatgcagcaaagacatggtttggtggatttgtgggcatgatgatatttggggcaagtgaagtcagccggaatgttgatttgggtgatgagaccaccacaatgatctgcaaattcgtcatgcgcgcatccgatgaatccatcacgagagagatcaaatccgacctccagggctggctggatgatatcaccgacggcgctgtggaatacatgcctgaggatgaggtgaagagtgtggccgccgagcagctgaagatctccatggagaggattgccctgctcaaggcagccaggccaaaggtcccacccgcaaagaccgatcaagaggaggaagaggagcgaaagcagagcgaggaactagatgggtttggaaaccccaagggcccctcgacgctctccaagctcaccgcggaggaggctgagcaccgcgctctccaggctgccgtgcttcaggagtggcaccagctatgcaaagagagagccatgaaagcgcagtgaggtcgatttggaccgtgtggatcttacgcgcatgtataattttgtatttttccttcgtctcccattctttgcgtgtctatactgctggtttcactcactgtataccgtcgccgatttgttcattgtattctcaaatacttgtgcacgaaaaaacctgttttgtaacatactactgttg

SEQ ID NO: 39085 - protein, 287 aa, Zea mays subsp. mays
SGSTDYEGDYAEEDSQMMRQKRSHRPELGEPVVLRCQPYKFPLAELLLPLECSPVEYFRLWPSLPAMVECTGTYTYEGSGFKATAAQQYDSSPFLSGLKSISSKPFHQVCSHFIRTVAGFQLCYAAKTWFGGFVGMMIFGASEVSRNVDLGDETTTMICKFVMRASDESITREIKSDLQGWLDDITDGAVEYMPEDEVKSVAAEQLKISMERIALLKAARPKVPPAKTDQEEEEERKQSEELDGFGNPKGPSTLSKLTAEEAEHRALQAAVLQEWHQLCKERAMKAQ

SEQ ID NO: 39086 - protein, 271 aa, Zea mays subsp. mays
MMRQKRSHRPELGEPVVLRCQPYKFPLAELLLPLECSPVEYFRLWPSLPAMVECTGTYTYEGSGFKATAAQQYDSSPFLSGLKSISSKPFHQVCSHFIRTVAGFQLCYAAKTWFGGFVGMMIFGASEVSRNVDLGDETTTMICKFVMRASDESITREIKSDLQGWLDDITDGAVEYMPEDEVKSVAAEQLKISMERIALLKAARPKVPPAKTDQEEEEERKQSEELDGFGNPKGPSTLSKLTAEEAEHRALQAAVLQEWHQLCKERAMKAQ

SEQ ID NO: 39087 - protein, 270 aa, Zea mays subsp. mays
MRQKRSHRPELGEPVVLRCQPYKFPLAELLLPLECSPVEYFRLWPSLPAMVECTGTYTYEGSGFKATAAQQYDSSPFLSGLKSISSKPFHQVCSHFIRTVAGFQLCYAAKTWFGGFVGMMIFGASEVSRNVDLGDETTTMICKFVMRASDESITREIKSDLQGWLDDITDGAVEYMPEDEVKSVAAEQLKISMERIALLKAARPKVPPAKTDQEEEEERKQSEELDGFGNPKGPSTLSKLTAEEAEHRALQAAVLQEWHQLCKERAMKAQ

SEQ ID NO: 39088 - DNA, 1115 bp, Zea mays subsp. mays
aactcctcgctatcctcttccaatccgaaccacccggactcccggagcaagcggccgccggctaagcagacacgaacgcaggtccggcggcaatgcaacgcgccgcgctcgtcgggtcccctctcgtacccgcgggtccccttgctcagcttgccgtgcggcgccgctgccgcttccatggtggtgttcgcgtgaggtcctcaaccgggaaggacgggaccgggaccgggggcggaagcgagggcggcgagggcgccggtgccgcagcgtcttggctgagctcggcggtcggggagaaagtggacgagcttctgcgccgcgaagagaaccgggccctgctcgagggcgtcgaggacgccgagcgccgcgttgagcgcgcgcgcgccgcgctcgccgacatcgagcgccaggaggccgccgcacgcctcgcccgcgaggaggtccgccgcctcgagaagcggcgcgatgagattgcagagtcccagcgggaattgcttcaagcaagagaaatgattgatgaagctcagcgatccctgtcttctagtcttgaggaaggaagctttggagatatgtcaagtggtgatgttgatgaagataacgagagaatagaatccgtaaaagctgctgcagtttcctctgtcgtcggtgttctggctagtttgcccatatctttctatgaagttgaagatcttccacaactattccttcggtcatcaattgttttcataagttgtgctttgtttggagtcacattccggtatgctgttagaagagatctggataatatccaactaaaaactggggctcctgctgcatttgcttttgttagaggccttgctctgctggaatctggtagaaccctcgagctgagtaatgataccttagtatcagttactcttgatgctgcagtcagtgtggttgagaacattttcatatttctgcctgctgctgttgcactggactactgttttaagatgagatttttgagtccctttcctagaagaaaacaatagcttctgtgaagaatatgtatgatcaatagcaatcttgatagctcaaatggtcatatgtaacacaagtgatatcttagattcattaaaaaaacatttcccccc

SEQ ID NO: 39089 - protein, 306 aa, Zea mays subsp. mays
MQRAALVGSPLVPAGPLAQLAVRRRCRFHGGVRVRSSTGKDGTGTGGGSEGGEGAGAAASWLSSAVGEKVDELLRREENRALLEGVEDAERRVERARAALADIERQEAAARLAREEVRRLEKRRDEIAESQRELLQAREMIDEAQRSLSSSLEEGSFGDMSSGDVDEDNERIESVKAAAVSSVVGVLASLPISFYEVEDLPQLFLRSSIVFISCALFGVTFRYAVRRDLDNIQLKTGAPAAFAFVRGLALLESGRTLELSNDTLVSVTLDAAVSVVENIFIFLPAAVALDYCFKMRFLSPFPRRKQ

SEQ ID NO: 39090 - protein, 167 aa, Zea mays subsp. mays
MIDEAQRSLSSSLEEGSFGDMSSGDVDEDNERIESVKAAAVSSVVGVLASLPISFYEVEDLPQLFLRSSIVFISCALFGVTFRYAVRRDLDNIQLKTGAPAAFAFVRGLALLESGRTLELSNDTLVSVTLDAAVSVVENIFIFLPAAVALDYCFKMRFLSPFPRRKQ

SEQ ID NO: 39091 - DNA, 938 bp, Zea mays subsp. mays
aatatcaatagaagtgacaactccatctctggtctcccagactcccacgcctataatctcattcccctccttcaaagccctctggcgatcgagattcttccccctccgtctccagatatggcaaacaaaaggattcagaaggaactcatggatctgcaaaaggacccaccgacatcatgcagtgcagggccagctggagaggatctattccactggcaggccacaatcatgggtcctagcgacagcccctatgcaggaggggttttctttgttaatatccattttcctcctgactacccgtttaagcctccaaaagtgaacttccaaacaaaagtttatcacccgaacatcaactctaacgggagcatctgccttgatatcctcaaggagcagtggagccctgcactgaccatatcaaaggtcctcctctccatcagctcgcttctgactgaccccaacccagacgaccccctcgtccccgagatcgcccacatgtacaagaaccagaggccgcgctacgaggaaaccgcacgggcctggacccagaagtacgcgatgggctagctgattctgtgttgccgaacaatactgtcactgccaagaagatcatcatcacgacgttgtaagaaattaagttgaaccggtttccccgtcgtgtgatggtattaagagcccagatggctgctgcgtcagttatactagcttcgcagaccaaagttcttctgtgtgtacagtacttttgaagctggatagtctgaatcctgtgccagaacctaaggtcttcgctttgttccctgaagagcgtttgtgaccatagaatctgcatctgtaaccttgccagctaagaaaacagacagtagctgcttgtatgatgtcgagatgctatagttccgatgggtggaaccgtgcagatgaaacagtccagtggtcttgcgttc

SEQ ID NO: 39092 - protein, 187 aa, Zea mays subsp. mays
NINRSDNSISGLPDSHAYNLIPLLQSPLAIEILPPPSPDMANKRIQKELMDLQKDPPTSCSAGPAGEDLFHWQATIMGPSDSPYAGGVFFVNIHFPPDYPFKPPKVNFQTKVYHPNINSNGSICLDILKEQWSPALTISKVLLSISSLLTDPNPDDPLVPEIAHMYKNQRPRYEETARAWTQKYAMG

SEQ ID NO: 39093 - protein, 148 aa, Zea mays subsp. mays
MANKRIQKELMDLQKDPPTSCSAGPAGEDLFHWQATIMGPSDSPYAGGVFFVNIHFPPDYPFKPPKVNFQTKVYHPNINSNGSICLDILKEQWSPALTISKVLLSISSLLTDPNPDDPLVPEIAHMYKNQRPRYEETARAWTQKYAMG

SEQ ID NO: 39094 - protein, 138 aa, Zea mays subsp. mays
MDLQKDPPTSCSAGPAGEDLFHWQATIMGPSDSPYAGGVFFVNIHFPPDYPFKPPKVNFQTKVYHPNINSNGSICLDILKEQWSPALTISKVLLSISSLLTDPNPDDPLVPEIAHMYKNQRPRYEETARAWTQKYAMG

SEQ ID NO: 39095 - DNA, 1105 bp, Zea mays subsp. mays
acaagctcgcttttttaaaatctgtccctgcaattctctcctctgttcccactcattaagataccaccgcctcccgccgcccgccgcccgccgccgacgagcaccgcagcctgacacagagccgcgggcgagccatcgcgtgcggcctcgcccgggatggcgaccatggagagcctgatcgggctggtgaaccggatccagcgcgcgtgcaccgtcctcggcgaccacggcggcggcggcggtgagggctccctctgggaggcgctcccctccgtcgctgtcgttggcgggcagagttccgggaagtcgtcggtgcttgagagcatagtagggagggacttcctgccccgtggatctggtatcgtcacgaggcggcctttagtgctgcagctccacaagacagatggtgggcacgagtatgctgagtttctccacgccccgcggaagcggttcaccgactttgctgctgtgaggaaagagattgctgatgaaacagaccgcattactgggaaaactaaagctatttcaaatgttcccatccatttgagtatatattcgccacatgttgttaacttgacacttattgatcttcctggactgacaaaggtcgctgtagaggggcaagcagaatctattgttcaagatattgaaaacatggttcgatcttatgttgacaagccaaattgcatcatcttggctatctccccagctaaccaagatatagcaacgtcagatgctatcaagcttgccagggatgtcgatccttcaggtgacaggacatttggagtcttaacaaagcttgatttgatggacaagggtaccaatgccgttgatgtacttgaagggagacaatatcgcttacaacacccctgggttggaattgttaatcgctcacaagctgatatcaacaagaatgttgatatgctttcagcaagacgcaaagaaaaagagtactttgagagtagtcctgaatatggtcacttggcacataaaatgggtgcagagtatcttgccaagcttctgtcacagcatttagaggctgtgatcagggccaaaattccaagtattatagccttgattaacaaaacaattgatgaaatagaag

SEQ ID NO: 39096 - protein, 316 aa, Zea mays subsp. mays
MATMESLIGLVNRIQRACTVLGDHGGGGGEGSLWEALPSVAVVGGQSSGKSSVLESIVGRDFLPRGSGIVTRRPLVLQLHKTDGGHEYAEFLHAPRKRFTDFAAVRKEIADETDRITGKTKAISNVPIHLSIYSPHVVNLTLIDLPGLTKVAVEGQAESIVQDIENMVRSYVDKPNCIILAISPANQDIATSDAIKLARDVDPSGDRTFGVLTKLDLMDKGTNAVDVLEGRQYRLQHPWVGIVNRSQADINKNVDMLSARRKEKEYFESSPEYGHLAHKMGAEYLAKLLSQHLEAVIRAKIPSIIALINKTIDEIE

SEQ ID NO: 39097 - protein, 313 aa, Zea mays subsp. mays
MESLIGLVNRIQRACTVLGDHGGGGGEGSLWEALPSVAVVGGQSSGKSSVLESIVGRDFLPRGSGIVTRRPLVLQLHKTDGGHEYAEFLHAPRKRFTDFAAVRKEIADETDRITGKTKAISNVPIHLSIYSPHVVNLTLIDLPGLTKVAVEGQAESIVQDIENMVRSYVDKPNCIILAISPANQDIATSDAIKLARDVDPSGDRTFGVLTKLDLMDKGTNAVDVLEGRQYRLQHPWVGIVNRSQADINKNVDMLSARRKEKEYFESSPEYGHLAHKMGAEYLAKLLSQHLEAVIRAKIPSIIALINKTIDEIE

SEQ ID NO: 39098 - DNA, 1076 bp, Zea mays subsp. mays
gaaagacaagtctctcagaaggtcgttgttttcttttcaacctgcgactctgtagattttcaccacacagcactcagccagcttgagtggagctctggcccacagcgtgatatggataagaagcaaaaatttcttagctgtaaagtgttccgtttgcatggtaacatggagcaggatgatcgcaagaagtcatttttgggttttggttctgagaaatcagcaattcttgtatctaccgatatcgctgctaggggtttggactttccaaaagtcaagtacatcatacaatatgattctccaggagaagcttctgaatacgtccacagggttggaagaactgcaagaattggtgagaagggggaggctctcctctttatgcaacctattgaactcgactacttgaaagatctggagttacacggtgtatcactgacagaatatcccttgcaaagggttttggatagttttcctgtaaatggacagaaacctcacaaaaggaagcaaatatccttagacatgcatccctgcataatgtctctgcagaggtcactcgagggtttcgttgcagctgaggacgcaacgaagaagcttgccagagatgccttctgttcctgggttcgtgcctacactgctcaccgaggtgaactgaagaaaattttcatggtgaagaagctccacctgggccatgtagcgaggagcttcgggctaaaggagcagccgtcgctggttggaaggtcacatcaggtgtctcttaaaaagcggaagaaagagcagaagcgcgagcggcctgccaaaaggaggaagctcccctccaagaagtgaatttgcacacccagaatgctgcatcgcttgacttcggatcatgacgcccgccatttttgggaccgacaaccgtggtggcctatgcctcggtctgtagactcttgacatgagctatttttgttcgcgatgttacatgtagaaatgtaggaactatagcaacaaatgcacaatcacattgttcgctgcagcagctgtttgttgatgtgagatcatctgttactattattattttagtatccgcttgggtttctctt

SEQ ID NO: 39099 - protein, 273 aa, Zea mays subsp. mays
ERQVSQKVVVFFSTCDSVDFHHTALSQLEWSSGPQRDMDKKQKFLSCKVFRLHGNMEQDDRKKSFLGFGSEKSAILVSTDIAARGLDFPKVKYIIQYDSPGEASEYVHRVGRTARIGEKGEALLFMQPIELDYLKDLELHGVSLTEYPLQRVLDSFPVNGQKPHKRKQISLDMHPCIMSLQRSLEGFVAAEDATKKLARDAFCSWVRAYTAHRGELKKIFMVKKLHLGHVARSFGLKEQPSLVGRSHQVSLKKRKKEQKRERPAKRRKLPSKK

SEQ ID NO: 39100 - protein, 236 aa, Zea mays subsp. mays
MDKKQKFLSCKVFRLHGNMEQDDRKKSFLGFGSEKSAILVSTDIAARGLDFPKVKYIIQYDSPGEASEYVHRVGRTARIGEKGEALLFMQPIELDYLKDLELHGVSLTEYPLQRVLDSFPVNGQKPHKRKQISLDMHPCIMSLQRSLEGFVAAEDATKKLARDAFCSWVRAYTAHRGELKKIFMVKKLHLGHVARSFGLKEQPSLVGRSHQVSLKKRKKEQKRERPAKRRKLPSKK

SEQ ID NO: 39101 - protein, 218 aa, Zea mays subsp. mays
MEQDDRKKSFLGFGSEKSAILVSTDIAARGLDFPKVKYIIQYDSPGEASEYVHRVGRTARIGEKGEALLFMQPIELDYLKDLELHGVSLTEYPLQRVLDSFPVNGQKPHKRKQISLDMHPCIMSLQRSLEGFVAAEDATKKLARDAFCSWVRAYTAHRGELKKIFMVKKLHLGHVARSFGLKEQPSLVGRSHQVSLKKRKKEQKRERPAKRRKLPSKK

SEQ ID NO: 39102 - DNA, 676 bp, Zea mays subsp. mays
caatattggcatttaccgctcctcacccaaacagctacgaccggattcagccagatacttggagtggagcttatctatgctgggggaaagagaacagggaggctccattaagaaccgcatgcccacctggtgtgcctcttgatttagtcagcaacttcgagatcaaatccttcgatggttgcgcaaatccgcacttgggtcttgctgctatcgtagctgctggcatcgatgggctaagaagacaccttaagttacctgagccaattgaatcaaacccttctgatcactcttcaaaactgaaaaggctaccgcagaacctgcaggaatctgtagaatcgctttctgcagataaggttttgcatgagttaattggtgataaacttgtcacaactgctatagctatacggaaggctgagatcaatcactttgcgaagaatccgggtgcacttaaggatctcatcgaccgttactagggcaaaagaacggaatgagaagctacatcttcttggacgtggcaaggggtttcactgtatgaccaaccgagagactggaagaataaattttgttccaatggttaacttcggattctcatttcctgtgactgaacttttgtgactgaacttttgatacccagtgtttctcttatcaaataataaaggttatttaaatttttaag

SEQ ID NO: 39103 - protein, 156 aa, Zea mays subsp. mays
ILAFTAPHPNSYDRIQPDTWSGAYLCWGKENREAPLRTACPPGVPLDLVSNFEIKSFDGCANPHLGLAAIVAAGIDGLRRHLKLPEPIESNPSDHSSKLKRLPQNLQESVESLSADKVLHELIGDKLVTTAIAIRKAEINHFAKNPGALKDLIDRY

SEQ ID NO: 39104 - DNA, 819 bp, Zea mays subsp. mays
aacgccaacgcctcaaccacctgtggtggcttctcctctccccgctccccccctgccccttcccttcgtcctcagatccgccgatcccccgcccctgcgcctccgtctcatgatctctgcgcctctgcgggtgccggcgccgaaggctgccgccgggggttcgttcctgctcggcgcgtcctccgtcgagtccaatcccaatcccaagcccagcaggatccgctgcgccgccgccacgctgtacgaggtcctgggcctgcgcgccggcgcgacgggccgggagatcaaggccgcgtacaggcgcctggcgcgggagcggcacccggacgtggcgcacgcgcccggggccgccgccgagttcgcccgcctgcacgacgcctacgccacgctctccgacccggacagccgcgcgcgctacgacggcggcggcgccgcgcccgcggcggcggtggcgaggcgcccctggagcggcgccgtctacggccggccccgacgccgcacatgggagacggaccagtgctggtagtagagagtagagaggcacagccaagagccccacgcgcttcttgtctgtctgtagaatagttagacctcctgccgccagccatgcggccatggcggctcaccttggactttttttttggtttcggtggccatccatgtagcgtgatttttcgttttccttcctccacttgcccttgtacctgtgtgctgtggtcttgacttcttgagatgtaaatactagtacttgatgagatggttggaggagtagccgccctgcctctgttaattctaaataatccaagctgttctctccat

SEQ ID NO: 39105 - protein, 194 aa, Zea mays subsp. mays
NANASTTCGGFSSPRSPPAPSLRPQIRRSPAPAPPSHDLCASAGAGAEGCRRGFVPARRVLRRVQSQSQAQQDPLRRRHAVRGPGPARRRDGPGDQGRVQAPGAGAAPGRGARARGRRRVRPPARRLRHALRPGQPRALRRRRRRARGGGGEAPLERRRLRPAPTPHMGDGPVLVVESREAQPRAPRASCLSVE

SEQ ID NO: 39106 - protein, 174 aa, Zea mays subsp. mays
TPTPQPPVVASPLPAPPLPLPFVLRSADPPPLRLRLMISAPLRVPAPKAAAGGSFLLGASSVESNPNPKPSRIRCAAATLYEVLGLRAGATGREIKAAYRRLARERHPDVAHAPGAAAEFARLHDAYATLSDPDSRARYDGGGAAPAAAVARRPWSGAVYGRPRRRTWETDQCW

SEQ ID NO: 39107 - protein, 138 aa, Zea mays subsp. mays
MISAPLRVPAPKAAAGGSFLLGASSVESNPNPKPSRIRCAAATLYEVLGLRAGATGREIKAAYRRLARERHPDVAHAPGAAAEFARLHDAYATLSDPDSRARYDGGGAAPAAAVARRPWSGAVYGRPRRRTWETDQCW

SEQ ID NO: 39108 - DNA, 906 bp, Zea mays subsp. mays
tcgtcgttagtttcggtgtctggtgtgtccgtcgagtgctggacatgtctctggtggaaagcaggccagaactttggggcaagtatacctatgtccttaaccgtcttcaggggatcttggaccctgcgttctccaagcctcggggtgctctgaccatatgcacctgccttcagaaagacaccagagtgcgcaatagcccaccccacagtgggctaacagccatgggtccggtccccacaccgatccggggcgccttcacgaccgcaggcgtggttctggagatgatcaaggacgtggaggctgcggtctcaggccgcaagggcaggagcggcacggcggcgggcgacgtcgccttccccaaggggaaggagaacctggcctccgtgctgaagcggtacaagcggcggctcgccagcaagggccagtagcgcgcgggtgtcagacgggcgggcgatcgcaagcaatgttaggaggagcctgactattgttctccagggggggctgccgctggcgccggcctccctgagccctggattttttcgttgcacgacgttcctagggaccggtggttgcccgatggtcgtcttggtcccttccagcagtttttttttcttccctctttctgttggtttctttttgttggcgttgtgatgttttgtaaggggcaactagggtatgtgctcagaaggactcgagatgtacacgcgaaggagatgtactagtctgctgatgcagcgttgtaaagtccacattctgcaggttaaccctttttggggccgtcaagtgttagtgcgtgccctatgtatgttaatcaccccctccctgcagagaggttgcgaatactcacaaacttgcacctgtcgagatcgtttgtaatatccgacgtcttgttcagaattgttctct

SEQ ID NO: 39109 - protein, 141 aa, Zea mays subsp. mays
VVSFGVWCVRRVLDMSLVESRPELWGKYTYVLNRLQGILDPAFSKPRGALTICTCLQKDTRVRNSPPHSGLTAMGPVPTPIRGAFTTAGVVLEMIKDVEAAVSGRKGRSGTAAGDVAFPKGKENLASVLKRYKRRLASKGQ

SEQ ID NO: 39110 - protein, 127 aa, Zea mays subsp. mays
MSLVESRPELWGKYTYVLNRLQGILDPAFSKPRGALTICTCLQKDTRVRNSPPHSGLTAMGPVPTPIRGAFTTAGVVLEMIKDVEAAVSGRKGRSGTAAGDVAFPKGKENLASVLKRYKRRLASKGQ

SEQ ID NO: 39111 - DNA, 787 bp, Zea mays subsp. mays
agaattgtcagagggcaccaccagccaaggagggagggagagggacggacgaagacgagccgacccgacctcgtgcggtgtgtaggtcgagagagagagagagagaccctaccgggcgggagagagccaggaagaggagggcgacgatggcgtccggctggggcatcaacgggaacaagggccgctgctacgacttctggctggagttcagcgagtgcatgagccgctgccgccagccctccgactgcggcctcctccgcgaggactacctcgagtgcctccaccactccaaggagttccagcgcaggaacaggaggaggcaaagaaataccaggaagagattgccactctgaacaaggagatgaagaaactgaagctacaagtccaagaaaagacagaagaggtccatgtttcagaggacaaggcacttgctatccaaaaacaatccgaaggcttgctgactgaatatgaccgcctgctggaggataatcagcatcttcggacacagctgctgtcaattgaccgcaggctttccaactcttcttgaacgaagagtctatttaggggatgctgaagaatttctgtggaagatcatgttaccacccaaagtgtatggcagctacctgcttcctcacttgttagtcttagcatcttcaattaactagctattgcattatattgttggcaaaactagtgcaagcattatatggtctagaactttggagtttctcttgtgtgtttcttgtaatgcctactttttatgtgtgcttatagtgattactgtttg

SEQ ID NO: 39112 - protein, 116 aa, Zea mays subsp. mays
NCQRAPPAKEGGRGTDEDEPTRPRAVCRSRERERDPTGRERARKRRATMASGWGINGNKGRCYDFWLEFSECMSRCRQPSDCGLLREDYLECLHHSKEFQRRNRRRQRNTRKRLPL

SEQ ID NO: 39113 - protein, 73 aa, Zea mays subsp. mays
RIVRGHHQPRREGEGRTKTSRPDLVRCVGRERERETLPGGREPGRGGRRWRPAGASTGTRAAATTSGWSSASA

SEQ ID NO: 39114 - protein, 68 aa, Zea mays subsp. mays
MASGWGINGNKGRCYDFWLEFSECMSRCRQPSDCGLLREDYLECLHHSKEFQRRNRRRQRNTRKRLPL

SEQ ID NO: 39115 - DNA, 735 bp, Zea mays subsp. mays
gattacacagaattccctcccaatcggcggcgccacgatgcgcctccgcagccgggcaatctttcccctcgtccgcaccaccgccaccaccacatcggccgcgtcttcgtcgccggcggtgctgagcatcggccacgcgctgcgcgagcgccggctgttcacgggggacgacgtggcggcgtacgcggcgatcagcggtgaccgcaacccggtgcacctcgacgacgccgtcgcccgggagctgagcgggttccagcgaggccgcgtggtgcacggcatgctcgtggcgtccctcttcccttccatcatcgctgccacctggcgctgtgtacgcgagccagacgctcaagtttgcggcgccggtgtacgtcggggatgaggtggttgctcgagtccaggcactcaacatcaggacggcggcggcgacgaacagctgcacggcaagacgatatgtcgtcaagttcgcaaccaaatgcttcatggacgaagaggaaggctctgttgcgattgaaggcgaagcaatggctgtcctgcctacactggagctcagctctcagtcgactagaaactaggagtggcctcaaaccgggtgactagtcacaagttgctgttgcttaatcatacccgacctggtaatccctctcttctggaacactgtgtagaatgcgtgtaaactaaacttagtgtagcctttacattataagcgaggagtgaaataaagctgttgtttatgac

SEQ ID NO: 39116 - protein, 125 aa, Zea mays subsp. mays
ITQNSLPIGGATMRLRSRAIFPLVRTTATTTSAASSSPAVLSIGHALRERRLFTGDDVAAYAAISGDRNPVHLDDAVARELSGFQRGRVVHGMLVASLFPSIIAATWRCVREPDAQVCGAGVRRG

SEQ ID NO: 39117 - protein, 113 aa, Zea mays subsp. mays
MRLRSRAIFPLVRTTATTTSAASSSPAVLSIGHALRERRLFTGDDVAAYAAISGDRNPVHLDDAVARELSGFQRGRVVHGMLVASLFPSIIAATWRCVREPDAQVCGAGVRRG

SEQ ID NO: 39118 - protein, 73 aa, Zea mays subsp. mays
MRWLLESRHSTSGRRRRRTAARQDDMSSSSQPNASWTKRKALLRLKAKQWLSCLHWSSALSRLETRSGLKPGD

SEQ ID NO: 39119 - DNA, 681 bp, Zea mays subsp. mays
aattgcttactacctactgtgattcattcattgacttgtcttccgcctcccgccccatgcaggctgccaggaaatggggcccacaggcagccgccgtgacgcaagggacgccatgcgtgccgctgccgaggtttccggtgcctcaccccatctacagcagaccggcgatggtacctccgccgccaagcaccaccaagctagctcaactgcatctggagctccaagcgcacccgtccaaggagagcatcgacgcagccatcggagatgttttagtgaagccatggctgccgcttccactggggctcaagccgccgtcgctcgacagcgtcatgtcggagctgcacaagcaaggcgtaccaaaaatcccaccggcggctgccaccaccaccggcgccaccggatgacatactatctcgtcgacaatacatgcatgtacaatagacggatgtctagtagtatagtagattgctgctagctagctagccgctagagtgtagtagcatatgcatgccttttttttcttcttctttttttgcccttattattaagctggctaatagcgattgagatggagcttgacacagatctgctagctagctatttgagggtttctcttgtatgctacctattgctgctgcttgctgctgagacaagtaatgtacgtacgcctgtgcaaacgac

SEQ ID NO: 39120 - protein, 133 aa, Zea mays subsp. mays
MGPTGSRRDARDAMRAAAEVSGASPHLQQTGDGTSAAKHHQASSTASGAPSAPVQGEHRRSHRRCFSEAMAAASTGAQAAVARQRHVGAAQARRTKNPTGGCHHHRRHRMTYYLVDNTCMYNRRMSSSIVDCC

SEQ ID NO: 39121 - protein, 133 aa, Zea mays subsp. mays
LLTTYCDSFIDLSSASRPMQAARKWGPQAAAVTQGTPCVPLPRFPVPHPIYSRPAMVPPPPSTTKLAQLHLELQAHPSKESIDAAIGDVLVKPWLPLPLGLKPPSLDSVMSELHKQGVPKIPPAAATTTGATG

SEQ ID NO: 39122 - protein, 120 aa, Zea mays subsp. mays
MRAAAEVSGASPHLQQTGDGTSAAKHHQASSTASGAPSAPVQGEHRRSHRRCFSEAMAAASTGAQAAVARQRHVGAAQARRTKNPTGGCHHHRRHRMTYYLVDNTCMYNRRMSSSIVDCC

SEQ ID NO: 39123 - protein, 115 aa, Zea mays subsp. mays
MQAARKWGPQAAAVTQGTPCVPLPRFPVPHPIYSRPAMVPPPPSTTKLAQLHLELQAHPSKESIDAAIGDVLVKPWLPLPLGLKPPSLDSVMSELHKQGVPKIPPAAATTTGATG

SEQ ID NO: 39124 - DNA, 608 bp, Zea mays subsp. mays
ccaaactattctctctttgcggtcggtctctgctttcagattcgtttctaaccagggttcctccagcccagccgccgccgccaccgttgcggagctcacatcgcctcgacacaacacggtctccggtttcaacgtataataactgggctgcgagcactatatggatgatggcttcacgaggcaccagtgccgtgctttcaagggctgctcggatgaggcaaaaactgcagtctgccttggaggccagtgccctagatattgaagacgtttcttaccaacatgccgggcatgcagccgtcaaggacaatgcgaacgagacgcacttcaacatcaaggttgtttcaccaaaatttgaggggcagaaccttgtgaagcgtcacaggatggtgtatgatcttctgagggatgagcttagctcaggcctccatgctgtctccattgttgcgaaaaccccgaaagagttagggtcttgattgtataacaatgttgaataagcactgtcctatgtttcgaagtaagtctgtcgtagcagtgtcatgtaaccatgaactgattgccaaaacaatgtcaccggcatgctcttcttattaagatctggtattggggtt

SEQ ID NO: 39125 - protein, 156 aa, Zea mays subsp. mays
KLFSLCGRSLLSDSFLTRVPPAQPPPPPLRSSHRLDTTRSPVSTYNNWAASTIWMMASRGTSAVLSRAARMRQKLQSALEASALDIEDVSYQHAGHAAVKDNANETHFNIKVVSPKFEGQNLVKRHRMVYDLLRDELSSGLHAVSIVAKTPKELGS

SEQ ID NO: 39126 - protein, 102 aa, Zea mays subsp. mays
MMASRGTSAVLSRAARMRQKLQSALEASALDIEDVSYQHAGHAAVKDNANETHFNIKVVSPKFEGQNLVKRHRMVYDLLRDELSSGLHAVSIVAKTPKELGS

SEQ ID NO: 39127 - protein, 101 aa, Zea mays subsp. mays
MASRGTSAVLSRAARMRQKLQSALEASALDIEDVSYQHAGHAAVKDNANETHFNIKVVSPKFEGQNLVKRHRMVYDLLRDELSSGLHAVSIVAKTPKELGS

SEQ ID NO: 39128 - DNA, 801 bp, Zea mays subsp. mays
aaggtcgccgacttcggcctctccaagctagtgtccgacagcgagaggggccacgtcagcacgcaagtgaaaggaacactgggctatctggaccctgagtactacatgtcccagcagctgaccgagaagagcgacgtctacagcttcggcgtggtcatgctggagctgatcgtcgcgaagcagccgatcgagaagggcaagtacatcgtccgcgaggcgaagagggtgttcgacgccgacgacgccgagttctgcgggctcaaggacatggtagacgcaaggatcatgagcaccaataaccacctcgcggcgttcggcaagttcgtccagctggccctcaggtgcgtcgacgaggtggccacagcccggccgtccatgagcgaggtcgtcaaggagatcgagatgatgctgcagagcgaggggctcagcagcgcctccacgtctgcctcgacgtccgcgaccgagttcgacgttacgaagggggctcctcgccacccgtacaacgatcctcccctccctaaaaaggacaaggacgtgagcaccgactccttcgagtacagcggaggatattctttccaatcaaaggtcgaaccgaagtagctgatttctggattgaggctatcttcttcgttcggccttttcctttcccaacaattggcttgacgaaatgaagagagatatgggtaacctttttattgcattgagcttaatacttgtgggagactagtgaatttgtatggttaataggagacgcatcaagatcaaactcgtctgcctctaaagtgctgctaactgttgttt

SEQ ID NO: 39129 - protein, 199 aa, Zea mays subsp. mays
KVADFGLSKLVSDSERGHVSTQVKGTLGYLDPEYYMSQQLTEKSDVYSFGVVMLELIVAKQPIEKGKYIVREAKRVFDADDAEFCGLKDMVDARIMSTNNHLAAFGKFVQLALRCVDEVATARPSMSEVVKEIEMMLQSEGLSSASTSASTSATEFDVTKGAPRHPYNDPPLPKKDKDVSTDSFEYSGGYSFQSKVEPK

SEQ ID NO: 39130 - protein, 164 aa, Zea mays subsp. mays
MSQQLTEKSDVYSFGVVMLELIVAKQPIEKGKYIVREAKRVFDADDAEFCGLKDMVDARIMSTNNHLAAFGKFVQLALRCVDEVATARPSMSEVVKEIEMMLQSEGLSSASTSASTSATEFDVTKGAPRHPYNDPPLPKKDKDVSTDSFEYSGGYSFQSKVEPK

SEQ ID NO: 39131 - protein, 147 aa, Zea mays subsp. mays
MLELIVAKQPIEKGKYIVREAKRVFDADDAEFCGLKDMVDARIMSTNNHLAAFGKFVQLALRCVDEVATARPSMSEVVKEIEMMLQSEGLSSASTSASTSATEFDVTKGAPRHPYNDPPLPKKDKDVSTDSFEYSGGYSFQSKVEPK

SEQ ID NO: 39132 - DNA, 1079 bp, Zea mays subsp. mays
ctatttgcggaaaggaacttctgttagtgctggccaaacatcaagttcatcaaatggaacaactgcaggagaaaggcctctcctacgtgagaaattgtcaaagggaaaggatggctttgttgctgctgatttcacagctacagaagctcattgtgctgtaccctcgactccaatactttggttccagcaggcagatgagtgcatgcacctatgcatttatcagcacaaaagtctcactatcttactgctggttcctgcttcctcagtgataaatggagaagagggcattactcatgtgaagaaggcgatccttgaaaatgcatcacagaagattgtcactgttgagcagaaattgacacggggatggggaggagaaaatgcgtatcatgttagtggatatcgttatttgcttgttgatccggagagaagagtatcaagagcctccccacctgggaaagtcaccaccctagcaaaggattctctacttgccctcaacatgctaagacaagaagtagatctagagaagtcaagatacaagagaggtgacccttgtcgtgataaggatttcgaagtatgtatcagaacaaaaaacaatgcgtgggttattgctaaaatcagtcaaggaagggagctttacatggctctagagaagggtggtgaaacgcttctatatgcatccacagctgtagagaaattcagcaacaggtactgtgagggagtattctctacagattagaagcaccagagggagatcttagcttttccatacattacctattatgtacatcctgttttttccccagctgtatcgttgccccccattgttgagagactcggaccactctttgcgaagggaataaggagttcgtatcagttgtacagctgctctgctaccgtgtgctatctgcaaaagaatagcctagtctgggaataacgcagagcgggatagagtttgtttgttcacgggtcttatgtccttccttaacgcagagcattgtgcgtgttttcattttgctgtaacagccggcgatttacctgcagactgggaaagtaacttagcgtttcatttggtattctgc

SEQ ID NO: 39133 - protein, 244 aa, Zea mays subsp. mays
YLRKGTSVSAGQTSSSSNGTTAGERPLLREKLSKGKDGFVAADFTATEAHCAVPSTPILWFQQADECMHLCIYQHKSLTILLLVPASSVINGEEGITHVKKAILENASQKIVTVEQKLTRGWGGENAYHVSGYRYLLVDPERRVSRASPPGKVTTLAKDSLLALNMLRQEVDLEKSRYKRGDPCRDKDFEVCIRTKNNAWVIAKISQGRELYMALEKGGETLLYASTAVEKFSNRYCEGVFSTD

SEQ ID NO: 39134 - protein, 177 aa, Zea mays subsp. mays
MHLCIYQHKSLTILLLVPASSVINGEEGITHVKKAILENASQKIVTVEQKLTRGWGGENAYHVSGYRYLLVDPERRVSRASPPGKVTTLAKDSLLALNMLRQEVDLEKSRYKRGDPCRDKDFEVCIRTKNNAWVIAKISQGRELYMALEKGGETLLYASTAVEKFSNRYCEGVFSTD

SEQ ID NO: 39135 - DNA, 950 bp, Zea mays subsp. mays
agacctagaccctccaaaaacaactcaacaacaatgctcctcctcctcctcctgctcgtcgcctcctcctccctgtcccaggagggtgtcctcgccgacgtgccgccgtccaacaagctggtcttcatcctggcggggcagtccaacatggccggccgcggcggggtggtggcgaaccgctgggacggcgtggtgccgggcgactgcgcgccgtcccccgcggtgctgcgtctctcgcccgacctgcgctgggaggaggcgcgggagccgctgcacgccggcatcgacgccgccaaccacgccgtcggggtgggccccgggatggcgtttgccaacgcgctgctgcgctcgggccgcgcggggggcgccgtggtagggctcgtcccctgcgccgtgggaggcacgcggatggcagagtggggcaggggcaccgagctctacgccgagatgctgcgccgggccagggtcgccgtcgagacgggggggcgcatcggtgcgctgttgtggtaccagggggagagtgacaccgtccgctggtccgacgccaccgagtacggccgccggatggggatgctcgtccgtgatctccgcgccgatcttggcatcccgcacctcctcgtcatccaggtcgggttagcatcgggcctaggacagtatactcaagtcgtgagagacgctcagaaagggatcaaacttcgcaacgtcagattcgttgatgcgatggggttgccattgcaagacggccatctgcatctaagcacccaagctcaggtccagcttgggcgtatgttggctcagtcctatctaaattatggtacatcccaactctagctagtacttgtgagatagaaattcctgccctgtttggacgattcattgagaacccattcttataattattgttgtatggaatcaacttgttacagctcgatgcaatatcttcatcatct

SEQ ID NO: 39136 - protein, 276 aa, Zea mays subsp. mays
RPRPSKNNSTTMLLLLLLLVASSSLSQEGVLADVPPSNKLVFILAGQSNMAGRGGVVANRWDGVVPGDCAPSPAVLRLSPDLRWEEAREPLHAGIDAANHAVGVGPGMAFANALLRSGRAGGAVVGLVPCAVGGTRMAEWGRGTELYAEMLRRARVAVETGGRIGALLWYQGESDTVRWSDATEYGRRMGMLVRDLRADLGIPHLLVIQVGLASGLGQYTQVVRDAQKGIKLRNVRFVDAMGLPLQDGHLHLSTQAQVQLGRMLAQSYLNYGTSQL

SEQ ID NO: 39137 - protein, 265 aa, Zea mays subsp. mays
MLLLLLLLVASSSLSQEGVLADVPPSNKLVFILAGQSNMAGRGGVVANRWDGVVPGDCAPSPAVLRLSPDLRWEEAREPLHAGIDAANHAVGVGPGMAFANALLRSGRAGGAVVGLVPCAVGGTRMAEWGRGTELYAEMLRRARVAVETGGRIGALLWYQGESDTVRWSDATEYGRRMGMLVRDLRADLGIPHLLVIQVGLASGLGQYTQVVRDAQKGIKLRNVRFVDAMGLPLQDGHLHLSTQAQVQLGRMLAQSYLNYGTSQL

SEQ ID NO: 39138 - protein, 227 aa, Zea mays subsp. mays
MAGRGGVVANRWDGVVPGDCAPSPAVLRLSPDLRWEEAREPLHAGIDAANHAVGVGPGMAFANALLRSGRAGGAVVGLVPCAVGGTRMAEWGRGTELYAEMLRRARVAVETGGRIGALLWYQGESDTVRWSDATEYGRRMGMLVRDLRADLGIPHLLVIQVGLASGLGQYTQVVRDAQKGIKLRNVRFVDAMGLPLQDGHLHLSTQAQVQLGRMLAQSYLNYGTSQL

SEQ ID NO: 39139 - DNA, 1178 bp, Zea mays subsp. mays
agaggagtcagtatttgagctttctttgtttgctgagtcattcagtgaaatgcttcaacacagaatgggttgtgttatcctgtcttttcttgagaaattgcacaggcgatatgttgtgaagaggaatcagcgtaagcgccaaagagaggaagatctaaagaaagaagagaaatcttcagagaagcggtctaagactactcatgagactactaaaactgaaagtgttgataatccaggaggcagctttaaaatgacaaaagagggtgaagaaaagatgagcacagatcaatctgcaaatgtccatgctgaactgtcaaaagagggtcagataaaacttggcaccgatcatccaattgctaaccatggagaaccagcaaaagggggtgatgaaaatatggaggaagatcctgaatacgaggaagatcctgaagaagtagaagtatatgaagatgacgaggacatggatgatgctcacgctgaagaacagattgcagaacagaatgagaacacaaacgacagagagattaagccaaaagaagtagcgacaacagatggtggaaataacaaaagtacaagacagcctgaagtagaaaatgttactaatatccatgaaagagctgcttcaatggaagaaaagcagtccgtgccagagataggagatttggtgggaggtggagaaaaggtagttagtaaagagattaagccagcaaaagatgaggtgatcgacaaggacctattgcaggccttcaggtactttgacataaatggagcaggatatctcaaggttgatgatttaaaatgtattcttcacaacatggggaagtttttatcaagcagggacgtgaaggacttggttcaaattgctcttgttgagagcaattctgcaagggacaatcgcataatctatcctaagcttgtgaagattgttgacctgtaatctggcactgcttggcccgcgtcagtccccttgaagttaaccatgctatgatcgttgagaagtcagttatgagaaactattttgtttacttattaatgggttcactgccatttttgtggctacctgtttctacgattatgctacaagcagctgcttttcgtttcgatgaatgttttttgtggaattataagtcatgaacttaatcgatgttgcctcatttcgtaaaagaggtgtttgtgtc

SEQ ID NO: 39140 - protein, 311 aa, Zea mays subsp. mays
EESVFELSLFAESFSEMLQHRMGCVILSFLEKLHRRYVVKRNQRKRQREEDLKKEEKSSEKRSKTTHETTKTESVDNPGGSFKMTKEGEEKMSTDQSANVHAELSKEGQIKLGTDHPIANHGEPAKGGDENMEEDPEYEEDPEEVEVYEDDEDMDDAHAEEQIAEQNENTNDREIKPKEVATTDGGNNKSTRQPEVENVTNIHERAASMEEKQSVPEIGDLVGGGEKVVSKEIKPAKDEVIDKDLLQAFRYFDINGAGYLKVDDLKCILHNMGKFLSSRDVKDLVQIALVESNSARDNRIIYPKLVKIVDL

SEQ ID NO: 39141 - protein, 295 aa, Zea mays subsp. mays
MLQHRMGCVILSFLEKLHRRYVVKRNQRKRQREEDLKKEEKSSEKRSKTTHETTKTESVDNPGGSFKMTKEGEEKMSTDQSANVHAELSKEGQIKLGTDHPIANHGEPAKGGDENMEEDPEYEEDPEEVEVYEDDEDMDDAHAEEQIAEQNENTNDREIKPKEVATTDGGNNKSTRQPEVENVTNIHERAASMEEKQSVPEIGDLVGGGEKVVSKEIKPAKDEVIDKDLLQAFRYFDINGAGYLKVDDLKCILHNMGKFLSSRDVKDLVQIALVESNSARDNRIIYPKLVKIVDL

SEQ ID NO: 39142 - protein, 290 aa, Zea mays subsp. mays
MGCVILSFLEKLHRRYVVKRNQRKRQREEDLKKEEKSSEKRSKTTHETTKTESVDNPGGSFKMTKEGEEKMSTDQSANVHAELSKEGQIKLGTDHPIANHGEPAKGGDENMEEDPEYEEDPEEVEVYEDDEDMDDAHAEEQIAEQNENTNDREIKPKEVATTDGGNNKSTRQPEVENVTNIHERAASMEEKQSVPEIGDLVGGGEKVVSKEIKPAKDEVIDKDLLQAFRYFDINGAGYLKVDDLKCILHNMGKFLSSRDVKDLVQIALVESNSARDNRIIYPKLVKIVDL

SEQ ID NO: 39143 - DNA, 1226 bp, Zea mays subsp. mays
attattctatcaagtgtgtgtgcttttattttatgtgctggagctgcactagtgctttatttcaagcttcgaaaccacatccatttaactgaagcgtcacttgtgccaacaaaacctacaggtcctgtttctgcaatggttgggaacaggctagaaagcagacctatttcggcatcaccatccttcagctcaagtttggtggcatataaaggatctgccaaaacatttaacctggttgagatggagagagctacactaggatttgatgagtccagaattattggtgagggtggttttgggcgtgtctatgaaggtattcttgaggatggagaacgggttgctatcaaggttttaaagcgggacgatcaacaaggtacccgggagtttttggctgaggtcgagatgcttagccgattgcatcataggaacttggttaagctgataggtatatgcacagaggggcatagccgatgtttggtttatgagcttgttccgaatggcagtgtggaatctcacttgcatggatcagataagggagctgctcagtttgattggaacgctaggctcaaaattgcacttggtgcagcacgcgcacttgcatatttgcatgaggattcaagtccacgtgtcatacaccgtgattttcaagtccagtaacatcttattggaacatgacttcaccccaaaaggtgtcagactttggcttagcaaggacagctttgggtgagggaaacgagcatatttcaactcgtgtcatgggaacttttgggtatcttgctcctgaatatgcaatgactggccatcttctagtaaagagtgatgtttacagctacggtgttgttcttcttgagcttcttacagggaggaaaccggtagatatgttaagacctcctggacaggaaaacttagtggcatgggctggttctcttctgacaagcagggatggtctggaatcaatcatagatcattcacttgggcgcagcattccatttgacagcatcgcaaaagtagcagccattgcttctatgtgtgttcagcctgaggtggaccagcgcccattcatgggtgaagtagttcaagctctaaagctggtatgcaatgaaggcggcgagttcaatgagtcaacctttagccaagatttgcatatccaagatgtcgaggttatgagtagagcaagtacggatgtagacgttgacccaacgctatctgctgagctgttcacttca

SEQ ID NO: 39144 - protein, 218 aa, Zea mays subsp. mays
IILSSVCAFILCAGAALVLYFKLRNHIHLTEASLVPTKPTGPVSAMVGNRLESRPISASPSFSSSLVAYKGSAKTFNLVEMERATLGFDESRIIGEGGFGRVYEGILEDGERVAIKVLKRDDQQGTREFLAEVEMLSRLHHRNLVKLIGICTEGHSRCLVYELVPNGSVESHLHGSDKGAAQFDWNARLKIALGAARALAYLHEDSSPRVIHRDFQVQ

SEQ ID NO: 39145 - protein, 185 aa, Zea mays subsp. mays
MTSPQKVSDFGLARTALGEGNEHISTRVMGTFGYLAPEYAMTGHLLVKSDVYSYGVVLLELLTGRKPVDMLRPPGQENLVAWAGSLLTSRDGLESIIDHSLGRSIPFDSIAKVAAIASMCVQPEVDQRPFMGEVVQALKLVCNEGGEFNESTFSQDLHIQDVEVMSRASTDVDVDPTLSAELFTS

SEQ ID NO: 39146 - protein, 173 aa, Zea mays subsp. mays
MVGNRLESRPISASPSFSSSLVAYKGSAKTFNLVEMERATLGFDESRIIGEGGFGRVYEGILEDGERVAIKVLKRDDQQGTREFLAEVEMLSRLHHRNLVKLIGICTEGHSRCLVYELVPNGSVESHLHGSDKGAAQFDWNARLKIALGAARALAYLHEDSSPRVIHRDFQVQ

SEQ ID NO: 39147 - DNA, 581 bp, Zea mays subsp. mays
gttgtttccaagcagtttgaatcctgacattcttgaaggcctacttggatctgtgggtggtgtcatggctttcctcactttgcatgaaatgctgcctcttgcatttgactattgtggccagaagcaagctgtcaaagctgtctttgtgggcatggcctgcatgtctgcaagcttgtacttcttggaagtcagcttagcaaaggagataagcttgtagcatcgcgctgcaggtactgggaggccatagcctgtcagtagatcctgaattctaggaggaggaacagcacaataaaaccatgaacagtgactactggtgtgccgccattgatattgtccatcttaccgtgaaaggagggagaaactgcatttccccagaatgtattccccagattcctcgtgggaccatatgaaagaattgaaaaatgtactgtagtactctgtcgtccggcaatggaagcttcgaagtcgtcaactaaactatttctagcactctcgtcggttgacaatggaagattctatgtaaaaacccatcagatagatgttaacctttaatctttaatttcttaaaagtacattgaaac

SEQ ID NO: 39148 - protein, 71 aa, Zea mays subsp. mays
LFPSSLNPDILEGLLGSVGGVMAFLTLHEMLPLAFDYCGQKQAVKAVFVGMACMSASLYFLEVSLAKEISL

SEQ ID NO: 39149 - protein, 50 aa, Zea mays subsp. mays
MAFLTLHEMLPLAFDYCGQKQAVKAVFVGMACMSASLYFLEVSLAKEISL

SEQ ID NO: 39150 - protein, 42 aa, Zea mays subsp. mays
MLPLAFDYCGQKQAVKAVFVGMACMSASLYFLEVSLAKEISL

SEQ ID NO: 39151 - DNA, 982 bp, Zea mays subsp. mays
cactttgagagcaagatggaaattcctcctcgcaggcgcccacctccccccttaagctccgcaggtagaaagaaagagcaagaaggcaaaggcgactctgaagagcagcaagagaaaagcatcatagcaaccatcgatgacgtcctctctgctcggccaggggcattgcctgaagacgcaaaccctgggccccagaccgaaagcagtaagtttccctttggtatccagcaagccaaaagtcaccggaacatcaagctgctggaggacgagcccaggagccgagacgagactcctctgtgtaccatcgcgcactggcaggactcgctggctaagcgatgcatctgtgtgtccaatattgtccgtagcttgtcattcgtgcctggcaatgatgccgaaatgtccaaacatccaggcctggtgctgatcctggggaagctgattcttcttcaccacgagcatccagagagaaagcgagcaccgcagacctatgagaaagaggaggatgaggacaagggggtggcctgcagcaaagatgagtggtggtgggactgcctcgaggtcttgagggataacacgttggtcacgttggccaacatttccgggcagctagacttgtctgcttacacggaaagcatctgcttgccaattttggatggcttgctgcactggatggtgtgcccgtctgcagaggcacaagatccctttccaactgtgggacccaactcggtcctgtcgcctcagagacttgtgctggagaccctctgtaaactcagtatccaggacaataatgtggacctgatcttggccactcctccatttagtcgtcaggagaaattctatgctacattagttaggtacgttggggatcgcaaaaacccagtctgtcgagaaatgtccatggcgcttttatcgaaccttgcccaaggggacgcactagcagcaagggccatagctgtgcagaaaggaagcattgaaacttgat

SEQ ID NO: 39152 - protein, 326 aa, Zea mays subsp. mays
HFESKMEIPPRRRPPPPLSSAGRKKEQEGKGDSEEQQEKSIIATIDDVLSARPGALPEDANPGPQTESSKFPFGIQQAKSHRNIKLLEDEPRSRDETPLCTIAHWQDSLAKRCICVSNIVRSLSFVPGNDAEMSKHPGLVLILGKLILLHHEHPERKRAPQTYEKEEDEDKGVACSKDEWWWDCLEVLRDNTLVTLANISGQLDLSAYTESICLPILDGLLHWMVCPSAEAQDPFPTVGPNSVLSPQRLVLETLCKLSIQDNNVDLILATPPFSRQEKFYATLVRYVGDRKNPVCREMSMALLSNLAQGDALAARAIAVQKGSIET

SEQ ID NO: 39153 - protein, 321 aa, Zea mays subsp. mays
MEIPPRRRPPPPLSSAGRKKEQEGKGDSEEQQEKSIIATIDDVLSARPGALPEDANPGPQTESSKFPFGIQQAKSHRNIKLLEDEPRSRDETPLCTIAHWQDSLAKRCICVSNIVRSLSFVPGNDAEMSKHPGLVLILGKLILLHHEHPERKRAPQTYEKEEDEDKGVACSKDEWWWDCLEVLRDNTLVTLANISGQLDLSAYTESICLPILDGLLHWMVCPSAEAQDPFPTVGPNSVLSPQRLVLETLCKLSIQDNNVDLILATPPFSRQEKFYATLVRYVGDRKNPVCREMSMALLSNLAQGDALAARAIAVQKGSIET

SEQ ID NO: 39154 - protein, 194 aa, Zea mays subsp. mays
MSKHPGLVLILGKLILLHHEHPERKRAPQTYEKEEDEDKGVACSKDEWWWDCLEVLRDNTLVTLANISGQLDLSAYTESICLPILDGLLHWMVCPSAEAQDPFPTVGPNSVLSPQRLVLETLCKLSIQDNNVDLILATPPFSRQEKFYATLVRYVGDRKNPVCREMSMALLSNLAQGDALAARAIAVQKGSIET

SEQ ID NO: 39155 - DNA, 1197 bp, Zea mays subsp. mays
agctaggaagaacgttgctgctttccttggcacaatacaggtcaccaagcaacataatgaacaactaaatggagttcaaccaggaggtgccaacagagaggatcattctgacacatcaaaaaggactcatgaaaatgaagtatataatcttgctcatcaggatgaagagcctcatcagcagatgaagaagcagaaaataaatgctataggtattgattatcgtaaggaggtactcactgagaaggttcctttccagaactctggtcctgcatccattaataaacattcagtgctccagaataacggtaaaacacgagttaaggatccagagaaaaagcagcaagcgggagacgaagaagctcgcaaagaagctggtaatgaaaaatctcatgaaacaggagcttcatctcagagaagatgtgatcctccttcgaatcatgacgttgaggctgaccaggaaggtagtcttacaacttctatccaatctagtggttctgatgaattagaagctaaaggattgcaagagaagaaggcagctgtatcaagtaaatctagaaaaggtatttcaaagcgggatcaacatatgcctacttcaccaagaaaaagaaattctgtacacctgcaaaagcgctattccaatcctcttgcaccacctggaagacgcaaaaaactcttttggacagaagaagaagaagctgttttgagggaagggatggcaaaattcactccacagaataatgcgcaaattccatggattctgatactagaacatggccgtggtgtgtttcacaggacgcgcctgccatctgatttgagggtcaagtggaggagcatgcagaggaagaaatctgatgccgttgacatggaacactgacgtggtacttgtacatagcgaatgtgcaagtaggaatggaggagggtttcttctaattacttttgcagcccttaatcctgtagcactgacgtggattggttgtgggattcggtgaacctaggcctcctctaatatgcacgtagatgatggtagagagattggtagattcaaacctacgcgaagaattgccaatagatgactttggctgcttcgttcgttcaaatcgcacatatatgttgctgccgtgactccataccgtgaagaagcttgcccaaagtctgcagttttctaaacccctggtcaaaaaaggcaccgataaaatc

SEQ ID NO: 39156 - protein, 290 aa, Zea mays subsp. mays
ARKNVAAFLGTIQVTKQHNEQLNGVQPGGANREDHSDTSKRTHENEVYNLAHQDEEPHQQMKKQKINAIGIDYRKEVLTEKVPFQNSGPASINKHSVLQNNGKTRVKDPEKKQQAGDEEARKEAGNEKSHETGASSQRRCDPPSNHDVEADQEGSLTTSIQSSGSDELEAKGLQEKKAAVSSKSRKGISKRDQHMPTSPRKRNSVHLQKRYSNPLAPPGRRKKLFWTEEEEAVLREGMAKFTPQNNAQIPWILILEHGRGVFHRTRLPSDLRVKWRSMQRKKSDAVDMEH

SEQ ID NO: 39157 - protein, 230 aa, Zea mays subsp. mays
MKKQKINAIGIDYRKEVLTEKVPFQNSGPASINKHSVLQNNGKTRVKDPEKKQQAGDEEARKEAGNEKSHETGASSQRRCDPPSNHDVEADQEGSLTTSIQSSGSDELEAKGLQEKKAAVSSKSRKGISKRDQHMPTSPRKRNSVHLQKRYSNPLAPPGRRKKLFWTEEEEAVLREGMAKFTPQNNAQIPWILILEHGRGVFHRTRLPSDLRVKWRSMQRKKSDAVDMEH

SEQ ID NO: 39158 - DNA, 1100 bp, Zea mays subsp. mays
ctctccggcctctcgtccgctccaatcccgatcctatctatccggcatggccgccgccgcaggcccgccgtcgcacagcgcggacctgatgccgccgccgccccctccgcccgtcctgacgacgactgcgccccgtcctcgccgccgcgcaagggaagtcagctcccggtacctctcaacgcccgtcccctcgaccccgcgcctctccaccgcctcctccacgcggtcgcgctccccgtcgccgacgccgtcgcctcgtggacggcagcgggcggtcacgcccttcgccaacgagaaccacccacccccgccgccgcctcccacgggcaccgttgcgcgccggcgggccgtccagaagcttttcgaggaaatcggcgccggcaacccgcgcgcctcggtgagctccaactcctccgccgtgcccgcagctactccgcggccgctcccgcgctccaccagcgggccggccgcacccaccgcgcggagagggtacccgcgccttccgacgcccgcgcgtgctggctcctgcccggcttccggcgcggtggattccgacaccgcctcttgctgctcttcgtctgatacgtcgtccacggccactgacttgtctgaggcggatcgggcgctcgggatggctccagccgcgccgtgcgagagcccgccgctgctgggcccagcgtcctgccgcgggggacgcctttcgtcagagctctgctcgtcggtgccggagtcgggcggatcctcgcgggcgtccaacccactgtgctaccgctcgctcaactcggcactgtcaatctcaacggcgatggctgggaagttgacggcggcagggaggccaccacagccgcaagggccgaaggtagctgatctgaagaaggcggcgatcctggggggcaggaaggttgcggggaagcaggaagacgtgcacctgctgcggctgatggacaattcgtacctccagtacaagttcctcaacgcccgggctgaggcagcaggcaaggcccaggcggcggctgcagagaaatccttgtacggagtcgaggagaggattgccagcctcagggtatctgtcgccgagaagagagcagaggtagagagga

SEQ ID NO: 39159 - protein, 366 aa, Zea mays subsp. mays
SPASRPLQSRSYLSGMAAAAGPPSHSADLMPPPPPPPVLTTTAPRPRRRAREVSSRYLSTPVPSTPRLSTASSTRSRSPSPTPSPRGRQRAVTPFANENHPPPPPPPTGTVARRRAVQKLFEEIGAGNPRASVSSNSSAVPAATPRPLPRSTSGPAAPTARRGYPRLPTPARAGSCPASGAVDSDTASCCSSSDTSSTATDLSEADRALGMAPAAPCESPPLLGPASCRGGRLSSELCSSVPESGGSSRASNPLCYRSLNSALSISTAMAGKLTAAGRPPQPQGPKVADLKKAAILGGRKVAGKQEDVHLLRLMDNSYLQYKFLNARAEAAGKAQAAAAEKSLYGVEERIASLRVSVAEKRAEVER

SEQ ID NO: 39160 - protein, 351 aa, Zea mays subsp. mays
MAAAAGPPSHSADLMPPPPPPPVLTTTAPRPRRRAREVSSRYLSTPVPSTPRLSTASSTRSRSPSPTPSPRGRQRAVTPFANENHPPPPPPPTGTVARRRAVQKLFEEIGAGNPRASVSSNSSAVPAATPRPLPRSTSGPAAPTARRGYPRLPTPARAGSCPASGAVDSDTASCCSSSDTSSTATDLSEADRALGMAPAAPCESPPLLGPASCRGGRLSSELCSSVPESGGSSRASNPLCYRSLNSALSISTAMAGKLTAAGRPPQPQGPKVADLKKAAILGGRKVAGKQEDVHLLRLMDNSYLQYKFLNARAEAAGKAQAAAAEKSLYGVEERIASLRVSVAEKRAEVER

SEQ ID NO: 39161 - protein, 337 aa, Zea mays subsp. mays
MPPPPPPPVLTTTAPRPRRRAREVSSRYLSTPVPSTPRLSTASSTRSRSPSPTPSPRGRQRAVTPFANENHPPPPPPPTGTVARRRAVQKLFEEIGAGNPRASVSSNSSAVPAATPRPLPRSTSGPAAPTARRGYPRLPTPARAGSCPASGAVDSDTASCCSSSDTSSTATDLSEADRALGMAPAAPCESPPLLGPASCRGGRLSSELCSSVPESGGSSRASNPLCYRSLNSALSISTAMAGKLTAAGRPPQPQGPKVADLKKAAILGGRKVAGKQEDVHLLRLMDNSYLQYKFLNARAEAAGKAQAAAAEKSLYGVEERIASLRVSVAEKRAEVER

SEQ ID NO: 39162 - DNA, 1032 bp, Zea mays subsp. mays
agcttgtccctggaatgcaaattgctacagatattatctgtggctttcctggtgagaccgacgaagatttctctgagactgttaacctcgtaaaggaatatcaattccctcaagtccacatttcgcagttctaccccagaccagggacgcctgctgctaggatgaagaaagtaccaagcaacgaagtgaagaagcggagccgtgaattgacttcagtcttcgaatcgttttcgccataccaaggaatggaaggcaaagtagagaagatctggatcaccgagattgcgtctgatggtgttcacctggtcggacataccaagggatacatccaggtgctggtaactgctcctgatagcatgttgggaacgtccgcggacgcgaagatcacgtctgtcggacgatggtccgtcttcggtgtagtggtagaaggatctgttgcagtcatagaagcaccaatacaaactagtgccgaactgcaggaggaacacgtacagaatcaggtggaggaagctggttgctgtgccaccgactcctgtggcgcctgcgcgtgctccaatgaggcgcaaccgtgtggcccagaccgatgtggagatgcacttcgtgccccgcagacctgtggtggtgacgttgttacaactcgccaggaggcactccagcctacgctcgtgaggagaagcgtagatggaaccacgaaaggaagcgacagtactgcggcgcattcagcagggaaggaacagcgggtggaagtagtgactaggcgtggggtagatatcgacacggttctgtggtgcggtttggccgcgagcttcgctgtgacggtagccctgcttgcactcctcaccagcaagattttgtcgacgacatcacactagggctaataaggcgaagctttgtaacttgtggtttggttcttgagcgtgtcgctggatcgattttggcggtctctttctttacttgatccgcctgtatgtcgttgcaaaaaactgtgccactgtatacaaaaacacgtggttgcaaacaagttttctcgtt

SEQ ID NO: 39163 - protein, 289 aa, Zea mays subsp. mays
LVPGMQIATDIICGFPGETDEDFSETVNLVKEYQFPQVHISQFYPRPGTPAARMKKVPSNEVKKRSRELTSVFESFSPYQGMEGKVEKIWITEIASDGVHLVGHTKGYIQVLVTAPDSMLGTSADAKITSVGRWSVFGVVVEGSVAVIEAPIQTSAELQEEHVQNQVEEAGCCATDSCGACACSNEAQPCGPDRCGDALRAPQTCGGDVVTTRQEALQPTLVRRSVDGTTKGSDSTAAHSAGKEQRVEVVTRRGVDIDTVLWCGLAASFAVTVALLALLTSKILSTTSH

SEQ ID NO: 39164 - protein, 285 aa, Zea mays subsp. mays
MQIATDIICGFPGETDEDFSETVNLVKEYQFPQVHISQFYPRPGTPAARMKKVPSNEVKKRSRELTSVFESFSPYQGMEGKVEKIWITEIASDGVHLVGHTKGYIQVLVTAPDSMLGTSADAKITSVGRWSVFGVVVEGSVAVIEAPIQTSAELQEEHVQNQVEEAGCCATDSCGACACSNEAQPCGPDRCGDALRAPQTCGGDVVTTRQEALQPTLVRRSVDGTTKGSDSTAAHSAGKEQRVEVVTRRGVDIDTVLWCGLAASFAVTVALLALLTSKILSTTSH

SEQ ID NO: 39165 - protein, 236 aa, Zea mays subsp. mays
MKKVPSNEVKKRSRELTSVFESFSPYQGMEGKVEKIWITEIASDGVHLVGHTKGYIQVLVTAPDSMLGTSADAKITSVGRWSVFGVVVEGSVAVIEAPIQTSAELQEEHVQNQVEEAGCCATDSCGACACSNEAQPCGPDRCGDALRAPQTCGGDVVTTRQEALQPTLVRRSVDGTTKGSDSTAAHSAGKEQRVEVVTRRGVDIDTVLWCGLAASFAVTVALLALLTSKILSTTSH

SEQ ID NO: 39166 - DNA, 1145 bp, Zea mays subsp. mays
gccgatctaacgggaacgcgtctcacagcttccacgcgactgcaccgtggcacccgaggctcgcccccgctgagccagcggagcgaatctccatggcctccacatcctcctccaggtacgcgaaacatcgtcggatcggagaggacgatgagtcggaggaggttgaggaggaggccgaagaggagcttgagcggttcgatgatttcaccattgcttcgtcatgggaaaagtttatatctgagatagaggctatttgccgtcaatggcttgcagatggcgcaaagatcttaatgcaaaaaggtgcagagggtgttcctccttttgaaaacttatatatgatcaagcgtgaattgaagcatgggaaaagagtctattctatggagtaccatttcatgaaatctgtaaaaggtcaaaactcatattgggacgatgatacacatagcatgcagctctcatttggagttgatgagtttttgataattgctccgctgagtgccagtggtgtgatcctcgatgatccagaatcaactaagcttttgagttctgtagcaattgctctttctaattgtggcagcaattggccagcgtttgtaccagttcacgacccttcacggaaagcctatatagggattcaaaatttgggaactgtatttactcgaagatttgaagctgaccgaattggtagtcaagtgccaataagactcatgcatctggaggggttacatgagctatttctatcaaaatttgtcctatcctcgtcagattttccagctagggtaaaggttcacttctcaatgaagcttagctacaagaccccagaatatgatcatgataatgaaactttagattctgaagctactgagccattgactgaaaatgaagttgcgaaacaccctagaaaactatgggacgatgattgcccttgggcagagtggtactctgctgaggatcctgttaaaggttttgagttgactgccatctggggagagaggacatttgaagagacccttgagatggctgaagtggaaaatgcctcgtcctttgatgctgatagctggttccttcacccagttgtatctcaatacatgtaaccttttttatttgtaaatcccttgttaaccttctgcaagtaatttctatttcat

SEQ ID NO: 39167 - protein, 362 aa, Zea mays subsp. mays
RSNGNASHSFHATAPWHPRLAPAEPAERISMASTSSSRYAKHRRIGEDDESEEVEEEAEEELERFDDFTIASSWEKFISEIEAICRQWLADGAKILMQKGAEGVPPFENLYMIKRELKHGKRVYSMEYHFMKSVKGQNSYWDDDTHSMQLSFGVDEFLIIAPLSASGVILDDPESTKLLSSVAIALSNCGSNWPAFVPVHDPSRKAYIGIQNLGTVFTRRFEADRIGSQVPIRLMHLEGLHELFLSKFVLSSSDFPARVKVHFSMKLSYKTPEYDHDNETLDSEATEPLTENEVAKHPRKLWDDDCPWAEWYSAEDPVKGFELTAIWGERTFEETLEMAEVENASSFDADSWFLHPVVSQYM

SEQ ID NO: 39168 - protein, 332 aa, Zea mays subsp. mays
MASTSSSRYAKHRRIGEDDESEEVEEEAEEELERFDDFTIASSWEKFISEIEAICRQWLADGAKILMQKGAEGVPPFENLYMIKRELKHGKRVYSMEYHFMKSVKGQNSYWDDDTHSMQLSFGVDEFLIIAPLSASGVILDDPESTKLLSSVAIALSNCGSNWPAFVPVHDPSRKAYIGIQNLGTVFTRRFEADRIGSQVPIRLMHLEGLHELFLSKFVLSSSDFPARVKVHFSMKLSYKTPEYDHDNETLDSEATEPLTENEVAKHPRKLWDDDCPWAEWYSAEDPVKGFELTAIWGERTFEETLEMAEVENASSFDADSWFLHPVVSQYM

SEQ ID NO: 39169 - protein, 266 aa, Zea mays subsp. mays
MQKGAEGVPPFENLYMIKRELKHGKRVYSMEYHFMKSVKGQNSYWDDDTHSMQLSFGVDEFLIIAPLSASGVILDDPESTKLLSSVAIALSNCGSNWPAFVPVHDPSRKAYIGIQNLGTVFTRRFEADRIGSQVPIRLMHLEGLHELFLSKFVLSSSDFPARVKVHFSMKLSYKTPEYDHDNETLDSEATEPLTENEVAKHPRKLWDDDCPWAEWYSAEDPVKGFELTAIWGERTFEETLEMAEVENASSFDADSWFLHPVVSQYM

SEQ ID NO: 39170 - DNA, 659 bp, Zea mays subsp. mays
aggcctactaccaaccagcctccgcgtccaagatctccctcccacggcccgctcggactccccggcgcaatggcgaccgacgcgatcctggagacgatcaagccgcggcggagcgaggagcagctcccggtgaccacggcggccgccgccgccggcaccaggctgcggcggcgcgtgtcctcgttctcggcgcacgtgaggccgccgccggggctgtcgtcctcggcggcagcggcgttccggcgcgcgaggtcgatgccgtccgccaaggcgctggcggcggcgggagcgctgcggcggtggtgggagtgggtgacggcgccgttcgcgccccgcggcggcggcgacgacgacgacgacgaggcaaggccgctgggcgggtgccgctgcgcctgcgccggcggaccgggcgggtggcgccacgtcctggtcaggctccgcgccggcgcgcgccgcctgctgggccgcgacggccgcccgctcaaggccgccgcgccgccggacttcggctacgactccgtcagctacgcgcgcaacttcgacgacggcgaggcgtgatgcgcgggtgatgccgagccgaggtggtggcgggacggccgtggcggtggcggccgggcgtggatcacaggatcagcagtggtccagctgtcgcaataaag

SEQ ID NO: 39171 - protein, 188 aa, Zea mays subsp. mays
AYYQPASASKISLPRPARTPRRNGDRRDPGDDQAAAERGAAPGDHGGRRRRHQAAAARVLVLGAREAAAGAVVLGGSGVPAREVDAVRQGAGGGGSAAAVVGVGDGAVRAPRRRRRRRRRGKAAGRVPLRLRRRTGRVAPRPGQAPRRRAPPAGPRRPPAQGRRAAGLRLRLRQLRAQLRRRRGVMRG

SEQ ID NO: 39172 - protein, 185 aa, Zea mays subsp. mays
RPTTNQPPRPRSPSHGPLGLPGAMATDAILETIKPRRSEEQLPVTTAAAAAGTRLRRRVSSFSAHVRPPPGLSSSAAAAFRRARSMPSAKALAAAGALRRWWEWVTAPFAPRGGGDDDDDEARPLGGCRCACAGGPGGWRHVLVRLRAGARRLLGRDGRPLKAAAPPDFGYDSVSYARNFDDGEA

SEQ ID NO: 39173 - protein, 162 aa, Zea mays subsp. mays
MATDAILETIKPRRSEEQLPVTTAAAAAGTRLRRRVSSFSAHVRPPPGLSSSAAAAFRRARSMPSAKALAAAGALRRWWEWVTAPFAPRGGGDDDDDEARPLGGCRCACAGGPGGWRHVLVRLRAGARRLLGRDGRPLKAAAPPDFGYDSVSYARNFDDGEA

SEQ ID NO: 39174 - DNA, 1067 bp, Zea mays subsp. mays
aaagatttgatttttttttctcggggaggagccggagtccgagcagcagtggcggctggagggaggagatcctgatctgttgtcgcagcggggaggggaggaccggaggaggaagatggctgcgcaggagcaggagcaggagaagcagcaggcgaagacgagcaccacgagctcgctgccctccagcagcgagcgctcctccagctccgctcgcaacaacctcacggaaggaggggcggagagcgacgaggagatacggcgggtgccggagatgggcggcgcgtcggcgtcggcctcgtcgggcgccggcgcggatgagcgtcccaagggggaggacggcaagcaggggcaggtggcggcgggggcgcagcctccggcgggcgggaagaagcgcgggcgcaccgcgggggacaaggagcagaagctcttgcagtatatgatgctatgaggtatgttaaagttcctattttcactctgtgtgtcggtaatgcatggggagaagctgctttactcttagctgctggcgctaaaggtaaccgtgccgcacttccatcatcgacaataatgataaaacagccaattggtcgctttcaaggtcaggcaacagacgttgacattgcaagaaaagagattcgaaatgtcaagatagaaatggttaagctgctggcaagacacatcggtaaaccaatggaagagattgctcgggacatcaggcgtcctaaatactttagccccagtgaagctgtggattatggcatcatcgacaaggtgatatacaacgagaaaatccaggaagatggcggtgttgtgtcagaactcaaaagatcaaatttgatatagtgttctttttccacaagtagacacgtctttgtatgtttagtggtcattcacgtgcctttgagtattgagtagttaccactcgatcactcattagctggttgtagaggcgtagagcacatagccaatgcattgaacaagcatttccttcccccctctgccgtttcaacgctgtattgcccttacccaacgggcgtgctgaaagatgaattttggtaggttgttgaaac

SEQ ID NO: 39175 - protein, 145 aa, Zea mays subsp. mays
RFDFFFSGRSRSPSSSGGWREEILICCRSGEGRTGGGRWLRRSRSRRSSRRRRAPRARCPPAASAPPAPLATTSRKEGRRATRRYGGCRRWAARRRRPRRAPARMSVPRGRTASRGRWRRGRSLRRAGRSAGAPRGTRSRSSCSI

SEQ ID NO: 39176 - protein, 131 aa, Zea mays subsp. mays
MRYVKVPIFTLCVGNAWGEAALLLAAGAKGNRAALPSSTIMIKQPIGRFQGQATDVDIARKEIRNVKIEMVKLLARHIGKPMEEIARDIRRPKYFSPSEAVDYGIIDKVIYNEKIQEDGGVVSELKRSNLI

SEQ ID NO: 39177 - protein, 110 aa, Zea mays subsp. mays
MAAQEQEQEKQQAKTSTTSSLPSSSERSSSSARNNLTEGGAESDEEIRRVPEMGGASASASSGAGADERPKGEDGKQGQVAAGAQPPAGGKKRGRTAGDKEQKLLQYMML

SEQ ID NO: 39178 - DNA, 733 bp, Zea mays subsp. mays
attgtgatcccaaaaagctgcacttggctcttcttgcgatgtacgagaggaccgaacagtatgagcttgcagatgaacttctagacagaatgaccaaaaggttcaaaacttcctgcaagatatggttatgccgcattcagtttgctctcaagcaaggcaaggatgttgagtacatcaaagccattgtaaaccgtgcacttctaagtttgccacacagaaagcgcataaaattcctctcacaaactgctattctagaattcaaatgtggggtgcctgaagaaggaagatccagatttgaactaatattgcgggagtacccaaaaagaacagacctttggagtgtttatctagaccaagaaatccgccttggtgacgtagaagttatacgggcattgtttgagagggtgacttgtctgaccctacctccaaaaaagatgcagttcttgttcaagaagtatcttaatttcgagaagtcactgggtaaagacaacgaaagaattcagcttgtgcaacagaaggcaatcgaatatgttcagagttcactgccgtcacaagacaactcttgaactacatggagacttaataagcccacaaacaatcattaggaaataccagtcgtactgtagatgtgatctctttgatgactccttgaacattattgtgaaaaggtcaatgtaaaatgtgggctgttcaaaattttgtttgaaacctttatataagttatgagtctagt

SEQ ID NO: 39179 - protein, 187 aa, Zea mays subsp. mays
CDPKKLHLALLAMYERTEQYELADELLDRMTKRFKTSCKIWLCRIQFALKQGKDVEYIKAIVNRALLSLPHRKRIKFLSQTAILEFKCGVPEEGRSRFELILREYPKRTDLWSVYLDQEIRLGDVEVIRALFERVTCLTLPPKKMQFLFKKYLNFEKSLGKDNERIQLVQQKAIEYVQSSLPSQDNS

SEQ ID NO: 39180 - protein, 175 aa, Zea mays subsp. mays
MYERTEQYELADELLDRMTKRFKTSCKIWLCRIQFALKQGKDVEYIKAIVNRALLSLPHRKRIKFLSQTAILEFKCGVPEEGRSRFELILREYPKRTDLWSVYLDQEIRLGDVEVIRALFERVTCLTLPPKKMQFLFKKYLNFEKSLGKDNERIQLVQQKAIEYVQSSLPSQDNS

SEQ ID NO: 39181 - protein, 158 aa, Zea mays subsp. mays
MTKRFKTSCKIWLCRIQFALKQGKDVEYIKAIVNRALLSLPHRKRIKFLSQTAILEFKCGVPEEGRSRFELILREYPKRTDLWSVYLDQEIRLGDVEVIRALFERVTCLTLPPKKMQFLFKKYLNFEKSLGKDNERIQLVQQKAIEYVQSSLPSQDNS

SEQ ID NO: 39182 - DNA, 634 bp, Zea mays subsp. mays
gaaatttcttcctcaactggaagccgacgagaattattaacagctgagatgcaccttaaaagtaccttgaaacagacgatggacttctcagacactgaggagtacaaagctcttgataactgtcttgaagaaataaagaacctgattgccgctactgtttaggttgttgcatccaagttttggacgctggttatgataatgtattgtccgtttctaattaagcatttctattgttgtcttgttgggaatcaagatcacattatcggactctgttagcacacacaaggatgccaagacaagtgaacctgcgccagagactggaagcgaagatggtgtgctgctacagccaagattaaaaaggaagcttaagcccaatagcaaggtgtccggcctagagtgggttcgttgactgtaatagtgtggcccagtcgttgtgccatatgtatggcttcagtctgtaaactgggacatcgaaaaaaagaacagaaaacactactgcctatcttcttcccctcttccaagtcttctccttccctgccgccgtcttgctttccccttcctcctggaagctaacagttgtatcaaagaccatcgttcctcggatctggattctatccactacactcgccgtgcc

SEQ ID NO: 39183 - protein, 53 aa, Zea mays subsp. mays
EISSSTGSRRELLTAEMHLKSTLKQTMDFSDTEEYKALDNCLEEIKNLIAATV

SEQ ID NO: 39184 - protein, 42 aa, Zea mays subsp. mays
MASVCKLGHRKKEQKTLLPIFFPSSKSSPSLPPSCFPLPPGS

SEQ ID NO: 39185 - protein, 37 aa, Zea mays subsp. mays
MHLKSTLKQTMDFSDTEEYKALDNCLEEIKNLIAATV

SEQ ID NO: 39186 - DNA, 801 bp, Zea mays subsp. mays
gatttattacataagaagggcaatatgattgatctaaatggttctcaggtggagatcaagaaggcagaaccaaagaaaccctctaaccaaccacctcgttcacttgatagtgagcctaggggccgtccatatgcagacagttatgatggatttggcagctcttacaattatggtggtagttttggtccctatagatcacctcgaagttttggcgctaggcctagcagctacagtagtgcttatggtcctggtgattatggtagtggctatgctacttatggtggagcattagtaggataccgtgaaccttccctttattctagtcgctatggtagcacttatggaggcagccttggtggtgggtatggtggtgttagttatgatggtggattagctggtgcatatgagcgtgatgctgggggctatggtggttctagctatggtcgtagttatgactcttcctgggctaatactggtgatgggtttggcaccggtggactctatggtgctaggacaggctatggtggcagtggcggcagtggtgctgctggtcgttaccatccatatggaagatagaaaatctccagtgctgctgtttgctagagaagcttgcagaagatgaattctagatgtgtgctcaagagatcatctgcatctaaaagatgcactgaagttcaatatgctcagttttctgtattaggaagtactgttagatcaacttgtagaaatttaaacctttgttttggtatttggaattggaatttaagcatatttgataagcgtatgcacttttatagatag

SEQ ID NO: 39187 - protein, 191 aa, Zea mays subsp. mays
DLLHKKGNMIDLNGSQVEIKKAEPKKPSNQPPRSLDSEPRGRPYADSYDGFGSSYNYGGSFGPYRSPRSFGARPSSYSSAYGPGDYGSGYATYGGALVGYREPSLYSSRYGSTYGGSLGGGYGGVSYDGGLAGAYERDAGGYGGSSYGRSYDSSWANTGDGFGTGGLYGARTGYGGSGGSGAAGRYHPYGR

SEQ ID NO: 39188 - protein, 183 aa, Zea mays subsp. mays
MIDLNGSQVEIKKAEPKKPSNQPPRSLDSEPRGRPYADSYDGFGSSYNYGGSFGPYRSPRSFGARPSSYSSAYGPGDYGSGYATYGGALVGYREPSLYSSRYGSTYGGSLGGGYGGVSYDGGLAGAYERDAGGYGGSSYGRSYDSSWANTGDGFGTGGLYGARTGYGGSGGSGAAGRYHPYGR

SEQ ID NO: 39189 - DNA, 1077 bp, Zea mays subsp. mays
ctctggccccgcccctgacggttccgggccccgcgaagcttagtcccttctttgttaagccaggacccgcccacggtctattcatagggtcccaaaccactttggccacaacacccccagactggtccgaagcctcgtgagttcgccctggtcgttgcactccagcctgtcgctgtgcagacctggcttagaggacccctaaggctgaggggtcacttccagaactgagtccggtccgcaggttctgctacgctccagccagcccctaactggtccccagaagcggcgctgctacagggaccaggagctgctgcgaactgcgctggcgggggctcgtccttgggcgcggggcttcatcatggacacgctctcggcccaggccgcgaaacaagcccgcgtgactggcggaggcacagagaccaaggccgcttaacctggctggttgcactggtccctggagagagggcgtcccctgcaggagagcttcatgcgcctggtggaggcctgtggggactcggagcaaagcatggacaactggttgagtcggctggacggctgccgctgactgtaacatgtaaagcaggcactgagcaccacctgcctggcagtccagggcatggagagatgccgtgtgaagggaggactcagatgcactccctgtggtctgggctcaaccagccaaaagagcaacaaagactccagaacccactctacctcctcaatcccttggccatctgtggagccccagagcctgcggctgtggcaaggcctgtttctgcgctggacctgctcacctgagcctgcagaagctgcatgggggaagagtgtggcaaatagtgacaggaagggagaagacagaagcctctcagccaactgcttcagccgagcccctattttaagcactggctccttggatagcagctgagatgttcctgaaacctctgcaggccccttaggacctttacaccttggatgagggtgcctgcaacccaggttagccaaaagtactgagggtcttaagtttgaagtgtccaaagtatagggaggtctcaataataaaagtctccatgatcagct

SEQ ID NO: 39190 - protein, 102 aa, Zea mays subsp. mays
MERCRVKGGLRCTPCGLGSTSQKSNKDSRTHSTSSIPWPSVEPQSLRLWQGLFLRWTCSPEPAEAAWGKSVANSDRKGEDRSLSANCFSRAPILSTGSLDSS

SEQ ID NO: 39191 - protein, 57 aa, Zea mays subsp. mays
MPCEGRTQMHSLWSGLNQPKEQQRLQNPLYLLNPLAICGAPEPAAVARPVSALDLLT

SEQ ID NO: 39192 - DNA, 987 bp, Zea mays subsp. mays
aaagaagctgccaattctgaaggaggaggagacagagatcaaggccaagtttgttgagaaggaaggggccaaagactcgggtggtggcgcagggtctgtgggaggaaagagtaaagagggaaagaaagacagagagagaaaggaggaggagaagtcggtggagcatgaatatggcgaaggcgatgagaaggcgatcaagaagaaggataaaaaggagaaagacaagaaaaagaaggaagatgatggagattctgggaaggcagagaaagataaggaggataagaaggctaaagagaaggatggatcagagttgaagggttcaagtggtgagaaacaagagaaaatcaaagataagaaagagacaggagatggcaaagatgtgggggaggaagagaaacgcaagaagataggaaacaaagacaaagataagaaggataaaaaggccaaagaaaaggatgtatcggaaccaaagggtgacaaggatgaagatggtaagaagaaagaggccgatggcgatgaagacgaagaaggtaagaaggaggacaaggaaaagaaagagaagaagaggaaacacaagggtgcaaaggagaagacgaccgatccggtgaagctgaaggcaaaactggagaagatcgatgccaaattgcatgacctacaggccaagagagaagacatcctgaggcagctgaaaaagctggaagaaggcggcaagggaaacgcgaatgaagaggagcctgcacatgtgcaggaggacaaagggaaggatgttgtgcctgcacagatactggaacaggttggagagagcaaggtcgaggaacagaatcctgttgccacagcctgatcctgtggacctcctgtagcggttcatgtaacaataactctgatctggttttgcacacatgcattacacagtgtaaaggaatgcagccatatatggcgtgtttgaatgcctggatgggctgagacatgccctggccgtgcatcttc

SEQ ID NO: 39193 - protein, 279 aa, Zea mays subsp. mays
KKLPILKEEETEIKAKFVEKEGAKDSGGGAGSVGGKSKEGKKDRERKEEEKSVEHEYGEGDEKAIKKKDKKEKDKKKKEDDGDSGKAEKDKEDKKAKEKDGSELKGSSGEKQEKIKDKKETGDGKDVGEEEKRKKIGNKDKDKKDKKAKEKDVSEPKGDKDEDGKKKEADGDEDEEGKKEDKEKKEKKRKHKGAKEKTTDPVKLKAKLEKIDAKLHDLQAKREDILRQLKKLEEGGKGNANEEEPAHVQEDKGKDVVPAQILEQVGESKVEEQNPVATA

SEQ ID NO: 39194 - DNA, 790 bp, Zea mays subsp. mays
atttattctgcatttggctcctctgcgccatactcggcgtttcctgattcgcagcccttcctaaggtgggcacgcgaaaagggactcactgttggcatcgtcagcaatgcagaataccgctacaaagatgtaatcctgccagctttaggattgaatcagagctccgaatgggactttggggtgttctcaggtgtcgttggcgttgagaagccagacccaagaatttacaagatagcgctggagatggcaggaaacgtcgctccggaagaagcgctccacataggtgacagcatgcggaaggactacaccccagctaggagcatcgggatgcatgcgctgctcctggaccggttcaagactgccgacgctgagagctggaggcagtcaggcgccacggtgctcccggaccttgtcgccactcaagagtggctcaccaaggatcagaatgacgaacaggaggaaacagtggcagcacgagtgctgaagagaatgtccgaaaagctatagatgggggctttaaccatgcattaattctacgagtgttcctttatattatctagctatggactgaaggtccaaaagcaacttatgctgatgagaggttggtgacgattcttggctactggctactgtaattagcttgagctactattctggttgcagcatctgtggctgaacacgagtaccatatctgagtgtcataagtcatgttgcgaagaacatgagtagcatatttcaggtgccgtttggttcatatatttgtaatgtaatgggtaacggataacgttag

SEQ ID NO: 39195 - protein, 168 aa, Zea mays subsp. mays
IYSAFGSSAPYSAFPDSQPFLRWAREKGLTVGIVSNAEYRYKDVILPALGLNQSSEWDFGVFSGVVGVEKPDPRIYKIALEMAGNVAPEEALHIGDSMRKDYTPARSIGMHALLLDRFKTADAESWRQSGATVLPDLVATQEWLTKDQNDEQEETVAARVLKRMSEKL

SEQ ID NO: 39196 - protein, 87 aa, Zea mays subsp. mays
MAGNVAPEEALHIGDSMRKDYTPARSIGMHALLLDRFKTADAESWRQSGATVLPDLVATQEWLTKDQNDEQEETVAARVLKRMSEKL

SEQ ID NO: 39197 - DNA, 1112 bp, Zea mays subsp. mays
ataatcggctcacttggccccccgcgcagcccgattccatccatgccgcggcgcccgcgtccactggtgtcgcgtcgcgctgcacgcatcggtggtgccaaggtggcgacctgacgcctacaaggaggcgtccgcgccgcgcctttcccagcttctgcgcgcggcgagatagggaggaggcggagccgcggaggagagagatggacccggagaagcagcgccagcacgacggcgcggtggatgcggacatcgagcggctccccgtcgacctcctcgctcacatcctctccctcctgtcgcccttccgcgacctgtccatggcggggggagtgagccggaggtggcgctgggcggtggagcggtcgctggcgtcgcggcggcggctgagcttcgcgggccagcgcaccggcgacgacaccgccgcgcgcctcgtccgcgccgccgtcaacctccgcgacctcgacatttcacgaagctgctggggctgccgaatcaccgacgatggcctcatcaagatttcgtccgcggattgcgtcggcaacctgacgtccatatcgctctggggattggccgggatcaccgataagggcgtggtccgtctggtttcgagggcttattctctgcagcacctgaatatcggtggaacgttcatcacagatgaatccctctacgcagtcgcaaacagctgcgcaaatcttaagagcatcatcctgtggagctgccgccacgtgacggagggcgggctggtggcgctggtgaacaagtgccggcggctggagtgcatcaacgtgggcgggatgcgggtcccgccggagagcttggtgggcctgctctccatcagccccgccctggagatcaggtccaccgcacgcatcctcaacctcaacctcaacgccggggtgcaggtctcctgatccatgtgtgtgtggcttgccatgagcccatgcatcgtcagaagggactcactcaccagacacacacacgtcatcgtgttgccataatgtttgttgtaaaaaaaaaacagatacgtcatcgtgattctatatatctcctatacatgttacacacaataaaccataaaatgaactgtacggccacagtgccttgcaagc

SEQ ID NO: 39198 - protein, 303 aa, Zea mays subsp. mays
NRLTWPPAQPDSIHAAAPASTGVASRCTHRWCQGGDLTPTRRRPRRAFPSFCARRDREEAEPRRREMDPEKQRQHDGAVDADIERLPVDLLAHILSLLSPFRDLSMAGGVSRRWRWAVERSLASRRRLSFAGQRTGDDTAARLVRAAVNLRDLDISRSCWGCRITDDGLIKISSADCVGNLTSISLWGLAGITDKGVVRLVSRAYSLQHLNIGGTFITDESLYAVANSCANLKSIILWSCRHVTEGGLVALVNKCRRLECINVGGMRVPPESLVGLLSISPALEIRSTARILNLNLNAGVQVS

SEQ ID NO: 39199 - protein, 237 aa, Zea mays subsp. mays
MDPEKQRQHDGAVDADIERLPVDLLAHILSLLSPFRDLSMAGGVSRRWRWAVERSLASRRRLSFAGQRTGDDTAARLVRAAVNLRDLDISRSCWGCRITDDGLIKISSADCVGNLTSISLWGLAGITDKGVVRLVSRAYSLQHLNIGGTFITDESLYAVANSCANLKSIILWSCRHVTEGGLVALVNKCRRLECINVGGMRVPPESLVGLLSISPALEIRSTARILNLNLNAGVQVS

SEQ ID NO: 39200 - protein, 198 aa, Zea mays subsp. mays
MAGGVSRRWRWAVERSLASRRRLSFAGQRTGDDTAARLVRAAVNLRDLDISRSCWGCRITDDGLIKISSADCVGNLTSISLWGLAGITDKGVVRLVSRAYSLQHLNIGGTFITDESLYAVANSCANLKSIILWSCRHVTEGGLVALVNKCRRLECINVGGMRVPPESLVGLLSISPALEIRSTARILNLNLNAGVQVS

SEQ ID NO: 39201 - DNA, 1069 bp, Zea mays subsp. mays
agctgatcaacgccaccgccagacagcaacacactgcacacacacattgcaatggcagcggctggaggcggggtaggagatggcgagctgcggctgctgggcaagtcgtcgagcccttgggtgttccgggtgagagtggcgctgggactcagggggctgagctacgagtacatagaggaggacctcggcaacaagagcgagctcctgctccggtccaacccggtgcacaagaaggtgccggtcctcatccacggcggccgcccggtgtgcgagtcgctcgtgatcctccagtacgtcgacgagatctggcggggcaccggccctccgctccttccgtccgacccctacgaccgcgccacggcacggttctgggcggcctacgtcgacgacaaggtcgaggacggacgggcagagagcggaggcgctccagaacgccctcctcgtggcggagacgttggagcgggcgttcacggagtgctccagggggaaggcgttcttcggcggcgaccccgtctggctcgtggacgtcacgctcgggagccacccgatttggatcaaagcggtggaccagacggcgggcaccaaccttccggacggggcaaggttccctgacctggcggcgtgggcggaacggttcatggctctcggcgccgtcaacgaggtggtgccggacgccgggaagcttttggagcagtacagggcgtctcgggccaaatggactgcctctgctgattctagctgaactgatgaacacactggacccctgctgcttgcattggctacttgtgctggacaccttcagtggtacggtctcgaaccgaaataaattcataaaggcaagtttgcaaacattagtccttctacgattcttgaaaattgagtggaaattattcaatttattactcaatctccaagaatctcggaaggaatttatgttttcaaactagtcccaagttcaactactttacccgacaattagttaggggggatttgtacttggagcagtatttggtgtcaggtgatctgcgattttgtctaacactaagacctatgaaacggtgagatgacc

SEQ ID NO: 39202 - protein, 314 aa, Zea mays subsp. mays
LINATARQQHTAHTHCNGSGWRRGRRWRAAAAGQVVEPLGVPGESGAGTQGAELRVHRGGPRQQERAPAPVQPGAQEGAGPHPRRPPGVRVARDPPVRRRDLAGHRPSAPSVRPLRPRHGTVLGGLRRRQGRGRTGRERRRSRTPSSWRRRWSGRSRSAPGGRRSSAATPSGSWTSRSGATRFGSKRWTRRRAPTFRTGQGSLTWRRGRNGSWLSAPSTRWCRTPGSFWSSTGRLGPNGLPLLILAELMNTLDPCCLHWLLVLDTFSGTVSNRNKFIKASLQTLVLLRFLKIEWKLFNLLLNLQESRKEFMFSN

SEQ ID NO: 39203 - protein, 186 aa, Zea mays subsp. mays
MAAAGGGVGDGELRLLGKSSSPWVFRVRVALGLRGLSYEYIEEDLGNKSELLLRSNPVHKKVPVLIHGGRPVCESLVILQYVDEIWRGTGPPLLPSDPYDRATARFWAAYVDDKVEDGRAESGGAPERPPRGGDVGAGVHGVLQGEGVLRRRPRLARGRHAREPPDLDQSGGPDGGHQPSGRGKVP

SEQ ID NO: 39204 - DNA, 802 bp, Zea mays subsp. mays
gttgttggcacgaagccttctccagtgattgatctttctgggacagtaggtgctcaaggagttgcatttggtgcagaagctgggtatgacactgctacgggaaaatttaccaagtacactgctgcaattggtgtaaccaagccagactaccatgctgcattcattctggcggacaaaggtgacaccattaaagtgtcaggtgtttatcacctggatgagaaacagaaggcctcagctgtggctgagctaacccggaggctttcaacaaatcagaacacactcacagttggtggactgtacacagttgattctcagacagccgtgaaggcaaggctcaacaacaatggaacgcttgccgcgcttcttcagcacgagcttaaacccaagtcactcttgacgatctctggtgaattcgacaccaaggccctggacagaccccccaagtttggcttggcgcttgcactgaagccctgatcagatcatcccacagcgattgctggtgaattttgaattctttggttgtttttcgcaaagctgtagccaataatccgttccacgaaccttttctgttattctggcaaacgtttggagcactgtggcttagatccggatgggtcgtctacaggaattttacctgcctgcttttattgttgaaagcatctggccgtcggtagatgtacattgtgcttgcttctttagcacctaggcctctgccactgtgttactgagtacacgctacggtaatcttttgcatgcaggactagcatgataattttgtgcggtgtttgatttaccgctcttg

SEQ ID NO: 39205 - protein, 157 aa, Zea mays subsp. mays
VVGTKPSPVIDLSGTVGAQGVAFGAEAGYDTATGKFTKYTAAIGVTKPDYHAAFILADKGDTIKVSGVYHLDEKQKASAVAELTRRLSTNQNTLTVGGLYTVDSQTAVKARLNNNGTLAALLQHELKPKSLLTISGEFDTKALDRPPKFGLALALKP

SEQ ID NO: 39206 - DNA, 1144 bp, Zea mays subsp. mays
  misc_feature (782)..(782): n is a, c, g, or t
accctagactgcttctgcagtggcagcaccgccgtcaccgtcctcaagctcggctcggatctctacatggccaacattggtgactcgcgcgccgtgctaggctcaagggacggcggcggcatggtggccgtgcaactgactgtcgacctcaaaccagatgttcccagcgaggcagaacggatcaagaagtgcaggggcagggtatttgctctgcaggacgaaccggaggtgcctcgggtctggctgccgttcgacgacgcgccaggcctggcgatggcccgggcgtttggggacttctgcctcaaggattatggtgtcatttcggttccagagttcttccactggtcgctcacggagaaggaccagttcgtcatccttgcatcagatggggtgtgggatgtccttagcaaccaggaggccgttgacatcgtgtcgtcgtccccaagccgatcaaaggcctcgagatccctggtcgaggccgccgctcgtgtaaagccaagtacccgacatcgaagaccgacgactgcgcggtggtctgcctatacttggacggcaagatggaccacgaacgcgactcgacggcgtccatggacaacatcagcctggactacgaaggctcagccgcggacccgaacgaagcgcaggagctgcaggagccggcgctgacccgcaacttcacggtccggacggtggccggaagtgcccacgagaaggcgctgtcgggggcggcagacgcggccgtcgccgtcggcggcggcgcagcctgcgcccacgaccagagnctggtcgggccttgatggggtgacgcgggtgaactcgctcgtccagctccctaggttctccgaggagaaggcggcggttggctgatgagccgccggctgctgcatgcgattctttggttttggttgttgagttgtttgtttcctcgttttttttggaaatctagtttagtagtcgccccgttgttgtttgagaggaagggacacggtagaaacagaaatatggtgttgtgatttgcatcggcgcgcgcgtaagctggtgtgtttgagccactgtggtggactggtggtggtggttagggtgtgagctgcgacatttagcacagcaagagatgtgctttctggaaagtacagagggttcaccc

SEQ ID NO: 39207 - protein, 221 aa, Zea mays subsp. mays
TLDCFCSGSTAVTVLKLGSDLYMANIGDSRAVLGSRDGGGMVAVQLTVDLKPDVPSEAERIKKCRGRVFALQDEPEVPRVWLPFDDAPGLAMARAFGDFCLKDYGVISVPEFFHWSLTEKDQFVILASDGVWDVLSNQEAVDIVSSSPSRSKASRSLVEAAARVKPSTRHRRPTTARWSAYTWTARWTTNATRRRPWTTSAWTTKAQPRTRTKRRSCRSRR

SEQ ID NO: 39208 - protein, 199 aa, Zea mays subsp. mays
MANIGDSRAVLGSRDGGGMVAVQLTVDLKPDVPSEAERIKKCRGRVFALQDEPEVPRVWLPFDDAPGLAMARAFGDFCLKDYGVISVPEFFHWSLTEKDQFVILASDGVWDVLSNQEAVDIVSSSPSRSKASRSLVEAAARVKPSTRHRRPTTARWSAYTWTARWTTNATRRRPWTTSAWTTKAQPRTRTKRRSCRSRR

SEQ ID NO: 39209 - protein, 181 aa, Zea mays subsp. mays
MVAVQLTVDLKPDVPSEAERIKKCRGRVFALQDEPEVPRVWLPFDDAPGLAMARAFGDFCLKDYGVISVPEFFHWSLTEKDQFVILASDGVWDVLSNQEAVDIVSSSPSRSKASRSLVEAAARVKPSTRHRRPTTARWSAYTWTARWTTNATRRRPWTTSAWTTKAQPRTRTKRRSCRSRR

SEQ ID NO: 39210 - DNA, 946 bp, Zea mays subsp. mays
ctcaatcctgtccgatgtgatcccggggtttccattccgcagatgacgagctggcacctggaggaggcgctgcagctgttctacatcgacggcgagtccgccctcaccgcggcgcatcctgtggccccgccgcccacgtcggcggccgcgtcggcgttggcggcagcggccggggcggaagaggcgatgaggttcgctccacccccggcggctgcactgggcgatgcaatgttgcatggatttggggtcggggaggacgacgacgtccgcgcgcctctgcctgtgaagagggagactctctacggcgagggcatcgtatccgtcatgcgacctaatgcatcagctgcatttcgtaactttgaacaagaagcaagacaatctgctgtttgggactctgaccagaatgctacatctagttctggtgataatcttgcttctttataccgtccacctttttctttgatgttcaacggaccctttgacaaggcaaagttagaggcttcttccctggacaaatggctattaatcaatttgcagtcgacagcggaatttagctctcacatgcttaatcgagacacttggggaaatgatgcggtggctcagttgattcggtcaaattttattttctggcaggtttattatgacaccagtgaggggaggaaggtatgcacgtactaccatttggtgtccatgcctgctattctcctaattgaccccgtcactgggcaaaaaatgcatgcttggaatggaatggttcacccagatcgtttacttgaggatttactaccttacctggataaaggtccgaaggagcaccatgcagctcaacctcaaaagcgcccaaggaaagttgatccggaagcttctcgggcaagcaaggcaaaatagctgtagaggatgaagatgaagagctagcacgggcagtagcagcttctctagaggagag

SEQ ID NO: 39211 - protein, 295 aa, Zea mays subsp. mays
LNPVRCDPGVSIPQMTSWHLEEALQLFYIDGESALTAAHPVAPPPTSAAASALAAAAGAEEAMRFAPPPAAALGDAMLHGFGVGEDDDVRAPLPVKRETLYGEGIVSVMRPNASAAFRNFEQEARQSAVWDSDQNATSSSGDNLASLYRPPFSLMFNGPFDKAKLEASSLDKWLLINLQSTAEFSSHMLNRDTWGNDAVAQLIRSNFIFWQVYYDTSEGRKVCTYYHLVSMPAILLIDPVTGQKMHAWNGMVHPDRLLEDLLPYLDKGPKEHHAAQPQKRPRKVDPEASRASKAK

SEQ ID NO: 39212 - protein, 281 aa, Zea mays subsp. mays
MTSWHLEEALQLFYIDGESALTAAHPVAPPPTSAAASALAAAAGAEEAMRFAPPPAAALGDAMLHGFGVGEDDDVRAPLPVKRETLYGEGIVSVMRPNASAAFRNFEQEARQSAVWDSDQNATSSSGDNLASLYRPPFSLMFNGPFDKAKLEASSLDKWLLINLQSTAEFSSHMLNRDTWGNDAVAQLIRSNFIFWQVYYDTSEGRKVCTYYHLVSMPAILLIDPVTGQKMHAWNGMVHPDRLLEDLLPYLDKGPKEHHAAQPQKRPRKVDPEASRASKAK

SEQ ID NO: 39213 - protein, 233 aa, Zea mays subsp. mays
MRFAPPPAAALGDAMLHGFGVGEDDDVRAPLPVKRETLYGEGIVSVMRPNASAAFRNFEQEARQSAVWDSDQNATSSSGDNLASLYRPPFSLMFNGPFDKAKLEASSLDKWLLINLQSTAEFSSHMLNRDTWGNDAVAQLIRSNFIFWQVYYDTSEGRKVCTYYHLVSMPAILLIDPVTGQKMHAWNGMVHPDRLLEDLLPYLDKGPKEHHAAQPQKRPRKVDPEASRASKAK

SEQ ID NO: 39214 - DNA, 1013 bp, Zea mays subsp. mays
gaataacatgcttcatttctaggttcccttttccattttttctagcgccctctgcctccatccaccgacgcggcgcccgacgcccgacgccgcactcacctcgcctcgctgaatcgtccccgccagacgtcgggtgcccgacgctgcagcacggcagccgcacaaccgcagctcccaccgctgccgcgctcctccgcgcaacctcgatcgcgcacagaggcccattccgccgaggagtggcacgaggagagacgacaggtgcggggatggggtcagttttgctgccaacgctgcggctgaagagtgaggtcgacgccgccatccgcgacaccctcgataaggtcctcgttctccgatttggtcgcgccaccgacgccacttgcctccacctagatgacatcctggctaaatcttcttgggacatatccaagtttgctatggtagcattagttgacatggactctgaggagattcaagtttacattgactactttgacatcactttggttccagcaaccattttcttcttcaatgcccatcacatgaagatggattcagggacacctgaccacacaaaatggataggttcttttagcagcaaacaggactttatcgatgtagttgaggcaatattcagaggtgcgatgaaaggcaaactgatagtgtcttgcccccttcctcctgagaggataccaagattccagcttcttttcaaggatgtctgagaaaactccaactcatcacgtgcacacaatcagctacctagcccaaggtaactaggtaagtagaaaagctgaagcttctataagagaagcacaacagaggggacagtgcaaggcgtgttcgtgcttcgaagaaacctaattgtgctggaaacagccattttcattctcaagattgtttgcgcaaatctctgcactaatctaatgtttttcttgtccatattgcatgtttaagtttgtatttaatcacgttcatcaaatatgacgggtatagatttcttgtctggtgtt

SEQ ID NO: 39215 - protein, 240 aa, Zea mays subsp. mays
ITCFISRFPFPFFLAPSASIHRRGARRPTPHSPRLAESSPPDVGCPTLQHGSRTTAAPTAAALLRATSIAHRGPFRRGVARGETTGAGMGSVLLPTLRLKSEVDAAIRDTLDKVLVLRFGRATDATCLHLDDILAKSSWDISKFAMVALVDMDSEEIQVYIDYFDITLVPATIFFFNAHHMKMDSGTPDHTKWIGSFSSKQDFIDVVEAIFRGAMKGKLIVSCPLPPERIPRFQLLFKDV

SEQ ID NO: 39216 - protein, 152 aa, Zea mays subsp. mays
MGSVLLPTLRLKSEVDAAIRDTLDKVLVLRFGRATDATCLHLDDILAKSSWDISKFAMVALVDMDSEEIQVYIDYFDITLVPATIFFFNAHHMKMDSGTPDHTKWIGSFSSKQDFIDVVEAIFRGAMKGKLIVSCPLPPERIPRFQLLFKDV

SEQ ID NO: 39217 - DNA, 1100 bp, Zea mays subsp. mays
aaaacttagagagtgaaggttgaaagactcccgcgctttacgggtttggacctcacctcatacagtacgctcggctctactgggcagatgcacccatctgtttcgcggagaagcccgtcctcgtcggagactcggagtgtagaggactagaggggcgaagcgatccgaactccgagaaccccagggccagggctcagtccacagcgagagcagagaacgcagcggcctgccggcctccgcccctcactcccgcagccatggccgccgccgccgccgtggttgccgagcccaagaccaagtacgatcgccagctcaggaaagcagacatcgttttggttgctgcacgttcatatggtctaactggtttggtcagggttagcgtcaaggagcactgtgttatagaatcaaaaccagatcacttcttggatgatttgcgacttcacaatccatggactgaactaaagcaatttgcaaaatcaattgatataaatgataaagatcctgttgtccacaaacatactccatacattgttgtccttgtgagacttgctgaaaaatgggcagatgcccatgatggtaacatgccttcaactaggcaagaaaagaaggaatttaaggacctaattcgagcccacatgcttaatgtagatgaagaaaattacaaagaagctgtggactcttcatataaagtctcagtcactccaggaatcagtaatgagatccatcagataattgatgatgactctgcggaagtcaattcatcatcagaagatttctggattttagtggctgctttaaaggagtttatttccaaggagggtaatggtgagctacctctggagggaacaatacctgatatgacttcccttactgagagaagaagaggtgctccaaaggtgatgataaatttgcccaatcagcacgcatgcagtcttcaacgatggttctgctttcttttcactgagtggaggggcctcaacatagacaatgggttcaaacgtttccgtgttttgatatgtgttaattattgtaatgtcatgtatgctttcctgagaactaaaatacacggtcaaacatggtaaacccttttatttctgttc

SEQ ID NO: 39218 - protein, 274 aa, Zea mays subsp. mays
MAAAAAVVAEPKTKYDRQLRKADIVLVAARSYGLTGLVRVSVKEHCVIESKPDHFLDDLRLHNPWTELKQFAKSIDINDKDPVVHKHTPYIVVLVRLAEKWADAHDGNMPSTRQEKKEFKDLIRAHMLNVDEENYKEAVDSSYKVSVTPGISNEIHQIIDDDSAEVNSSSEDFWILVAALKEFISKEGNGELPLEGTIPDMTSLTERRRGAPKVMINLPNQHACSLQRWFCFLFTEWRGLNIDNGFKRFRVLICVNYCNVMYAFLRTKIHGQTW

SEQ ID NO: 39219 - protein, 166 aa, Zea mays subsp. mays
MPSTRQEKKEFKDLIRAHMLNVDEENYKEAVDSSYKVSVTPGISNEIHQIIDDDSAEVNSSSEDFWILVAALKEFISKEGNGELPLEGTIPDMTSLTERRRGAPKVMINLPNQHACSLQRWFCFLFTEWRGLNIDNGFKRFRVLICVNYCNVMYAFLRTKIHGQTW

SEQ ID NO: 39220 - protein, 148 aa, Zea mays subsp. mays
MLNVDEENYKEAVDSSYKVSVTPGISNEIHQIIDDDSAEVNSSSEDFWILVAALKEFISKEGNGELPLEGTIPDMTSLTERRRGAPKVMINLPNQHACSLQRWFCFLFTEWRGLNIDNGFKRFRVLICVNYCNVMYAFLRTKIHGQTW

SEQ ID NO: 39221 - DNA, 1046 bp, Zea mays subsp. mays
atcaaagaccagaaagctcaaaccaagaccggcgtgcgcggacgaagcacagatccatcggagtgacagcgagcgagcgagagcgagagcgagagagacagagagattatccgcgcgtcaccgactcccggcgaagacgatggggaaggggttcgcatcctacctggcgatgaagacggggccggagggcggcgacgcggcggcggcgcagcaggctctgatcgacgcggacctgcgggagctcggcgtcgccgcgcggaagctcgccaaccacgcattcgtcctcggcggcgggctggggttcggcacctccttcctcaaatggctggccttcctcgccgcagtgtatctcttgatattggatcgcacaaattggaagaccaacatgctgacagctctcttggttccttacattttcttcaccctgcctaatgtgctgttttctctgatcagaggagaggtggggaaatggattgcgattattgctgttattctgcgtctattctttccacgccacttcccagattggttagagcttcctggttccatcatcctgctcacagtggtcgcccctagcctgttcgcggacaccttcaggggagacctcgttggtgtcttcatatgccttgtgatcggatgctacctgctccaagagcacatcaaggcgtcaggtggattcaggaacgccttcaggaagggcaatggtgtgtcgaactccatcggcatcctcctgctcttcatctaccctgtctgggccggtgtgctgcaagtcctgtaggcacccaccattgcctcagtgtttcccctgtgcggtccaggcgtccagctccgttcccgttcgtgcccgtgcaaatgctccctctatggtgatccgtgatcctgtgtcacgagtaggtgatgtttttatgtgtgcttgagttgatcggttgggcatgttgccatgttggtggacagttttgtttatctcatttgttgtagttcgatgtcagcatttggttcgttcgagtacataaacgccaataaaatcagtagccgtggcttgattt

SEQ ID NO: 39222 - protein, 258 aa, Zea mays subsp. mays
SKTRKLKPRPACADEAQIHRSDSERARARARETERLSARHRLPAKTMGKGFASYLAMKTGPEGGDAAAAQQALIDADLRELGVAARKLANHAFVLGGGLGFGTSFLKWLAFLAAVYLLILDRTNWKTNMLTALLVPYIFFTLPNVLFSLIRGEVGKWIAIIAVILRLFFPRHFPDWLELPGSIILLTVVAPSLFADTFRGDLVGVFICLVIGCYLLQEHIKASGGFRNAFRKGNGVSNSIGILLLFIYPVWAGVLQVL

SEQ ID NO: 39223 - protein, 212 aa, Zea mays subsp. mays
MGKGFASYLAMKTGPEGGDAAAAQQALIDADLRELGVAARKLANHAFVLGGGLGFGTSFLKWLAFLAAVYLLILDRTNWKTNMLTALLVPYIFFTLPNVLFSLIRGEVGKWIAIIAVILRLFFPRHFPDWLELPGSIILLTVVAPSLFADTFRGDLVGVFICLVIGCYLLQEHIKASGGFRNAFRKGNGVSNSIGILLLFIYPVWAGVLQVL

SEQ ID NO: 39224 - protein, 202 aa, Zea mays subsp. mays
MKTGPEGGDAAAAQQALIDADLRELGVAARKLANHAFVLGGGLGFGTSFLKWLAFLAAVYLLILDRTNWKTNMLTALLVPYIFFTLPNVLFSLIRGEVGKWIAIIAVILRLFFPRHFPDWLELPGSIILLTVVAPSLFADTFRGDLVGVFICLVIGCYLLQEHIKASGGFRNAFRKGNGVSNSIGILLLFIYPVWAGVLQVL

SEQ ID NO: 39225 - DNA, 1100 bp, Zea mays subsp. mays
acacaaccaagctcgatcgatctcactctcagctggtcgctcactcttgcagctccacccttcactcagtcttaggctcttagctctaggctctagctagccgcgccactccttcgtgtagccatcagccttctcatcgccaccaatggccactgccgaggtccagaccccgaccgtcgtggcggccgaggaagcgccagtggtggagaccccgccgccggccgtcgtgcccgaggagtctgcccccgccgaggccgaggctgaggctgaggctgaggctgctgctcctgctgatccgaggagcttcccgcggccgagcagcaggcagccgccgagcccgaggccgctgctcctgctggtgccgaggagcccgcggcggccgaaccggccgctgaggcggaggctgctgctcctgctggtcccgaggagactcctgcggtcgagcaggaggcagccgccgaggaggaggctgctgctgctcctcctgctggtgccgaggagcccgccgcggccgagcctgtcgccgaggcagaggctgctgctcccgaggagctcgccgcggacgagccggaggctcctgctcctgctcctgctggtccccaggagccggccgccgaggcggaggctgctgctcctgaggagcccgagaaggccagcgagtgaggccgtgcgcacgcagcggcggcggccagggcccaggccccaggggatcggcgtgcgcgcgtggcggggtagtctctcgcgcgcgtacatggcagtatgacacgggattttgctgttcagtacgctacggttactggcgtctctctctctctgtgtgtgtgtgtgtgtcgtacgtagcccggtacgtagctagcagtgactgtcgcgtggacgtgtccggtgcgggctgcgagtgacgtgggctaaataaagtgtgcgtcgggtggtaatggtggtggggcccggtgtcagtgcgcgcggtgccccatgcctgccgcggctgcagcttgttgtgtcttgtgttggttgagttcctgttctttctgtctatctattctcacgcatggcagtttgggtatggtatgggtcgtcttctttggttaaaaaaaaaaaaaaaa

SEQ ID NO: 39226 - protein, 205 aa, Zea mays subsp. mays
MATAEVQTPTVVAAEEAPVVETPPPAVVPEESAPAEAEAEAEAEAAAPADPRSFPRPSSRQPPSPRPLLLLVPRSPRRPNRPLRRRLLLLLVPRRLLRSSRRQPPRRRLLLLLLLVPRSPPRPSLSPRQRLLLPRSSPRTSRRLLLLLLLVPRSRPPRRRLLLLRSPRRPASEAVRTQRRRPGPRPQGIGVRAWRGSLSRAYMAV

SEQ ID NO: 39227 - DNA, 699 bp, Zea mays subsp. mays
atgaattcaagatttcgtgtctagaggccatcaaagatttatttccacacgactcaaatccgttttatgctggatttggaaatagagacacagacgagcttagctacctcaaggttggtattcctatgggcaagatcttcataataaaccccaagggtgaagtcgcagtgaaccgacgggtcgatacaaagtcgtacacatccttgcatgctcttgtccacgggatgttccctccaatattgtcgtcatctgagcaggaggactacaatgcttggaattactggaagatgccattgcctgatgttgatttgtgaggtacaagtcgagtctgcacaacagcactgcactaattttatgatgtgccgtagtgatcatgagaaggccattacttggttggctacatgtggatgctcctgctcctgatataagttcctgcaagatggaattttgtatatataggatcataatagatgtagtagctatttcttgtgtctcctgttgttgttgttgttgtcgtcgtaggactggaaatcatacctccgtgtgtcctgtaactgaaggtacaaaatttactggatggagggatctgatagtatgttgcagccccccctttttcgtttcatccttgatgtaattgtggtaccgatgtattttgtacaagaacaaatcaataataatgcaatcgaaagcgagctgttc

SEQ ID NO: 39228 - protein, 103 aa, Zea mays subsp. mays
EFKISCLEAIKDLFPHDSNPFYAGFGNRDTDELSYLKVGIPMGKIFIINPKGEVAVNRRVDTKSYTSLHALVHGMFPPILSSSEQEDYNAWNYWKMPLPDVDL

SEQ ID NO: 39229 - protein, 86 aa, Zea mays subsp. mays
MRRPLLGWLHVDAPAPDISSCKMEFCIYRIIIDVVAISCVSCCCCCCRRRTGNHTSVCPVTEGTKFTGWRDLIVCCSPPFFVSSLM

SEQ ID NO: 39230 - protein, 71 aa, Zea mays subsp. mays
MLLSTGCSLQYCRHLSRRTTMLGITGRCHCLMLICEVQVESAQQHCTNFMMCRSDHEKAITWLATCGCSCS

SEQ ID NO: 39231 - protein, 62 aa, Zea mays subsp. mays
MGKIFIINPKGEVAVNRRVDTKSYTSLHALVHGMFPPILSSSEQEDYNAWNYWKMPLPDVDL

SEQ ID NO: 39232 - DNA, 1167 bp, Zea mays subsp. mays
agaaccagagcgacagaagtaccagtcctgttcagagatgatgggtttcagctgccaacaccgttccgcctccctgcgcatcttcctcgtctccgtcgtcctcctgctcaccgctcctgcggggcgttgccattgctacaagcgcatcttcagcttcggcgactctatcatcgacacgggcaacttcgcgcgcagcggcccgataatggagtacccatttggcatgacctacttccaccaccctaccggccgcatcagcgacggccgtgtcctcgtcgatttctacgctcaagcgctccagctgccgctgataccaccaaatctgccggagaaggacacggggctattcccgacaggcgcaaacttcgctgtgtatggctccacggcgatgcccccggagtactaccgcaggtggaaccacgacgtgcgggcctgttacctgggcgtgcagatgggatggttcaaacaaatgctgcaacgaattgctccctgggatggcgccaagaggcagatcctgagcgagtctctcatcgtgctgggcgagatcggcggcaacgactacaacttttggttcgctgcccgtaggccccgcgagcaagccggccagttcatcccagacatcgtcgcgaccattggctctgctgcccaggagctcatcggcatgggcgcgaaggcgatcctgatcccgaacaacttccctatcggctgcgtaccgacatacctgagcgggtacaggagcggcaaccgcgcggactacgacgagcacgggtgcctccggtggttcaacgacttctcccagaggcacaaccgggcgctgcgcggcgaggtcgaccggctcagggcgcagcaccccggcgtgaagctcatctacgccgactactacggtgccgccatggagttcgtcaaggacccgcacaggtggattctgttttgacatgtgcgtcgagtaccctaatatccgagtatgactccctcgaccaagtctggattccccggacctggcccataggccaacatcttcattatggaaacctcttgggtacacctggtatatatccttaacagtagtcccctgagtctaacctagcagagttatcaagtcgagtatgttggaatctgacaattggatcctgcttgttaatattcacaatacccgctctgagtttc

SEQ ID NO: 39233 - protein, 310 aa, Zea mays subsp. mays
EPERQKYQSCSEMMGFSCQHRSASLRIFLVSVVLLLTAPAGRCHCYKRIFSFGDSIIDTGNFARSGPIMEYPFGMTYFHHPTGRISDGRVLVDFYAQALQLPLIPPNLPEKDTGLFPTGANFAVYGSTAMPPEYYRRWNHDVRACYLGVQMGWFKQMLQRIAPWDGAKRQILSESLIVLGEIGGNDYNFWFAARRPREQAGQFIPDIVATIGSAAQELIGMGAKAILIPNNFPIGCVPTYLSGYRSGNRADYDEHGCLRWFNDFSQRHNRALRGEVDRLRAQHPGVKLIYADYYGAAMEFVKDPHRWILF

SEQ ID NO: 39234 - protein, 298 aa, Zea mays subsp. mays
MMGFSCQHRSASLRIFLVSVVLLLTAPAGRCHCYKRIFSFGDSIIDTGNFARSGPIMEYPFGMTYFHHPTGRISDGRVLVDFYAQALQLPLIPPNLPEKDTGLFPTGANFAVYGSTAMPPEYYRRWNHDVRACYLGVQMGWFKQMLQRIAPWDGAKRQILSESLIVLGEIGGNDYNFWFAARRPREQAGQFIPDIVATIGSAAQELIGMGAKAILIPNNFPIGCVPTYLSGYRSGNRADYDEHGCLRWFNDFSQRHNRALRGEVDRLRAQHPGVKLIYADYYGAAMEFVKDPHRWILF

SEQ ID NO: 39235 - protein, 297 aa, Zea mays subsp. mays
MGFSCQHRSASLRIFLVSVVLLLTAPAGRCHCYKRIFSFGDSIIDTGNFARSGPIMEYPFGMTYFHHPTGRISDGRVLVDFYAQALQLPLIPPNLPEKDTGLFPTGANFAVYGSTAMPPEYYRRWNHDVRACYLGVQMGWFKQMLQRIAPWDGAKRQILSESLIVLGEIGGNDYNFWFAARRPREQAGQFIPDIVATIGSAAQELIGMGAKAILIPNNFPIGCVPTYLSGYRSGNRADYDEHGCLRWFNDFSQRHNRALRGEVDRLRAQHPGVKLIYADYYGAAMEFVKDPHRWILF

SEQ ID NO: 39236 - DNA, 634 bp, Zea mays subsp. mays
gaaaaacacacccagattctttcgattctttcacggttccacctctcccctccctctcgtgctcgatccatcgccgctgcctaatccccatggcctcagcgaacaacgacaaccgcgaggcggcgggcatcctgcggctgctgatggggatggcggcggcggcgcccgcctcggcattgcctcgggggggcggcggcggcggcggcggcggcctgatggtggtgcagcacgtcatcctcgacgtcgacggggaattgttctcgggcggggtcggcggcggcggcgtgccgccggcgtcgaaggccgcgatcgccgcgctgaaggaggtgaaggccggggagggcgagggcgagggcgaggacgcgctgggcgagtgcgccatctgcctggacgcggtggagggcaccggcaaggagatgccgtgcgggcaccgcttccacgggcgctgcctggagcggtggctcggcgtgcacggcaactgccccgtctgccgccgcgagctgccagcgccggccaaggaggaggaggaggacagcgcggcgtcggcggagggcggcgaggaggagagggtttaactgtttttgagatcaaatttgacaagctctagaatgaacatatctattttgtttgcgac

SEQ ID NO: 39237 - protein, 201 aa, Zea mays subsp. mays
KNTPRFFRFFHGSTSPLPLVLDPSPLPNPHGLSEQRQPRGGGHPAAADGDGGGGARLGIASGGRRRRRRRPDGGAARHPRRRRGIVLGRGRRRRRAAGVEGRDRRAEGGEGRGGRGRGRGRAGRVRHLPGRGGGHRQGDAVRAPLPRALPGAVARRARQLPRLPPRAASAGQGGGGGQRGVGGGRRGGEGLTVFEIKFDKL

SEQ ID NO: 39238 - protein, 190 aa, Zea mays subsp. mays
KTHPDSFDSFTVPPLPSLSCSIHRRCLIPMASANNDNREAAGILRLLMGMAAAAPASALPRGGGGGGGGGLMVVQHVILDVDGELFSGGVGGGGVPPASKAAIAALKEVKAGEGEGEGEDALGECAICLDAVEGTGKEMPCGHRFHGRCLERWLGVHGNCPVCRRELPAPAKEEEEDSAASAEGGEEERV

SEQ ID NO: 39239 - protein, 161 aa, Zea mays subsp. mays
MASANNDNREAAGILRLLMGMAAAAPASALPRGGGGGGGGGLMVVQHVILDVDGELFSGGVGGGGVPPASKAAIAALKEVKAGEGEGEGEDALGECAICLDAVEGTGKEMPCGHRFHGRCLERWLGVHGNCPVCRRELPAPAKEEEEDSAASAEGGEEERV

SEQ ID NO: 39240 - DNA, 745 bp, Zea mays subsp. mays
ataaaaacatatatccattcgcatagcttgataatctattgagcgctaccgaggttcaccacattagctacacttacatcatcacaactcttctctacccaaaactccaccaagaaaaaaaaaaaactctcattccaacaacctccacaacaacctctcccttcaaaccaaacaaacaacccccgaaaatcaatcaaaatggccgtcatcgacatcaagaccaaagcccagttcgacgaactcacaaaggcaactccctacgtcgccctccaagcccacgcaacctggtgcggcccctgcaaggccatctcccccatgttcaacaagcacgccgaggccttttccaacgacaagtacacctttgcccgcttcgacaccgacgaggtgcccgatctcgcgtttgagctgggcattcgcagcattcctgcgttttttattttcgagaatggggataaggctgatactttgacgggcgcgaacccgcctgcgctgaagaaattgacggagagcattgctgagaagagcaaggctggcgagctcaacaccaccgaggacttttaaacacgtgcgggacgaagacgaggattgttgcagaggaggatacatgaagtattaaggaagaaagagaacaaatgcaaacgagatacctgcaatgcatggtgttggcgaagaggataccacaatctacaacggacaagtagacatacatacaagtcatctttagtctgcaaaatataatcatacc

SEQ ID NO: 39241 - protein, 120 aa, Zea mays subsp. mays
MAVIDIKTKAQFDELTKATPYVALQAHATWCGPCKAISPMFNKHAEAFSNDKYTFARFDTDEVPDLAFELGIRSIPAFFIFENGDKADTLTGANPPALKKLTESIAEKSKAGELNTTEDF

SEQ ID NO: 39242 - protein, 81 aa, Zea mays subsp. mays
MFNKHAEAFSNDKYTFARFDTDEVPDLAFELGIRSIPAFFIFENGDKADTLTGANPPALKKLTESIAEKSKAGELNTTEDF

SEQ ID NO: 39243 - DNA, 684 bp, Zea mays subsp. mays
cgcagggagccacgccgacaacctggggtaccagtgcggcgggtggacgatcgagtggcagggcgacacggggcgcaccaccgtcggcaccacggtcctggacgccgtgaaggcggccgtggacccgtcgacggaggtggtgttcgcggagagccccgacgccgagttcgtcaggagcggcggcttctcgtacgcgatcgtggccgtgggcgagcacccgtacacggagaccaagggcgacagcatgaacctgacgatcccggaccccgggccgagcaccgtacagacggtgtgcgccgccgtgcggtgcgtgaccgtgctcatcagcggccgccccgtggtgatacagccgttcctgggcgccatggacgcggtcgtggcggcctggctgccggggaccgagggccagggtgtcaccgacgtgctgttcggggactacgggttcacggggaagctgccgcggacgtggttcaggtcggtggaccagctgccgatgaactacggcgacgcgcactacgacccgctgttcccgctcgggttcgggctcaccacacagggcaagatgtaccagaactagaagaaggcggagcgaggggaaaggggtagtacttggtaaagataataggaaattgaattaagcagtgctctgccgaggaaacgtgaacctgtagttctttttccccc

SEQ ID NO: 39244 - protein, 201 aa, Zea mays subsp. mays
RREPRRQPGVPVRRVDDRVAGRHGAHHRRHHGPGRREGGRGPVDGGGVRGEPRRRVRQERRLLVRDRGRGRAPVHGDQGRQHEPDDPGPRAEHRTDGVRRRAVRDRAHQRPPRGDTAVPGRHGRGRGGLAAGDRGPGCHRRAVRGLRVHGEAAADVVQVGGPAADELRRRALRPAVPARVRAHHTGQDVPELEEGGARGKG

SEQ ID NO: 39245 - protein, 191 aa, Zea mays subsp. mays
AGSHADNLGYQCGGWTIEWQGDTGRTTVGTTVLDAVKAAVDPSTEVVFAESPDAEFVRSGGFSYAIVAVGEHPYTETKGDSMNLTIPDPGPSTVQTVCAAVRCVTVLISGRPVVIQPFLGAMDAVVAAWLPGTEGQGVTDVLFGDYGFTGKLPRTWFRSVDQLPMNYGDAHYDPLFPLGFGLTTQGKMYQN

SEQ ID NO: 39246 - protein, 110 aa, Zea mays subsp. mays
MNLTIPDPGPSTVQTVCAAVRCVTVLISGRPVVIQPFLGAMDAVVAAWLPGTEGQGVTDVLFGDYGFTGKLPRTWFRSVDQLPMNYGDAHYDPLFPLGFGLTTQGKMYQN

SEQ ID NO: 39247 - DNA, 1010 bp, Zea mays subsp. mays
gctactgccgatccgtgccctcacaccgcctacttgactcctcccgaacttccacatctctgctctgccttcccagtctcccatccctgaaaacctcacaaaaccctcgtttgctccccaccaccccgccgcgccgccgcctgtaccagctgcgtcaagatgagtcggcaccctgaggtgaagtgggctcagaggatcgacaaggtttacatcactgtacagttacctgacgcaaaggatgctaaggtcaatttggatccagatggtgtcttcacattctctggcagcgctggtacaaacttgtatgaattgaaactagatctgaatgacaaagtaaacgttgaggctagcaaaataagtgtgggggtcaggtccatattctgtatcgtagaaaaagctgaagccaaatggtggaagaaactcgttcgagatgatcaaagggcacctcactttgtgaaagttgattgggacaaatgggttgatgaagatgatgatggtgctgatatcaacatggatgggatggacttctcgaatttcggtggcatgggtggtatgggcggcatgggtggcatgggtgatatggctggtatgggtggtcttggtggcatgggtgggatgggtgatcttggtggcatgggtggtatgggaatggatgatttcgaagatgagagtgatgatgaagaagaattgtcgaaacctcaagctgcggacaaggctgttgaggctgaggagacggagtcagcggaaaccaagactgaggcggctcagagcagttgaagatgcttatgatctaagctagattgtatcctcatgttaattctgctgaatcggaggacaaaccttacatttgtggtgctggcaagtcccagtggcgtgccatgaaaatttacgttccgtcttttaactgggtatcctagtgtcgtgctcagcatattatggatattgtttccgtaatgcttcctttggtcgccaatccatgtggttaagagtttgttttactggattgctct

SEQ ID NO: 39248 - protein, 205 aa, Zea mays subsp. mays
MSRHPEVKWAQRIDKVYITVQLPDAKDAKVNLDPDGVFTFSGSAGTNLYELKLDLNDKVNVEASKISVGVRSIFCIVEKAEAKWWKKLVRDDQRAPHFVKVDWDKWVDEDDDGADINMDGMDFSNFGGMGGMGGMGGMGDMAGMGGLGGMGGMGDLGGMGGMGMDDFEDESDDEEELSKPQAADKAVEAEETESAETKTEAAQSS

SEQ ID NO: 39249 - protein, 105 aa, Zea mays subsp. mays
MKMMMVLISTWMGWTSRISVAWVVWAAWVAWVIWLVWVVLVAWVGWVILVAWVVWEWMISKMRVMMKKNCRNLKLRTRLLRLRRRSQRKPRLRRLRAVEDAYDLS

SEQ ID NO: 39250 - protein, 103 aa, Zea mays subsp. mays
MMMVLISTWMGWTSRISVAWVVWAAWVAWVIWLVWVVLVAWVGWVILVAWVVWEWMISKMRVMMKKNCRNLKLRTRLLRLRRRSQRKPRLRRLRAVEDAYDLS

SEQ ID NO: 39251 - DNA, 1010 bp, Zea mays subsp. mays
acagcatctcaagtcttcacactcctcgccatcacataaaaccagtgcaagcagaagcagcgcaatggcgagcagcaccatggccctctcctccacagccttcgccggcaaggcagtgaacgtgccgtcgtctctcttcggcgaggcccgcgtgacgatgcgcaagacggcggcgaaggcaaagccggcggcgagctccggcagcccgtggtacggccccgaccgcgtgctctacctgggcccgctgtccggcgcgcccccgagctacctgacgggcgagttcccgggcgactacggctgggacaccgcggggctgtcggcggacccggagacgttcgccaagaaccgggagctggaggtcatccactcccgctgggccatgctgggcgcgttgggctgcgtgttcccggagctgctcgcccgcaacggcgtcaagttcggcgaggccgtgtggttcaaggccgggtcgcagatcttcagcgagggtgggctggactacctcggcaacccgagcctgatccacgcgcagagcatcctcgccatctgggcctgccaggtcgtgctcatgggcgccatcgaggggtaccgcgtcgccggcggcccgctcggagaggtcgtcgacccgctctaccccggcggcagcttcgacccgctcggcctcgccgacgaccctgaggccttcgcggagctcaaggtgaaggagctcaagaacggccgcctcgccatgttctccatgttcgggttcttcgtccaggccatcgtcaccggcaagggcccgctcgagaacctcgccgaccacctcgccgaccccgtcaacaacaacgcatgggcctatgccaccaactttgtgcccggcaagtgagggggtggaggcgccaccgcccaccggccaccgctgcggatatctaggtgttcggatgcacgtgagcgcgcactggttccagtttgtaccatgatgtaaattacttaccgtaccagggttcaatcggcaaggaagaattgttgtgttc

SEQ ID NO: 39252 - protein, 286 aa, Zea mays subsp. mays
QHLKSSHSSPSHKTSASRSSAMASSTMALSSTAFAGKAVNVPSSLFGEARVTMRKTAAKAKPAASSGSPWYGPDRVLYLGPLSGAPPSYLTGEFPGDYGWDTAGLSADPETFAKNRELEVIHSRWAMLGALGCVFPELLARNGVKFGEAVWFKAGSQIFSEGGLDYLGNPSLIHAQSILAIWACQVVLMGAIEGYRVAGGPLGEVVDPLYPGGSFDPLGLADDPEAFAELKVKELKNGRLAMFSMFGFFVQAIVTGKGPLENLADHLADPVNNNAWAYATNFVPGK

SEQ ID NO: 39253 - protein, 265 aa, Zea mays subsp. mays
MASSTMALSSTAFAGKAVNVPSSLFGEARVTMRKTAAKAKPAASSGSPWYGPDRVLYLGPLSGAPPSYLTGEFPGDYGWDTAGLSADPETFAKNRELEVIHSRWAMLGALGCVFPELLARNGVKFGEAVWFKAGSQIFSEGGLDYLGNPSLIHAQSILAIWACQVVLMGAIEGYRVAGGPLGEVVDPLYPGGSFDPLGLADDPEAFAELKVKELKNGRLAMFSMFGFFVQAIVTGKGPLENLADHLADPVNNNAWAYATNFVPGK

SEQ ID NO: 39254 - protein, 260 aa, Zea mays subsp. mays
MALSSTAFAGKAVNVPSSLFGEARVTMRKTAAKAKPAASSGSPWYGPDRVLYLGPLSGAPPSYLTGEFPGDYGWDTAGLSADPETFAKNRELEVIHSRWAMLGALGCVFPELLARNGVKFGEAVWFKAGSQIFSEGGLDYLGNPSLIHAQSILAIWACQVVLMGAIEGYRVAGGPLGEVVDPLYPGGSFDPLGLADDPEAFAELKVKELKNGRLAMFSMFGFFVQAIVTGKGPLENLADHLADPVNNNAWAYATNFVPGK

SEQ ID NO: 39255 - DNA, 1017 bp, Zea mays subsp. mays
aaaggaactgttgggatgacttacactcaagaggatatgccatggacaatcaaaggcatcacacctgatattattgtgaatccacatgctattccatcccgtatgactattgggcagctgattgagtgtatcatgggtaaagttgcggctcagatggggaaggaaggagatgccactccattcacggatgtgactgtggataacattagcaaagctcttcataaatgtaattatcaaatgcgtggatttgagaccatgtacaatggtcacaccggaagaaaactgacagcaatgattttcctgggacccacgtattaccaaagactcaagcacatggtggatgacaagatacattccagaggacgtggtcctgttcagatactcacccgacaaccagcagaggggcgatctcgtgatggtggtctccgctttggagaaatggaaagggattgtatgattgcacatggagcagctttcttcctgaaggaaaggctgtttgaccagagtgacgcatacagagtccatgtatgtgagaaatgtggtctcatcgcaattgctaatctaaagaaaaactcgtttgaatgtaggggctgcaagaacaagactgacattgtccaagtacacataccctatgcttgtaagcttctgttccaggagcttatggcaatggccattgctcccagaatgcttacccatgatatgaagacagggaaggatcagaagaagcgctgaacttgtatcacatgagatgtaactggaactttgctccattgctatatttctcgcgtgcacacggtagtacgctgttaaggaacattgtggtcacttgttttccgacttcgactctggtttgtcgtgaacgatggacaggccattatcgtatcttgatgggctatcagcccaatctgtgttagtgctgttagatgatctgtgctagcagatcgttgagttaattttgtacattataggaatgtgctgcaatgtattaatctacgaatacaaagactttggcgcgct

SEQ ID NO: 39256 - protein, 243 aa, Zea mays subsp. mays
KGTVGMTYTQEDMPWTIKGITPDIIVNPHAIPSRMTIGQLIECIMGKVAAQMGKEGDATPFTDVTVDNISKALHKCNYQMRGFETMYNGHTGRKLTAMIFLGPTYYQRLKHMVDDKIHSRGRGPVQILTRQPAEGRSRDGGLRFGEMERDCMIAHGAAFFLKERLFDQSDAYRVHVCEKCGLIAIANLKKNSFECRGCKNKTDIVQVHIPYACKLLFQELMAMAIAPRMLTHDMKTGKDQKKR

SEQ ID NO: 39257 - protein, 238 aa, Zea mays subsp. mays
MTYTQEDMPWTIKGITPDIIVNPHAIPSRMTIGQLIECIMGKVAAQMGKEGDATPFTDVTVDNISKALHKCNYQMRGFETMYNGHTGRKLTAMIFLGPTYYQRLKHMVDDKIHSRGRGPVQILTRQPAEGRSRDGGLRFGEMERDCMIAHGAAFFLKERLFDQSDAYRVHVCEKCGLIAIANLKKNSFECRGCKNKTDIVQVHIPYACKLLFQELMAMAIAPRMLTHDMKTGKDQKKR

SEQ ID NO: 39258 - protein, 231 aa, Zea mays subsp. mays
MPWTIKGITPDIIVNPHAIPSRMTIGQLIECIMGKVAAQMGKEGDATPFTDVTVDNISKALHKCNYQMRGFETMYNGHTGRKLTAMIFLGPTYYQRLKHMVDDKIHSRGRGPVQILTRQPAEGRSRDGGLRFGEMERDCMIAHGAAFFLKERLFDQSDAYRVHVCEKCGLIAIANLKKNSFECRGCKNKTDIVQVHIPYACKLLFQELMAMAIAPRMLTHDMKTGKDQKKR

SEQ ID NO: 39259 - DNA, 901 bp, Zea mays subsp. mays
cattccaaaactccgagcaatcagtccaaacccgtgtccaccgaaagtttgatgggatcaggcctctcaagcagcagcagccaccggagcagcggcgcgtcgtcgtcgcttcaccagccaccggcggcggccccggccctggtcgtcgcggtcgacggctcgctacgggagttcgtcacgccggcggcggtgccgctcctcccccccgtctccgtctccgacgtgctgggcgcgaatgcggacgacggccggtccttcgtgtgcagctccagcgcgctctacttcgagaccgacgtcccggcgctcggcgccagcgagctgctccggccggggcagctctacttcgtcctccccgcggcgatgctcggcaggccgctctcgggcgccgacatggccgcgctggccgtgcgcgccagccaggcgctggcggcgggagcgaggccgccgcgtggcgggcgacgccctcgcgggtccaccagggcgcgcgtcgtgccggcggcggcggcgcaccacgcgcacgcgcacggcgacgaggaggctgtcaacgagaagctcaaccagaggactcttggcggcttcgagacggctcctccacgtggtccggccaggaagcccgctgtcgcggcgcgaccggccccgcctgtgactgtgactgtgactgagaggagggcgctcagcaccatcgaagagggtgccgagtgatcgataaaatggctacaaggcgcgcgtgttcgattgattgatgattaggtttagttttttattgggttaattaaagacttaatgacacgcaaatagtttgaaaggatagggaaacttgttacttggttgatcgacgtctgtgtactactcacactaattacaaaattaaatgggaattttggttttcgacctggttctt

SEQ ID NO: 39260 - protein, 233 aa, Zea mays subsp. mays
HSKTPSNQSKPVSTESLMGSGLSSSSSHRSSGASSSLHQPPAAAPALVVAVDGSLREFVTPAAVPLLPPVSVSDVLGANADDGRSFVCSSSALYFETDVPALGASELLRPGQLYFVLPAAMLGRPLSGADMAALAVRASQALAAGARPPRGGRRPRGSTRARVVPAAAAHHAHAHGDEEAVNEKLNQRTLGGFETAPPRGPARKPAVAARPAPPVTVTVTERRALSTIEEGAE

SEQ ID NO: 39261 - protein, 219 aa, Zea mays subsp. mays
FQNSEQSVQTRVHRKFDGIRPLKQQQPPEQRRVVVASPATGGGPGPGRRGRRLATGVRHAGGGAAPPPRLRLRRAGRECGRRPVLRVQLQRALLRDRRPGARRQRAAPAGAALLRPPRGDARQAALGRRHGRAGRARQPGAGGGSEAAAWRATPSRVHQGARRAGGGGAPRARARRRGGCQREAQPEDSWRLRDGSSTWSGQEARCRGATGPACDCDCD

SEQ ID NO: 39262 - protein, 216 aa, Zea mays subsp. mays
MGSGLSSSSSHRSSGASSSLHQPPAAAPALVVAVDGSLREFVTPAAVPLLPPVSVSDVLGANADDGRSFVCSSSALYFETDVPALGASELLRPGQLYFVLPAAMLGRPLSGADMAALAVRASQALAAGARPPRGGRRPRGSTRARVVPAAAAHHAHAHGDEEAVNEKLNQRTLGGFETAPPRGPARKPAVAARPAPPVTVTVTERRALSTIEEGAE

SEQ ID NO: 39263 - DNA, 433 bp, Zea mays subsp. mays
gccgactgggactgagaagaaacctccaaacacctacctctctacgaactacctgccgccggaaaaccctagagcgctcgaccatggatccgcagcagccggagcctgtcagttacctctgcggagattgcggagctgagaacaccctgaagcccggagatgtcatccagtgccgtgaatgtggctaccgcatcctctacaagaagcggacccgccggattgtccaatatgaagcgcgctgaagagtgaagacaagggaaaacactgaagatggttgatctattactcgccacattacctatgtaaacagtcttctgggggaaatgaaaatgtcagacttaacgtttgtatgtcgtgtgcctcctttgaacctgagctgtataatttgtaacgcttgaactggggactgatttgagaactgggcccctgcggc

SEQ ID NO: 39264 - protein, 79 aa, Zea mays subsp. mays
RLGLRRNLQTPTSLRTTCRRKTLERSTMDPQQPEPVSYLCGDCGAENTLKPGDVIQCRECGYRILYKKRTRRIVQYEAR

SEQ ID NO: 39265 - protein, 52 aa, Zea mays subsp. mays
MDPQQPEPVSYLCGDCGAENTLKPGDVIQCRECGYRILYKKRTRRIVQYEAR

SEQ ID NO: 39266 - protein, 45 aa, Zea mays subsp. mays
PTGTEKKPPNTYLSTNYLPPENPRALDHGSAAAGACQLPLRRLRS

SEQ ID NO: 39267 - DNA, 1119 bp, Zea mays subsp. mays
acagctaccagacaacagtcaccggcacgcagacgctcagcaagagccaacaggacatcgtcgctcagcaagaaacaaggggggcaataatggcggagtaccagggcgagtatggacacccgtacccgcgcgtcgaccagtacgggaaccccgtgccgccggtggaccagtacggcaacccgctcccgagggagccggcgtccggtttcggcgccatcgctcccccctacagcgctggcgacagcgccgcggggcacgtggcggcgcctgtcgagtacggtgccgacgccaagtatccgcacgatggcacggggagcggtggcggcggcggcgtcaccgctccgaccggtgtggtggcgtactccagcggtggcgtcgcaccagccgagacggcgcttgcgtcgtacgaggagggcatggtccacctccagccgaccggggaggagcacacgtttggtatggcctcgcagctccagccgacccacggggaggagcacacgtttggcatggcctcgcagctccagccgaccggggaggagcacacgaccctcggagagaagctgaggcgctccggcagctccagctcgtcctcagaggatgacgagcaaggtgggcgccggaagaagagcatcaaggagaagataaaggagaagctcccgggcacccacaagcacgaggagcagaaggctgggcacgtgacgacgacgacgacggggacgcatgcagcggggacgcacgagaagaagggtttcatggagaagatcaaggagaagctaccgggacaccaccatgctcactgagcgtgtgtacctcagttgaggactcggatttgaggggtccagaatcgtgtgtcgtgcacaggtctctgcagtctctatatatgttgtgtacgacttcggtagcctcgacctcgatcgcttgtacctagtcatgctcatgcgtgcatattgctgtgctccttatatatgtagcattagaagctgcgcgcaagtagaatttgggttctagtctatatatacactgttatcgtcgtgtaggtttggctctggctcggagttgagtaattatgttgggctcgtttggtttgtgtttgtagtaatccatatgcatgttggctct

SEQ ID NO: 39268 - protein, 265 aa, Zea mays subsp. mays
SYQTTVTGTQTLSKSQQDIVAQQETRGAIMAEYQGEYGHPYPRVDQYGNPVPPVDQYGNPLPREPASGFGAIAPPYSAGDSAAGHVAAPVEYGADAKYPHDGTGSGGGGGVTAPTGVVAYSSGGVAPAETALASYEEGMVHLQPTGEEHTFGMASQLQPTHGEEHTFGMASQLQPTGEEHTTLGEKLRRSGSSSSSSEDDEQGGRRKKSIKEKIKEKLPGTHKHEEQKAGHVTTTTTGTHAAGTHEKKGFMEKIKEKLPGHHHAH

SEQ ID NO: 39269 - protein, 236 aa, Zea mays subsp. mays
MAEYQGEYGHPYPRVDQYGNPVPPVDQYGNPLPREPASGFGAIAPPYSAGDSAAGHVAAPVEYGADAKYPHDGTGSGGGGGVTAPTGVVAYSSGGVAPAETALASYEEGMVHLQPTGEEHTFGMASQLQPTHGEEHTFGMASQLQPTGEEHTTLGEKLRRSGSSSSSSEDDEQGGRRKKSIKEKIKEKLPGTHKHEEQKAGHVTTTTTGTHAAGTHEKKGFMEKIKEKLPGHHHAH

SEQ ID NO: 39270 - protein, 199 aa, Zea mays subsp. mays
QLPDNSHRHADAQQEPTGHRRSARNKGGNNGGVPGRVWTPVPARRPVREPRAAGGPVRQPAPEGAGVRFRRHRSPLQRWRQRRGARGGACRVRCRRQVSARWHGERWRRRRHRSDRCGGVLQRWRRTSRDGACVVRGGHGPPPADRGGAHVWYGLAAPADPRGGAHVWHGLAAPADRGGAHDPRREAEALRQLQLVLRG

SEQ ID NO: 39271 - DNA, 1119 bp, Zea mays subsp. mays
attgttattggcaaagtctcagaatctggagaagaccacagtattaagctgaagcatacagaaaagggaatggttcagaaagtattgctttcagcaaatgatgaagggaagaattttgctgtggttactctaagacaggttcggacaccttgccttggagataagttttccagcatgcatggccaaaaaggtgttgttggttttctagaatctcaagagaacttcccatttactcacgaaggtatagtcccggatattgtgataaatccacatgccttcccaacacgtcaaactcccggacagctgcttgaagctgctctggggaagggaatagcttgcaaaggtacaatgagatatgcaacaccattcaccacagcatcagttgacgttattgcagaacagttgcacagggctggttattcacgatggggatctgagaacgttctaaatgggcgaacaggtgaaagagtgcaatccttggttttcatgggccctaccttttaccagaggctgattcatatgtccgaagataaggtgaaattccgtaacactgggccggtgcaccccctcacgaggcagcctgttgccgacaggaaaaggtttggtggagttaagtttggagaaatggagcgtgactgcctcctcgcccatgggtcagctgccaacctgcatgaacgcctcttcctgcttagtgacttctcccagatgcacatctgccagacatgcgagcgcgtggctaatgttgtcatgaggtctgtccccggaggcaagaagatccgtggcccctactgcggcttctgcaagtcttcggagaacatagtgagaatcaatgtgccctatggcgcgaagctgctctaccaggaactcttcagcatggggatctgcctcaagtttgagacccaagtctgctagaacttgtagacctgcttgcatccagttattacatatgtacatacagctagcctatgaggatctccaagctggtgtgccggtgtgtgatgctggcatagtaaggatgggcgagctagaaaccctgttgtgtttatgtgctgttttctccctgctcatgtggtaaactatgctaaagtgaatgaacactcgtttcctgttccctctttg

SEQ ID NO: 39272 - protein, 303 aa, Zea mays subsp. mays
IVIGKVSESGEDHSIKLKHTEKGMVQKVLLSANDEGKNFAVVTLRQVRTPCLGDKFSSMHGQKGVVGFLESQENFPFTHEGIVPDIVINPHAFPTRQTPGQLLEAALGKGIACKGTMRYATPFTTASVDVIAEQLHRAGYSRWGSENVLNGRTGERVQSLVFMGPTFYQRLIHMSEDKVKFRNTGPVHPLTRQPVADRKRFGGVKFGEMERDCLLAHGSAANLHERLFLLSDFSQMHICQTCERVANVVMRSVPGGKKIRGPYCGFCKSSENIVRINVPYGAKLLYQELFSMGICLKFETQVC

SEQ ID NO: 39273 - protein, 280 aa, Zea mays subsp. mays
MVQKVLLSANDEGKNFAVVTLRQVRTPCLGDKFSSMHGQKGVVGFLESQENFPFTHEGIVPDIVINPHAFPTRQTPGQLLEAALGKGIACKGTMRYATPFTTASVDVIAEQLHRAGYSRWGSENVLNGRTGERVQSLVFMGPTFYQRLIHMSEDKVKFRNTGPVHPLTRQPVADRKRFGGVKFGEMERDCLLAHGSAANLHERLFLLSDFSQMHICQTCERVANVVMRSVPGGKKIRGPYCGFCKSSENIVRINVPYGAKLLYQELFSMGICLKFETQVC

SEQ ID NO: 39274 - protein, 245 aa, Zea mays subsp. mays
MHGQKGVVGFLESQENFPFTHEGIVPDIVINPHAFPTRQTPGQLLEAALGKGIACKGTMRYATPFTTASVDVIAEQLHRAGYSRWGSENVLNGRTGERVQSLVFMGPTFYQRLIHMSEDKVKFRNTGPVHPLTRQPVADRKRFGGVKFGEMERDCLLAHGSAANLHERLFLLSDFSQMHICQTCERVANVVMRSVPGGKKIRGPYCGFCKSSENIVRINVPYGAKLLYQELFSMGICLKFETQVC

SEQ ID NO: 39275 - DNA, 1132 bp, Zea mays subsp. mays
ctaatcccaatcgctgcacgactcacgagctcctcgcgccgctgcagtgggctgcactgcgcctttcctctcgccggagtcctaaaaaaaccctagggactagggagcgtgcggctgctgctgctgctgctgcggccggacgaggggatgggcacagggggagacggggacaaggcggggccggcgctgccgctggaggcgcttttggcgctcgggctcgaccagcgcaccgccgagaacgcgctcgtcaatgccaaggtcaccgccaacctcgccgccgtcatagccgaggctggtataaaggaatgtgacaagtcaattggtaatcttctatatgcagtcgccaccaagtacccaactaatgcacttgttcatcgccctgtccttattagctatgtcttgtcaacaaagataaagagccctgcacagctagatgctgccctctcatttcttactaatactggtcctgattctctagatgtggacaagtttgaagaagcatgtggtgtaggcgtggttgtttctatcgaggaaattaaatctactgttactgacattcttgaggagaatatggaagctataaaggagcagcggtatcacataaatgttggtatgctatgtggacaggttaggaagagacacccctggggtgatgctaaggcagtaaaggaggaaattgacaagaggcttgcagaaatcctaggtccaaagacagaagctgacagtataaaaccagtgaaaaagaagaaggaaaaaacagcaaaagttgaggagaaaaaagttgcagttgccactactgccccaccatctgaggaggaattgaacccatatactatatttccccaaccagaggaaaactttaaggtccatacagaaatatttttcagtgatgggaacatatggagagcacataacacaaaggaaattttggaaaaacatcttaaggcaactggaggaaaagtgatgacccgtttcccaccagaacctaatggatatcttcatattggtcatgccaaggctatgtttatcgattttggtctggctaaggagcgaaatggccattgctaccttaggtttgacgacacaaatccggaagctgaaaagaaagaatacatagatcacattcaagaaa

SEQ ID NO: 39276 - protein, 328 aa, Zea mays subsp. mays
MGTGGDGDKAGPALPLEALLALGLDQRTAENALVNAKVTANLAAVIAEAGIKECDKSIGNLLYAVATKYPTNALVHRPVLISYVLSTKIKSPAQLDAALSFLTNTGPDSLDVDKFEEACGVGVVVSIEEIKSTVTDILEENMEAIKEQRYHINVGMLCGQVRKRHPWGDAKAVKEEIDKRLAEILGPKTEADSIKPVKKKKEKTAKVEEKKVAVATTAPPSEEELNPYTIFPQPEENFKVHTEIFFSDGNIWRAHNTKEILEKHLKATGGKVMTRFPPEPNGYLHIGHAKAMFIDFGLAKERNGHCYLRFDDTNPEAEKKEYIDHIQE

SEQ ID NO: 39277 - protein, 187 aa, Zea mays subsp. mays
MEAIKEQRYHINVGMLCGQVRKRHPWGDAKAVKEEIDKRLAEILGPKTEADSIKPVKKKKEKTAKVEEKKVAVATTAPPSEEELNPYTIFPQPEENFKVHTEIFFSDGNIWRAHNTKEILEKHLKATGGKVMTRFPPEPNGYLHIGHAKAMFIDFGLAKERNGHCYLRFDDTNPEAEKKEYIDHIQE

SEQ ID NO: 39278 - protein, 173 aa, Zea mays subsp. mays
MLCGQVRKRHPWGDAKAVKEEIDKRLAEILGPKTEADSIKPVKKKKEKTAKVEEKKVAVATTAPPSEEELNPYTIFPQPEENFKVHTEIFFSDGNIWRAHNTKEILEKHLKATGGKVMTRFPPEPNGYLHIGHAKAMFIDFGLAKERNGHCYLRFDDTNPEAEKKEYIDHIQE

SEQ ID NO: 39279 - DNA, 838 bp, Zea mays subsp. mays
tgaaacaggaaattctagaggctttggctttgtgagctatgagtcctttgaatcatctgaccaagcaatagaggccatgaacaaccaacatttgtgcaaccgcccaatcactgtctcttatgcttacaagaaagacacgaaaggagaacgccatggcacaccagcagagagactgctggcagcaaacaatccaggatctcaaaagaataggccacacacaatgtttgcaagtggtccgccgacccaaggtcatccaaatggtggtccgcctgtgccacggccttatggcaatggcacaattcctggacagattcaacacattcggcaaccacctccaccacctgttggacaattcccccctccaatgcagatgcacgggcaaccaacttggcccgctcaacattctatgccgcctcccatgccatcgcaactccagtacaggctcccaatgaggccaccaccaccaaatatgatgcctcctccggttggcatggtaaggccgccacctcctcccactggtatgtcagcaccacctatgtggatgccacccccacccccacccccaccacatcaaggtggtggaatgcctccgcctcccatgtctatgccaccaccgcctccaccaccatctagttaaacacatgcaaaggacagtaccgtctggtcaatgtgtaagctgtaactgtagactaaggatgctggttcctttcatgtctccatgtaacttcgtcaacactaggttaagaggaggtttgagagttaacctgacagatacactcaagattaacagctatttattcatgttgtgttgaagataaaatgaattttgtgcttgtct

SEQ ID NO: 39280 - protein, 211 aa, Zea mays subsp. mays
ETGNSRGFGFVSYESFESSDQAIEAMNNQHLCNRPITVSYAYKKDTKGERHGTPAERLLAANNPGSQKNRPHTMFASGPPTQGHPNGGPPVPRPYGNGTIPGQIQHIRQPPPPPVGQFPPPMQMHGQPTWPAQHSMPPPMPSQLQYRLPMRPPPPNMMPPPVGMVRPPPPPTGMSAPPMWMPPPPPPPPHQGGGMPPPPMSMPPPPPPPSS

SEQ ID NO: 39281 - protein, 186 aa, Zea mays subsp. mays
MNNQHLCNRPITVSYAYKKDTKGERHGTPAERLLAANNPGSQKNRPHTMFASGPPTQGHPNGGPPVPRPYGNGTIPGQIQHIRQPPPPPVGQFPPPMQMHGQPTWPAQHSMPPPMPSQLQYRLPMRPPPPNMMPPPVGMVRPPPPPTGMSAPPMWMPPPPPPPPHQGGGMPPPPMSMPPPPPPPSS

SEQ ID NO: 39282 - protein, 138 aa, Zea mays subsp. mays
MFASGPPTQGHPNGGPPVPRPYGNGTIPGQIQHIRQPPPPPVGQFPPPMQMHGQPTWPAQHSMPPPMPSQLQYRLPMRPPPPNMMPPPVGMVRPPPPPTGMSAPPMWMPPPPPPPPHQGGGMPPPPMSMPPPPPPPSS

SEQ ID NO: 39283 - DNA, 1120 bp, Zea mays subsp. mays
aaaccctcaacctacagcagcgcgccagcgccgctccgcccgcccatgggctcctcatcccactctctcgccgtctcacggcgcggccgcagcgcgcggcagtcccccttctttcgagacctcgccaccccgatcccgtcccatcgtggcgtgtcccgctttgcctcgggggcttccccctcctccaccccaccacccccgccgcccatcttcaccctcgatgaccgctatgcctccgcagacttctccccggaccccaccgcctccgaccttctccccgtcgcgtcgtctccctccccccgcaccgctgccagccgctcgccgccatgggacctgtcccggggcaaggtggcgctctcggcaccaggatcccccatggctggggtcgtcgagccgacccggaaagagatgctcgctttgccggcccctgcgagccctggcaccccacctcctgccgcgacagcggaggcgcagtcaccggtgtcccccgcgcaggcacctaggacggagccggtggcgaacgcaggggaggtcgaacgggaggagtgggtcactgtatttggattctcttttggtgataccaaccttattcttcgggaattcgagaaatgtggagtaatattgagacatcactctggtccaagagatggaaattggatccacatattgtaccagcgttcttatgatgctcgaaaggcccttcagaaaaatgttatccaactaagcagcagtctgatagttggagtaaagcctattgatgcagtgcaccggcagcagctggacaagagtttcgctccaagcaatccaggtggatttatggtttccttgccttcgaagtcacttggcttgaagagcacaggcgcatcgaaccagttaggaggctttaaccggctgtatgacctcaaagctaacacaaatgttagccgagatgcaggccgtcgggcaactggcagtgttgctgcaccagcaaaatcaattgtaaccaatgtaatggatttggtatttggcatttgatttggcaatgagattgaggaccaatgcatccggaaccttctctgtttcttccgtttacttgttcgagaatgccaccattccaaagattcaacagcaaattttgctg

SEQ ID NO: 39284 - protein, 337 aa, Zea mays subsp. mays
KPSTYSSAPAPLRPPMGSSSHSLAVSRRGRSARQSPFFRDLATPIPSHRGVSRFASGASPSSTPPPPPPIFTLDDRYASADFSPDPTASDLLPVASSPSPRTAASRSPPWDLSRGKVALSAPGSPMAGVVEPTRKEMLALPAPASPGTPPPAATAEAQSPVSPAQAPRTEPVANAGEVEREEWVTVFGFSFGDTNLILREFEKCGVILRHHSGPRDGNWIHILYQRSYDARKALQKNVIQLSSSLIVGVKPIDAVHRQQLDKSFAPSNPGGFMVSLPSKSLGLKSTGASNQLGGFNRLYDLKANTNVSRDAGRRATGSVAAPAKSIVTNVMDLVFGI

SEQ ID NO: 39285 - protein, 322 aa, Zea mays subsp. mays
MGSSSHSLAVSRRGRSARQSPFFRDLATPIPSHRGVSRFASGASPSSTPPPPPPIFTLDDRYASADFSPDPTASDLLPVASSPSPRTAASRSPPWDLSRGKVALSAPGSPMAGVVEPTRKEMLALPAPASPGTPPPAATAEAQSPVSPAQAPRTEPVANAGEVEREEWVTVFGFSFGDTNLILREFEKCGVILRHHSGPRDGNWIHILYQRSYDARKALQKNVIQLSSSLIVGVKPIDAVHRQQLDKSFAPSNPGGFMVSLPSKSLGLKSTGASNQLGGFNRLYDLKANTNVSRDAGRRATGSVAAPAKSIVTNVMDLVFGI

SEQ ID NO: 39286 - protein, 212 aa, Zea mays subsp. mays
MAGVVEPTRKEMLALPAPASPGTPPPAATAEAQSPVSPAQAPRTEPVANAGEVEREEWVTVFGFSFGDTNLILREFEKCGVILRHHSGPRDGNWIHILYQRSYDARKALQKNVIQLSSSLIVGVKPIDAVHRQQLDKSFAPSNPGGFMVSLPSKSLGLKSTGASNQLGGFNRLYDLKANTNVSRDAGRRATGSVAAPAKSIVTNVMDLVFGI

SEQ ID NO: 39287 - DNA, 1127 bp, Zea mays subsp. mays
gaaaaaccacgatcccaagtggtggctaggggagccgctctgggccaccgctgccgcccagggggtcctgcctgccacattcttctggccgggttcggaggttacgaagggttcctggaactgccccgacaagtactgccgccactacaatggctcggtgccgtttgaggagagggtcgacaccatccttggctattttgatctcccgcctaaccaaatgccacagttcctgacgctgtactttgaggatcctgatcaccaggggcaccaggtgggtcctgacgatccttcaatcaccgatgcggtcgtacatatcgatgagatgctcgggaggctcattgctggtttggaggctaggggaatgtttgaggatgtgaacattatattggtaggtgaccatggtatggttgggacctgcgataggaagcttgtgtttctcgaagagttggctccatggatcgagttgaagtcagattgggttctgtcaatgactccattgctggcaatcaggccgccagatggtgtgtcgccagctgaggttgtggccaagatgaatgaggggcttggatctgggaaggtgaagaatggggaatatttgaagatgtacttaaaagaggatttgcctactcgcctgcattattcagagagttacaggatcccgccaatcatcgggctggttggggaagggtataagatcgagatgaagcgctccaagagaaatgagtgtggaggagcccatgggtacgacaatgccttcttctcaatgaggaccatattcgccgcacatggacctcgttttcagggtggtagaactgtgccctcatttgagaatgtggagatatacaatgtcatggcttccattctcaatttgaagcctgctccaaacaatggttcagcttctttccctggcacgattctgttgccgaacaaatgatgttggattggttttgtaggagtaagggcacatggatgtatgatggtgttctcatttggttattgtattgtacctcttaaattagacttctgccacatcactgtatctgagcaaaaatgctgctagtagagagttgcttctctctagtgacaacatttggaaacatgttccacatcaaacgtttggctgctcg

SEQ ID NO: 39288 - protein, 310 aa, Zea mays subsp. mays
KNHDPKWWLGEPLWATAAAQGVLPATFFWPGSEVTKGSWNCPDKYCRHYNGSVPFEERVDTILGYFDLPPNQMPQFLTLYFEDPDHQGHQVGPDDPSITDAVVHIDEMLGRLIAGLEARGMFEDVNIILVGDHGMVGTCDRKLVFLEELAPWIELKSDWVLSMTPLLAIRPPDGVSPAEVVAKMNEGLGSGKVKNGEYLKMYLKEDLPTRLHYSESYRIPPIIGLVGEGYKIEMKRSKRNECGGAHGYDNAFFSMRTIFAAHGPRFQGGRTVPSFENVEIYNVMASILNLKPAPNNGSASFPGTILLPNK

SEQ ID NO: 39289 - protein, 238 aa, Zea mays subsp. mays
MPQFLTLYFEDPDHQGHQVGPDDPSITDAVVHIDEMLGRLIAGLEARGMFEDVNIILVGDHGMVGTCDRKLVFLEELAPWIELKSDWVLSMTPLLAIRPPDGVSPAEVVAKMNEGLGSGKVKNGEYLKMYLKEDLPTRLHYSESYRIPPIIGLVGEGYKIEMKRSKRNECGGAHGYDNAFFSMRTIFAAHGPRFQGGRTVPSFENVEIYNVMASILNLKPAPNNGSASFPGTILLPNK

SEQ ID NO: 39290 - protein, 203 aa, Zea mays subsp. mays
MLGRLIAGLEARGMFEDVNIILVGDHGMVGTCDRKLVFLEELAPWIELKSDWVLSMTPLLAIRPPDGVSPAEVVAKMNEGLGSGKVKNGEYLKMYLKEDLPTRLHYSESYRIPPIIGLVGEGYKIEMKRSKRNECGGAHGYDNAFFSMRTIFAAHGPRFQGGRTVPSFENVEIYNVMASILNLKPAPNNGSASFPGTILLPNK

SEQ ID NO: 39291 - DNA, 838 bp, Zea mays subsp. mays
aaaagagagtactccgttcatgaaatagaggagatgcttgattataagaagatggccgagagggagcacaggcagacggatgagatcaagaacatggaaacattcctcactgcactcagctgcaccaagacgctccagttgcacttatcgactgaatactccgaggttttggacatggtcaaggcttcaacgttgacgagtttgcccaagaaaaagtacctgcatggcttgaaatcactcagccttactctggaccacaaccatgcagttcttgctactctagtctcatgcttgctgaacagctctcccaacctcaaggatctcagaatcattgagctccggcacccggggagcccggtgcccttggctgcggagttctgggagaagaagataaccgcggacgggtttctgtaccacctggcgagcgtcaccttctacaccgactcgctcctggaaggccacccttgcgagggcatctgcaagttcctggtgatgaacgcgagggtcctcaagaggatgagcatcgtgtaccaccactcgcaggtcaggccggagcatgcagccaagctcgaggcggcccggagggagctccgtgtctggccgagggcttccgcggacgtgctgctggagttgactcctgtccatcggttcccatggttctgaggggcgaggtcgctgatccattgctcacatgcagatcctgcactgcagcttttgttctactcctgttctatctatgcctctcattgactctggcttgctctaagatgtagacaccagatgctaggcaccgtttaaggggatgtttgtttctagtgactaatgtttagtccctaag

SEQ ID NO: 39292 - protein, 220 aa, Zea mays subsp. mays
KREYSVHEIEEMLDYKKMAEREHRQTDEIKNMETFLTALSCTKTLQLHLSTEYSEVLDMVKASTLTSLPKKKYLHGLKSLSLTLDHNHAVLATLVSCLLNSSPNLKDLRIIELRHPGSPVPLAAEFWEKKITADGFLYHLASVTFYTDSLLEGHPCEGICKFLVMNARVLKRMSIVYHHSQVRPEHAAKLEAARRELRVWPRASADVLLELTPVHRFPWF

SEQ ID NO: 39293 - protein, 209 aa, Zea mays subsp. mays
MLDYKKMAEREHRQTDEIKNMETFLTALSCTKTLQLHLSTEYSEVLDMVKASTLTSLPKKKYLHGLKSLSLTLDHNHAVLATLVSCLLNSSPNLKDLRIIELRHPGSPVPLAAEFWEKKITADGFLYHLASVTFYTDSLLEGHPCEGICKFLVMNARVLKRMSIVYHHSQVRPEHAAKLEAARRELRVWPRASADVLLELTPVHRFPWF

SEQ ID NO: 39294 - protein, 203 aa, Zea mays subsp. mays
MAEREHRQTDEIKNMETFLTALSCTKTLQLHLSTEYSEVLDMVKASTLTSLPKKKYLHGLKSLSLTLDHNHAVLATLVSCLLNSSPNLKDLRIIELRHPGSPVPLAAEFWEKKITADGFLYHLASVTFYTDSLLEGHPCEGICKFLVMNARVLKRMSIVYHHSQVRPEHAAKLEAARRELRVWPRASADVLLELTPVHRFPWF

SEQ ID NO: 39295 - DNA, 781 bp, Zea mays subsp. mays
gaatatatccatcctaacatccacccacccacacaccagacacacataccttattctccgccgtttcttggcctccggaaatctcctcccccaagttgcaagcatgggcgggttcagcctcagcggcgctacaggtctcgcggcgtaccgcgaggaagacgacgaggagctgttcgagacgtcgtcttcgatctccggcgactccgacgatgagggccaccagctctccgatggagaggggggcgcctatgatttgtcatctgtgatggcacagctccctgtcaagaaagggctatccagatactacgacggcaagtcccagtccttcgcgtgcatgtctgaagtgcgatgcctggaagatctgcgcaagaaagagacgccctacaagaagatcaagacatcaaggagtagcgtcgcgttagacgaagagcaggactgtcatacgccgggtcgtacgaacagcagcagagcgcccggaagttgttgcgcaaacctggtggctcggaacaacggcaaaaacatgctgtacagacctcccccagtccctgtaaacaaaagtggataccgtcagtaggctctaggacattactggatgatatctatccagggtttcacctcttgttttttttccatttttgagggattttgttgacaggcgtattggcctgtctcagatgtaatgtaagagggtttccttctctgctcttagcagagttatctcctatgatcttgtccatgagacattggttcgtgtaaataatagtgatgttgtaaccacttt

SEQ ID NO: 39296 - protein, 190 aa, Zea mays subsp. mays
NISILTSTHPHTRHTYLILRRFLASGNLLPQVASMGGFSLSGATGLAAYREEDDEELFETSSSISGDSDDEGHQLSDGEGGAYDLSSVMAQLPVKKGLSRYYDGKSQSFACMSEVRCLEDLRKKETPYKKIKTSRSSVALDEEQDCHTPGRTNSSRAPGSCCANLVARNNGKNMLYRPPPVPVNKSGYRQ

SEQ ID NO: 39297 - protein, 156 aa, Zea mays subsp. mays
MGGFSLSGATGLAAYREEDDEELFETSSSISGDSDDEGHQLSDGEGGAYDLSSVMAQLPVKKGLSRYYDGKSQSFACMSEVRCLEDLRKKETPYKKIKTSRSSVALDEEQDCHTPGRTNSSRAPGSCCANLVARNNGKNMLYRPPPVPVNKSGYRQ

SEQ ID NO: 39298 - protein, 102 aa, Zea mays subsp. mays
MAQLPVKKGLSRYYDGKSQSFACMSEVRCLEDLRKKETPYKKIKTSRSSVALDEEQDCHTPGRTNSSRAPGSCCANLVARNNGKNMLYRPPPVPVNKSGYRQ

SEQ ID NO: 39299 - DNA, 575 bp, Zea mays subsp. mays
aaactatctcgaaccctcaccgagcaccaaaagtcgccgtgcgaacagaggaaggaggttgctggggtgcggggaatgcgtgcgcatcgttcccaagcaccgaggagcagcgggattgacctgagtcgctcgtcggacctcggccaccaacggagccgcacaaacgtggaggaccgcatcattgccgcccaaattcctcggttgcctaggattcttctgtcctaatggggaatgtgtcacatgcttttgttcatggcactggcacggtggatttgaagtttactttggcgaatatcatgcagctgaggaacatgcaacatgtcccttttatgagcaagaatctcattagcggtacccttctatgtagatatgggttcaaggtagttttggagtccaataaaacagttgtctatgtctagacaatttattggtaaaagttatgactccggaagcttgttccgcttttctttgttagatttcaataataagtccgtgaaccatatttgcgctaatgttgatgatcttgcaagtatttggcattctcatttgtgtaatattaattttggttttatgtc

SEQ ID NO: 39300 - protein, 74 aa, Zea mays subsp. mays
KLSRTLTEHQKSPCEQRKEVAGVRGMRAHRSQAPRSSGIDLSRSSDLGHQRSRTNVEDRIIAAQIPRLPRILLS

SEQ ID NO: 39301 - protein, 64 aa, Zea mays subsp. mays
MGNVSHAFVHGTGTVDLKFTLANIMQLRNMQHVPFMSKNLISGTLLCRYGFKVVLESNKTVVYV

SEQ ID NO: 39302 - protein, 54 aa, Zea mays subsp. mays
MSRQFIGKSYDSGSLFRFSLLDFNNKSVNHICANVDDLASIWHSHLCNINFGFM

SEQ ID NO: 39303 - DNA, 961 bp, Zea mays subsp. mays
ataatctttttgggatggacgtatatgaacggatgaactgtcacaattgtaagatggagtctaggcagctcaagtatacttcatttttccacaatatcaatgctagttcactccgaactgcgaagatgatgtgtccagattcttcatttgatgaacttttgaaggttgttataatgaatgatcaactagcttgtgatcaagacgttggcggctgtggaacaccgaatcatatagaccacatcctttctaattccccacatgtctttactgttgttttgggatggcagaacaacaaagagagggtggatgacatatctgcaactttggctggtatttcaactgagatagacattagcatattctaccgtggtctagatcaaggaggcaaacacaccctggggtcagtggtttgttactatggccagcattaccattgttttgccttcaaggatggacggtgggtcatgtatgatgaccagacagtcaaggttattggtagttggggtgatgtgctcgtgatgtgtgaaaagggccatttgcaaccccaagtgcttttctttgaggctgcaaattaattattcttcagagtcgcaaaacgcgctacagcggttaacatgccctcaaatataggttttttccctgcggccatgaagattagaagtagggtagcagattcgttttgagcggggatatatagtactagcattcaacggtgcttttcgttgtgagtccgtaataagcagtcatctgagcattctagagcaaaaaagggagctgtttatcccccccttttttgctttaacctttggtgtaggcgctgaacttctgatctcatctgccaataaatcttcactgccgatcaagcgggtggagcattcgacttgaactgccatccaacagttgtagccgaatctgcatgaactcttcgttatacaccaatcatctatagaattttctgctc

SEQ ID NO: 39304 - protein, 190 aa, Zea mays subsp. mays
NLFGMDVYERMNCHNCKMESRQLKYTSFFHNINASSLRTAKMMCPDSSFDELLKVVIMNDQLACDQDVGGCGTPNHIDHILSNSPHVFTVVLGWQNNKERVDDISATLAGISTEIDISIFYRGLDQGGKHTLGSVVCYYGQHYHCFAFKDGRWVMYDDQTVKVIGSWGDVLVMCEKGHLQPQVLFFEAAN

SEQ ID NO: 39305 - protein, 186 aa, Zea mays subsp. mays
MDVYERMNCHNCKMESRQLKYTSFFHNINASSLRTAKMMCPDSSFDELLKVVIMNDQLACDQDVGGCGTPNHIDHILSNSPHVFTVVLGWQNNKERVDDISATLAGISTEIDISIFYRGLDQGGKHTLGSVVCYYGQHYHCFAFKDGRWVMYDDQTVKVIGSWGDVLVMCEKGHLQPQVLFFEAAN

SEQ ID NO: 39306 - protein, 180 aa, Zea mays subsp. mays
MNCHNCKMESRQLKYTSFFHNINASSLRTAKMMCPDSSFDELLKVVIMNDQLACDQDVGGCGTPNHIDHILSNSPHVFTVVLGWQNNKERVDDISATLAGISTEIDISIFYRGLDQGGKHTLGSVVCYYGQHYHCFAFKDGRWVMYDDQTVKVIGSWGDVLVMCEKGHLQPQVLFFEAAN

SEQ ID NO: 39307 - DNA, 697 bp, Zea mays subsp. mays
tccatttcatagccaaaatggacgctgccaagttggctaagcttcagcagagcgtgcgcattggaggaaaaggtaccccccgccgcaagaccaagcgtgtccacaagacctccaccacggacgacaagaaactccaaaccacactcaagaagatgaacgtccaacccattcaggccattgaggaagtcaacatgttcaaggaggacggaaacgtcatccacttctccaaccccaaggtccacgccgccgtcccctccaacaccttcgccatctacggcaacggcgaagaaaaggaactaaccgaactcgtgcctggaatcctgaaccagcttggtcccgacagtctggcgtctctccgcaaattggccgagagttatcagagtctgcagaagaaggaggctggtgagggaaagaatgacgatgaggatgaggatgatatcccggatttggtggagggggaaaactttgagggtactgttgagtaaaatgcctttctgtcaagagggtgagaaaaaaggaaagttgtctcttttctttccttagctatatgtcctagcggaatttattaggatattttgttgaggaatttttttattttgaagaaaaatgaaaaaaggaatttcttgggacctgcattattattatgaatgcgagtgtgtgtctagtctattgaggcgaatgatatacataacccccc

SEQ ID NO: 39308 - protein, 160 aa, Zea mays subsp. mays
HFIAKMDAAKLAKLQQSVRIGGKGTPRRKTKRVHKTSTTDDKKLQTTLKKMNVQPIQAIEEVNMFKEDGNVIHFSNPKVHAAVPSNTFAIYGNGEEKELTELVPGILNQLGPDSLASLRKLAESYQSLQKKEAGEGKNDDEDEDDIPDLVEGENFEGTVE

SEQ ID NO: 39309 - protein, 155 aa, Zea mays subsp. mays
MDAAKLAKLQQSVRIGGKGTPRRKTKRVHKTSTTDDKKLQTTLKKMNVQPIQAIEEVNMFKEDGNVIHFSNPKVHAAVPSNTFAIYGNGEEKELTELVPGILNQLGPDSLASLRKLAESYQSLQKKEAGEGKNDDEDEDDIPDLVEGENFEGTVE

SEQ ID NO: 39310 - protein, 110 aa, Zea mays subsp. mays
MNVQPIQAIEEVNMFKEDGNVIHFSNPKVHAAVPSNTFAIYGNGEEKELTELVPGILNQLGPDSLASLRKLAESYQSLQKKEAGEGKNDDEDEDDIPDLVEGENFEGTVE

SEQ ID NO: 39311 - DNA, 810 bp, Zea mays subsp. mays
atgtggagaaacatcctgggacaggccttgtaccagttccttgtaatttggtacctacagacagagggaaagtggctgtttggaatcaagggcaataactccgatctagtcttgaacacactgatcttcaattgcttcgtgttctgccaggtattcaatgaggtgagctcaagggagatggagaggataaatgtatttgaaggcattctaaacaacaacgtgttcattgctgtcctcggcagcaccgtcatcttccagttcatcataatacagtttctcggcgatttcgcaaacactacccctcttacgctcaaccagtggatcgcatgtgtttttatcggtttcataggcatgcctatcgcagctattgtgaagatgatcccagttggatctacgtagtgaattagagctaatttcgtccagaaactgaagttgggcatggctacagtctgatcatggcaatggagttttctgggttgccatttgtgtacaagatagatctgtgctatgcttctattctggtcaatctttgcctcttttatcctgtagtatcttatcagccaaggttgtggactcgattgttagaaaatgccttgggctcttgtagctgttctttgctttatattcttttcttggtgcttttgctaggaacattggaggctggagctgtatatgacaatcttgttgttcactcgaatgtgcttgttttgacacctatcattttgcttcatctgataagtaatgtttcagtcagaagttccagagaagggtggaattttaatgtttctgatttgccaagaaaatggaccc

SEQ ID NO: 39312 - protein, 132 aa, Zea mays subsp. mays
MWRNILGQALYQFLVIWYLQTEGKWLFGIKGNNSDLVLNTLIFNCFVFCQVFNEVSSREMERINVFEGILNNNVFIAVLGSTVIFQFIIIQFLGDFANTTPLTLNQWIACVFIGFIGMPIAAIVKMIPVGST

SEQ ID NO: 39313 - protein, 118 aa, Zea mays subsp. mays
MAMEFSGLPFVYKIDLCYASILVNLCLFYPVVSYQPRLWTRLLENALGSCSCSLLYILFLVLLLGTLEAGAVYDNLVVHSNVLVLTPIILLHLISNVSVRSSREGWNFNVSDLPRKWT

SEQ ID NO: 39314 - protein, 116 aa, Zea mays subsp. mays
MEFSGLPFVYKIDLCYASILVNLCLFYPVVSYQPRLWTRLLENALGSCSCSLLYILFLVLLLGTLEAGAVYDNLVVHSNVLVLTPIILLHLISNVSVRSSREGWNFNVSDLPRKWT

SEQ ID NO: 39315 - DNA, 686 bp, Zea mays subsp. mays
ggttcttctggctctgtaccaggtaacatgttgcaacacaggccatcactgaaatctgggaaagacttaagggaagaacatgaagttgaaaagagaggatactccacaatgcttggatctggtggtgttagaaggtcaccgctaacaaaagtggcgcggagtatttctatgaaggatgtggtagcggcactcgagcgagagcctcagatgtcaaaatcctcattacttttccgcctatatggaaggccattgacagaaccatctgcaaagtaatttggaggataatcattgcagttcatattacagaggggcaacttttggtcaatatatgaggaggcccaatcaccaagcgatggggctgattggtcgacgatcaattttgcggggatttagcgattacttggaagccagcgtttccctggagccatttttgttttttcaagggaacagtctgcagatgtttcttttttttcaatgtttttttctctatataatcatgtgttgatcacaatgcccagccagcttcagctggtatgaacatcgtgatcgtttttgtatagcagatggagtaggatgttccttgagatgcttatgacttgctaagtgtcctattctttaatcgtgcgattttgttgtacagaaaacatgaaatgtatgtattggaggctcaaatttattcatgaacg

SEQ ID NO: 39316 - protein, 90 aa, Zea mays subsp. mays
GSSGSVPGNMLQHRPSLKSGKDLREEHEVEKRGYSTMLGSGGVRRSPLTKVARSISMKDVVAALEREPQMSKSSLLFRLYGRPLTEPSAK

SEQ ID NO: 39317 - protein, 81 aa, Zea mays subsp. mays
MLQHRPSLKSGKDLREEHEVEKRGYSTMLGSGGVRRSPLTKVARSISMKDVVAALEREPQMSKSSLLFRLYGRPLTEPSAK

SEQ ID NO: 39318 - protein, 58 aa, Zea mays subsp. mays
MRRPNHQAMGLIGRRSILRGFSDYLEASVSLEPFLFFQGNSLQMFLFFQCFFLYIIMC

SEQ ID NO: 39319 - DNA, 981 bp, Zea mays subsp. mays
aaaaaatagccttatagccacatcccggccagccgcagcaagtgcccagaaggccagaaccagaaccaggtagcccgtgcaacctcatatcatcccctgccacgcacctccgtccgccgcgccatggaatcgaggaggagggccgtgcccaccgtgacggcggttgcggtggcgacgctgctgctgctgctgatgtcgtcgggcgtgggcggcgacttcgcggcggaccgggcggagtgctcggagcagctggcggggctggcgacgtgcctgacgtacgtgcaggagcaggcgacggcgacggcgccgacgcccgactgctgcgcgggcctgaaggcggtgctgcagagcagccgcaagtgcctgtgcgtgctggtcaaggaccgggacgaccccaacctaggcctcaagctcaacgtcgacaaggcgctcggcctccccgccgtctgccacgcgcccgccaacatctccgactgccccaggctgctggacctgccggccggctccaaggacgcgcaggtgttcgagcagtacgcgaagcagcaggcggcggcggcggcgcagggcggcggcgcacccaccagtggacgcagcagcgcggcggcgagcacgaccgcgggcgcgcagaagagcggagcctcagccgccggtcggtggttgggagtggggagggtcggtggtgctggtggcggcgcacgcgcggtggcgccgctcgccgtgcctttcctgctcctgctcgggtagataataataataactttacgcgcgcggccaacggccggagtcccggcggtttggttggcgccgcgcgttgccgacttgtgtgcttcgggtgcgtgcgtgtgtggtggggtacttttcacactatattggaaaaagaagctattatatatctttgactgaaaaaaagtgtcgttgtataattatctttttttcgtgtccgtgtatgcaacccctcctctcatagacccatagcgccaa

SEQ ID NO: 39320 - protein, 206 aa, Zea mays subsp. mays
MESRRRAVPTVTAVAVATLLLLLMSSGVGGDFAADRAECSEQLAGLATCLTYVQEQATATAPTPDCCAGLKAVLQSSRKCLCVLVKDRDDPNLGLKLNVDKALGLPAVCHAPANISDCPRLLDLPAGSKDAQVFEQYAKQQAAAAAQGGGAPTSGRSSAAASTTAGAQKSGASAAGRWLGVGRVGGAGGGARAVAPLAVPFLLLLG

SEQ ID NO: 39321 - protein, 183 aa, Zea mays subsp. mays
MSSGVGGDFAADRAECSEQLAGLATCLTYVQEQATATAPTPDCCAGLKAVLQSSRKCLCVLVKDRDDPNLGLKLNVDKALGLPAVCHAPANISDCPRLLDLPAGSKDAQVFEQYAKQQAAAAAQGGGAPTSGRSSAAASTTAGAQKSGASAAGRWLGVGRVGGAGGGARAVAPLAVPFLLLLG

SEQ ID NO: 39322 - DNA, 780 bp, Zea mays subsp. mays
cccggacgtcaccagctacagctcccagcttgacgtcaatttctggggttccgttcaaacaaccttcgctgccctgcctcacctgaagaggagccgaggaagaatcgtggtgacggcatctgcaaccggatggaacccagttcctagaatgagcatctacaacgctgccaacgctgcgctcatcaacttcttcgagacgctgcggaccgagctagggaaccaggtcgggatcacggtggtgacgcccgggtgggtcgagtccgagatgtccagagggaagttcctcaaggagcacggccaagtggaggtcgatcaagagatgcgcgacgctcagatcggcctgttcccggtggagtacgccaagaactgcgccaaggccatggtgcaggcggcgcggcaaggcgagcggtacctcaccgtgccggcgtggttcggggcgatgtacctgtggcggctgttcgcgccggaggtggtggaggcctgctaccgcctcctgtacatgcacggccatggcgccaggcaggccgacgcgcccagcaggaccatggccgaggcgggtggcaagcagctgctgtacccgacctcgctgcgctctgaggagattaaggagtgacctaactgccaactgttgtgtgtgtgtgtgtgtgtgtgtgtttgtgtgtgcagcagagctctcagaacacctgtggtcatgtttaatatgtgctagctgtgtgccttgacaatgaataagctgctgctctctcttttgcatagtttaaatctacaattctgtagtcg

SEQ ID NO: 39323 - protein, 203 aa, Zea mays subsp. mays
PDVTSYSSQLDVNFWGSVQTTFAALPHLKRSRGRIVVTASATGWNPVPRMSIYNAANAALINFFETLRTELGNQVGITVVTPGWVESEMSRGKFLKEHGQVEVDQEMRDAQIGLFPVEYAKNCAKAMVQAARQGERYLTVPAWFGAMYLWRLFAPEVVEACYRLLYMHGHGARQADAPSRTMAEAGGKQLLYPTSLRSEEIKE

SEQ ID NO: 39324 - protein, 154 aa, Zea mays subsp. mays
MSIYNAANAALINFFETLRTELGNQVGITVVTPGWVESEMSRGKFLKEHGQVEVDQEMRDAQIGLFPVEYAKNCAKAMVQAARQGERYLTVPAWFGAMYLWRLFAPEVVEACYRLLYMHGHGARQADAPSRTMAEAGGKQLLYPTSLRSEEIKE

SEQ ID NO: 39325 - protein, 115 aa, Zea mays subsp. mays
MSRGKFLKEHGQVEVDQEMRDAQIGLFPVEYAKNCAKAMVQAARQGERYLTVPAWFGAMYLWRLFAPEVVEACYRLLYMHGHGARQADAPSRTMAEAGGKQLLYPTSLRSEEIKE

SEQ ID NO: 39326 - DNA, 851 bp, Zea mays subsp. mays
gcacaacgcttaggacttccttttgcttcttacatttgattttctaatgcccaggcagcaccgccagcgacagccgccgagtgtccggcccaacggctgctccctcgtctgctatggcatcgtcgtggccaccgcgtcgctgctcctgctcgccatactcgctgccacagtcagcatcgtcaaggcgtgcgccctcgccggcgctgtcgcggtggtgttcagcgctgcgggctatgtctctcggtggtgcgcagcagaggacggcgctgctcatgcgctggcgctgcccacgacgatggcgacgccagccgcgcgcggccgcgcggtgtgtggcctcgttgacgcggcgatcgacgcgctgccggcgttcgcgtacgcgcgccctgccacgtgtggcgcagaaagtagcagcaagtccggaagactcgcactctgcccggtatgcctggaggaggtcgaggccggcgagatggtccggcagctgcctgcgtgcggccacctgttccacgtggagtgcatcgacatgtggctgcactcgcatgcgtcgtgccctctgtgccgatgcgacgtctcgccgcaggcagttgctatgacggtcacggaagctgcagatccaccgcatggtgcgctgccggtgatggtgagctgctgagatcatactcacggccgggagtgcgactaaggtcgtcgatttttgctcatgtcctactatgagcccttggcttcacccaaaaatggagagattggatagctactaagctattatccttcgttcatcttctaaaattattattaatagtcagcaaaccaaaaccatcaagcacatgagagtggtgcgtcagagagatccg

SEQ ID NO: 39327 - protein, 201 aa, Zea mays subsp. mays
MPRQHRQRQPPSVRPNGCSLVCYGIVVATASLLLLAILAATVSIVKACALAGAVAVVFSAAGYVSRWCAAEDGAAHALALPTTMATPAARGRAVCGLVDAAIDALPAFAYARPATCGAESSSKSGRLALCPVCLEEVEAGEMVRQLPACGHLFHVECIDMWLHSHASCPLCRCDVSPQAVAMTVTEAADPPHGALPVMVSC

SEQ ID NO: 39328 - protein, 159 aa, Zea mays subsp. mays
MASSWPPRRCSCSPYSLPQSASSRRAPSPALSRWCSALRAMSLGGAQQRTALLMRWRCPRRWRRQPRAAARCVASLTRRSTRCRRSRTRALPRVAQKVAASPEDSHSARYAWRRSRPARWSGSCLRAATCSTWSASTCGCTRMRRALCADATSRRRQLL

SEQ ID NO: 39329 - protein, 119 aa, Zea mays subsp. mays
MSLGGAQQRTALLMRWRCPRRWRRQPRAAARCVASLTRRSTRCRRSRTRALPRVAQKVAASPEDSHSARYAWRRSRPARWSGSCLRAATCSTWSASTCGCTRMRRALCADATSRRRQLL

SEQ ID NO: 39330 - DNA, 970 bp, Zea mays subsp. mays
gcacaagcgtccacagctcttgcactagctagagaccgaacagagagagattgaagaaccatgatgaggtctggccttatctcgctatgtttccacctagccctggccatcacactggctgcaagtgttcctggccttgctcgtagtagggtaatcgacatggaaccgcaactcaaaccgacgctgcaactagaaccaaagcatggtgtatctcaaccagacagaaaccaagaacccaaaccgacaccacagcctgagccaaaaccagagcctaaaccggaaccgaaacctgcaccacaaccagaccccaaacccgcaccacagccggacccaaaacccgcaccacaaccggacccaaaaccagaacccaaacctacaccacagccagacccaaaaccttcaccacaaccaggcccagagccgaaacccaagccagcgccacagcctgaaccaaaacccacactgcaaccagatccgaaacctgagccaaaaccaacaccacaaccacccttcccacagcccgagcctcaaccagatcccgaaccccaacccgaaccatccaagccaggccctaaaccccaacctgaaccatccaagctagaacctcagccaggatctaaacctacaccggagccaaaaccctaaccagatccatcgaagcggagccaccgtcgtctcttccaccaccatttggcacgggcgtcgtggaagggaactgagaggagcatagtggaaccgatcatcatcgtggatgccatctatagcttttggctatgactgataagtaatactgtttgtgtaagagtgagctctcttttttatatagggtgtgtgtattgtgtgtagtactatatttggacgatgtgtgtgtacccacctttttccgtgtgtttccatcagcatgcatccatgatccatgtatatgtcttgctaagtttgtattatcaatgaataaaaaaacatgcctttt

SEQ ID NO: 39331 - protein, 194 aa, Zea mays subsp. mays
MMRSGLISLCFHLALAITLAASVPGLARSRVIDMEPQLKPTLQLEPKHGVSQPDRNQEPKPTPQPEPKPEPKPEPKPAPQPDPKPAPQPDPKPAPQPDPKPEPKPTPQPDPKPSPQPGPEPKPKPAPQPEPKPTLQPDPKPEPKPTPQPPFPQPEPQPDPEPQPEPSKPGPKPQPEPSKLEPQPGSKPTPEPKP

SEQ ID NO: 39332 - protein, 193 aa, Zea mays subsp. mays
MRSGLISLCFHLALAITLAASVPGLARSRVIDMEPQLKPTLQLEPKHGVSQPDRNQEPKPTPQPEPKPEPKPEPKPAPQPDPKPAPQPDPKPAPQPDPKPEPKPTPQPDPKPSPQPGPEPKPKPAPQPEPKPTLQPDPKPEPKPTPQPPFPQPEPQPDPEPQPEPSKPGPKPQPEPSKLEPQPGSKPTPEPKP

SEQ ID NO: 39333 - protein, 161 aa, Zea mays subsp. mays
MEPQLKPTLQLEPKHGVSQPDRNQEPKPTPQPEPKPEPKPEPKPAPQPDPKPAPQPDPKPAPQPDPKPEPKPTPQPDPKPSPQPGPEPKPKPAPQPEPKPTLQPDPKPEPKPTPQPPFPQPEPQPDPEPQPEPSKPGPKPQPEPSKLEPQPGSKPTPEPKP

SEQ ID NO: 39334 - protein, 132 aa, Zea mays subsp. mays
MVYLNQTETKNPNRHHSLSQNQSLNRNRNLHHNQTPNPHHSRTQNPHHNRTQNQNPNLHHSQTQNLHHNQAQSRNPSQRHSLNQNPHCNQIRNLSQNQHHNHPSHSPSLNQIPNPNPNHPSQALNPNLNHPS

SEQ ID NO: 39335 - DNA, 446 bp, Zea mays subsp. mays
aggacggagatgacgcagaagcagaccctgttcaaggggcagagcaagaagaagactatccctcccaaccgccacggcaaggcgcctcatgttcgtaaaggaaagagagccgtcaagcccaccaagttcacaaaggacatggacgccgagaaggaactcaccaagttcatcaaccagtgcaacgaaataaaagctgcgaatcttgctagcaaagagggcggtgacctcaacatagtgaaggcggatggtgaggaatctaaatcaaagaaataggaagccagaaactgaaaacgagtgtgtgaaacgtgatgcgtggtaaactgttaatgcgatgtattctgctgaagaaaattcagttccgtatggctgggtagatgaacatgtttagcgcaaagtgacggtgtaactgcaaccggggtaatggcttgcaagttttgttctggccc

SEQ ID NO: 39336 - protein, 90 aa, Zea mays subsp. mays
RTEMTQKQTLFKGQSKKKTIPPNRHGKAPHVRKGKRAVKPTKFTKDMDAEKELTKFINQCNEIKAANLASKEGGDLNIVKADGEESKSKK

SEQ ID NO: 39337 - protein, 87 aa, Zea mays subsp. mays
MTQKQTLFKGQSKKKTIPPNRHGKAPHVRKGKRAVKPTKFTKDMDAEKELTKFINQCNEIKAANLASKEGGDLNIVKADGEESKSKK

SEQ ID NO: 39338 - DNA, 678 bp, Zea mays subsp. mays
attaatgataatggagagaggagacgaggagctgaagctgctgggcatgtgggcgagcccgttcgtgctacgggtgcaactcgcgcttagcctcaagggcctgagctacgagtacgtggaggtggacatcagcaacaagagcgagctcctcctccagtccaaccccgtccacaacaaggtccccgtgctcatccacaacgggaaccccgtctgtgagtcgcagctcatcctgcagtacatcgacgaggccttcgccgccaccggcccgtgcctcctcccggccgacccctacgaacgcgccgtcgctcgcttctgggccgcctacatcgacgacaaggtgctggcgtcttggatgcaggcctccgcggcgagaaagcgagggaggaagatggcgcgtgtgcaggccgagtcggcggcagctgcggaggccggggtgaaggccgtcgacgagaaggtgatgcggagcagcagcggcaagaaggtgcactgggccaacaacgatggatacgaagagtgctagaagcctagaacaaccaacacatggaagtagaagtagaagtagaagaatcgccagtaatctcctagctatgctattgttcaggggtatgattgccattatagtgtggccatagttgctatgtgtactgcttgctattcgactagttctgttgactgaat

SEQ ID NO: 39339 - protein, 172 aa, Zea mays subsp. mays
LMIMERGDEELKLLGMWASPFVLRVQLALSLKGLSYEYVEVDISNKSELLLQSNPVHNKVPVLIHNGNPVCESQLILQYIDEAFAATGPCLLPADPYERAVARFWAAYIDDKVLASWMQASAARKRGRKMARVQAESAAAAEAGVKAVDEKVMRSSSGKKVHWANNDGYEEC

SEQ ID NO: 39340 - protein, 171 aa, Zea mays subsp. mays
MIMERGDEELKLLGMWASPFVLRVQLALSLKGLSYEYVEVDISNKSELLLQSNPVHNKVPVLIHNGNPVCESQLILQYIDEAFAATGPCLLPADPYERAVARFWAAYIDDKVLASWMQASAARKRGRKMARVQAESAAAAEAGVKAVDEKVMRSSSGKKVHWANNDGYEEC

SEQ ID NO: 39341 - protein, 169 aa, Zea mays subsp. mays
MERGDEELKLLGMWASPFVLRVQLALSLKGLSYEYVEVDISNKSELLLQSNPVHNKVPVLIHNGNPVCESQLILQYIDEAFAATGPCLLPADPYERAVARFWAAYIDDKVLASWMQASAARKRGRKMARVQAESAAAAEAGVKAVDEKVMRSSSGKKVHWANNDGYEEC

SEQ ID NO: 39342 - DNA, 963 bp, Zea mays subsp. mays
atgtcatatacgtactgatacagggcgtgccgactttccagggcgccaattcccctccaagatccgtcttctccggccgctccacccaattcgtcgtcctccccgcctccggatctgaacatgagcgacgcgaccacggcccccgccaccggagccggggaccacgttgtcgatgccgccgcgcacaagccgccggctgccccgtcgccggacatggcaagcatcagacggggcgggagctccgtgaccgagacagtcacccaggcaacgcagcagcagcagtcgcggctggacgacgaccagctggcggagctgcgggagatattccggtccttcgaccgcaacgccgacggcagcctgacgcagctggagctgggctccttgctccggtccctgggcctgacgcccagcgccgaccagctcgacgcgctcatcacccgtgccgacaccaactccaacggcctcatcgagttctccgagtttgtggcgctcgtggcccccgacctcctccaagaccggtccccttactcggaggaccagctccgcaagctcttcgccatcttcgaccgcgacggcaacgggttcatcaccgcggccgagctggcgcactccatggccaagctcggccacgcgctcaccgtcaaggagctcacgggaatgatcaaggaggcagacaccgacggcgatggccgcatcaatttccaggagttctcgcgcgccatcaccgccgccgcatttgacaacatcttctcctgaccgaccgaccgaccgaggccgcaaacaggatgcgttgtgtcgatcatcgattcagttcttggtgattctcagttttcaatttgttcgtcttcttttggggagattaatttaggaagctatagatgaggtgaggtgttcttatgaataacagatcaaacaaaaaaggaatcaatttagggacaaattacatgcatggttgattgtgtt

SEQ ID NO: 39343 - protein, 245 aa, Zea mays subsp. mays
VIYVLIQGVPTFQGANSPPRSVFSGRSTQFVVLPASGSEHERRDHGPRHRSRGPRCRCRRAQAAGCPVAGHGKHQTGRELRDRDSHPGNAAAAVAAGRRPAGGAAGDIPVLRPQRRRQPDAAGAGLLAPVPGPDAQRRPARRAHHPCRHQLQRPHRVLRVCGARGPRPPPRPVPLLGGPAPQALRHLRPRRQRVHHRGRAGALHGQARPRAHRQGAHGNDQGGRHRRRWPHQFPGVLARHHRRRI

SEQ ID NO: 39344 - protein, 211 aa, Zea mays subsp. mays
MSDATTAPATGAGDHVVDAAAHKPPAAPSPDMASIRRGGSSVTETVTQATQQQQSRLDDDQLAELREIFRSFDRNADGSLTQLELGSLLRSLGLTPSADQLDALITRADTNSNGLIEFSEFVALVAPDLLQDRSPYSEDQLRKLFAIFDRDGNGFITAAELAHSMAKLGHALTVKELTGMIKEADTDGDGRINFQEFSRAITAAAFDNIFS

SEQ ID NO: 39345 - protein, 180 aa, Zea mays subsp. mays
MASIRRGGSSVTETVTQATQQQQSRLDDDQLAELREIFRSFDRNADGSLTQLELGSLLRSLGLTPSADQLDALITRADTNSNGLIEFSEFVALVAPDLLQDRSPYSEDQLRKLFAIFDRDGNGFITAAELAHSMAKLGHALTVKELTGMIKEADTDGDGRINFQEFSRAITAAAFDNIFS

SEQ ID NO: 39346 - DNA, 1020 bp, Zea mays subsp. mays
aggcttgattattgtctgcaggtgttagatcacattggtgatgagggcttgaaggctgtgtccttttcttgtcctgatcttcaggagttgagggtatatccaagtgttgttgcaccaagaggtactgtgacggaggaagggttggtagccctatcttcgtgtcggaagttacagcgtgtgctcttctcttgtgttcgaatgacaaacacggcgctgatgacaatagcaaggtactgcccacggctaacgtccttcagactatgcattcgcaagcccaggtcagcagacgccgtcacaggacagccactggacgaaggctttggggcgatagtgcggtcctgcagaggcctgaggcgtcttgccatgtccggcctcctcacggacagcgtgttcctgtacatcggcatgtacgcggagaagctggagatgctctcggtaacgttcgcgggggacaccgacgacggcatggtctatgtgctcaatggctgcaggaacctcaagaagctggtaatcaaggagagccccttcggtgacgccgctctcctcgcgggcgcgcacaggtacgagtcaatgcgcagtctctggatgtcgtcctgccagatcaccctgggtggctgcaaggcccttgcggccaccatgccaaacatcaatgtcgaggtcatcggtggggcgagctttggtgcgatggatggtggtgtcagcggtgcgaggaaggtggacatgctctacctctaccgtactctggctggacctagatgcgatacgccaggattcgtctcgatattgtgagctgtatctatggctactgttggtggcgttcagggaaacccgatgttcttaaccgtgcctgctgtgggctgtggctgtgctactctgtctggtagtgtttcggaaacacgatgtttatttgcgtaaggtagtgtttggttctggaaccattttaagccttgttcagatattcctatacctcatggattggaagtgattagaaaaaaatatgaataattttgacttaacaag

SEQ ID NO: 39347 - protein, 262 aa, Zea mays subsp. mays
RLDYCLQVLDHIGDEGLKAVSFSCPDLQELRVYPSVVAPRGTVTEEGLVALSSCRKLQRVLFSCVRMTNTALMTIARYCPRLTSFRLCIRKPRSADAVTGQPLDEGFGAIVRSCRGLRRLAMSGLLTDSVFLYIGMYAEKLEMLSVTFAGDTDDGMVYVLNGCRNLKKLVIKESPFGDAALLAGAHRYESMRSLWMSSCQITLGGCKALAATMPNINVEVIGGASFGAMDGGVSGARKVDMLYLYRTLAGPRCDTPGFVSIL

SEQ ID NO: 39348 - protein, 196 aa, Zea mays subsp. mays
MTNTALMTIARYCPRLTSFRLCIRKPRSADAVTGQPLDEGFGAIVRSCRGLRRLAMSGLLTDSVFLYIGMYAEKLEMLSVTFAGDTDDGMVYVLNGCRNLKKLVIKESPFGDAALLAGAHRYESMRSLWMSSCQITLGGCKALAATMPNINVEVIGGASFGAMDGGVSGARKVDMLYLYRTLAGPRCDTPGFVSIL

SEQ ID NO: 39349 - protein, 190 aa, Zea mays subsp. mays
MTIARYCPRLTSFRLCIRKPRSADAVTGQPLDEGFGAIVRSCRGLRRLAMSGLLTDSVFLYIGMYAEKLEMLSVTFAGDTDDGMVYVLNGCRNLKKLVIKESPFGDAALLAGAHRYESMRSLWMSSCQITLGGCKALAATMPNINVEVIGGASFGAMDGGVSGARKVDMLYLYRTLAGPRCDTPGFVSIL

SEQ ID NO: 39350 - DNA, 642 bp, Zea mays subsp. mays
aatgcctcaccacgccggttatgtgaacgggcactaagagagcttccaaagaagactggtgaacagttagttatcctatctcaggttctaatggatgatatcaatgtcggttatgaaaggcttgctgaactacaggtaaagaaggtaaatgatgtggaggttgaaaacctgaagcacctgtgcagcctcgtggaaggctgcaccgaagaaaacttaaggtttgacttggacgatgaaagagtcattgtcctgaagtaccagaacgcaaggcttgccacatcccgggtcctcaaacggcacaggataccgtcagccatatcgagcgaccttgtcgaagatcaagtaactgatggcgaggttgagacgtcatgcaccagctaatgctagactcttttttagacctaattgggagttccctgctgtagctcagctcaagaagcgagctgcattgttggcgaggcaagcgcacctgcctgcctgcctgcctggagtacatggtatcacttcctccctttagggcggctttagttttgacataaggaggagtgtctttagaaaataagattatgagctccggggcttttcagtctgaatgtaacggtaacataaccattctttactagaacatttattttttccgtc

SEQ ID NO: 39351 - protein, 126 aa, Zea mays subsp. mays
NASPRRLCERALRELPKKTGEQLVILSQVLMDDINVGYERLAELQVKKVNDVEVENLKHLCSLVEGCTEENLRFDLDDERVIVLKYQNARLATSRVLKRHRIPSAISSDLVEDQVTDGEVETSCTS

SEQ ID NO: 39352 - protein, 96 aa, Zea mays subsp. mays
MDDINVGYERLAELQVKKVNDVEVENLKHLCSLVEGCTEENLRFDLDDERVIVLKYQNARLATSRVLKRHRIPSAISSDLVEDQVTDGEVETSCTS

SEQ ID NO: 39353 - DNA, 1022 bp, Zea mays subsp. mays
aggacgtttccacctccatcaccgctggtcggctatgtgcatcgcggcatgggcgtggcactgccacccgacgcaccgcctgcttctgctgttcaatcgcgacgagtatcactccagccggcgcagtggtgggcggcgggggaggaagccaaggaaatccttggaggcagggacgagctcggcgggggaacgtggatggggtgcacgagggatggtaagctcgccttcctgaccaacgtgcgggaacccagctctctgatcggggccaagaccagaggacagctcccggtcaggtttctacagggcagcctttatccattggagtatgccacagaaattgcaaaggaagcagatcagtacaatggctttaaccttatattagctgatgtgaactcaggaaccatggtttacatctctaatagacccggaggcgatcctgtgattcaaacagttgctcctgggcttcatgtgctttcgaatgctgcaattaattccccttggccaaaggcaatgcgcttaggacagggtttcaaaagatatttggcaatacacgatgatgcagaagcctctttaaaacaaatggtagaagagttgatgatggatactgccagacctgatagatctatggtgcctgacaccggcgacgaccctgagtgggagtacaagctaagctcaatattcattgacactgcaaaggaacaggcacgatatggaacacgaagcatggtggcgctagcagcgaaattggaaggtgaggtaacattctatgaaaggtacttggagaacagtttgtggaaggagaatctcatacagttccagatggagaaggcacaataagacttgagagaaacttaagaacagtcgcaaagactggtcgattgcttattattttgctatcactttatctttaaagtgtatagcaaggcatatacaagagcagtgtataatatgctactattaattacccttttgtgcagatgtacagtaatgtttatccaaataccacaacaagaattggttgc

SEQ ID NO: 39354 - protein, 278 aa, Zea mays subsp. mays
RTFPPPSPLVGYVHRGMGVALPPDAPPASAVQSRRVSLQPAQWWAAGEEAKEILGGRDELGGGTWMGCTRDGKLAFLTNVREPSSLIGAKTRGQLPVRFLQGSLYPLEYATEIAKEADQYNGFNLILADVNSGTMVYISNRPGGDPVIQTVAPGLHVLSNAAINSPWPKAMRLGQGFKRYLAIHDDAEASLKQMVEELMMDTARPDRSMVPDTGDDPEWEYKLSSIFIDTAKEQARYGTRSMVALAAKLEGEVTFYERYLENSLWKENLIQFQMEKAQ

SEQ ID NO: 39355 - protein, 262 aa, Zea mays subsp. mays
MGVALPPDAPPASAVQSRRVSLQPAQWWAAGEEAKEILGGRDELGGGTWMGCTRDGKLAFLTNVREPSSLIGAKTRGQLPVRFLQGSLYPLEYATEIAKEADQYNGFNLILADVNSGTMVYISNRPGGDPVIQTVAPGLHVLSNAAINSPWPKAMRLGQGFKRYLAIHDDAEASLKQMVEELMMDTARPDRSMVPDTGDDPEWEYKLSSIFIDTAKEQARYGTRSMVALAAKLEGEVTFYERYLENSLWKENLIQFQMEKAQ

SEQ ID NO: 39356 - protein, 213 aa, Zea mays subsp. mays
MGCTRDGKLAFLTNVREPSSLIGAKTRGQLPVRFLQGSLYPLEYATEIAKEADQYNGFNLILADVNSGTMVYISNRPGGDPVIQTVAPGLHVLSNAAINSPWPKAMRLGQGFKRYLAIHDDAEASLKQMVEELMMDTARPDRSMVPDTGDDPEWEYKLSSIFIDTAKEQARYGTRSMVALAAKLEGEVTFYERYLENSLWKENLIQFQMEKAQ

SEQ ID NO: 39357 - DNA, 998 bp, Zea mays subsp. mays
agctcttctcagggaatataccatccacagaaaaaaagcgtcccgcctcatcccgagatcagaatcagaggccacgcggcgatggcgatggcgatgccgatggcagtggcgcgggtgaccagcctcgcctgcgccccccgacaggcgcagcatcgccgccgccatagccttgccccgccgtgcgcctcgggtgcggtggaggtgcgggtctgcacgaaccgcacgtgcgcgcggcagggggggcgcgaggtcctggctgcgctcgcgggcctcgcaccgccggcggtcgacgtggcctcctgcgggtgcctcgggcgctgcggcgccgggcccaacgttgcggcgtccgtccctgggagcaccgcggtgttcggccacgtgggcacggcggcgcgaggcgcgcagctactggagcacctcctcggccccgcggaattcgatgcggccctagggctcaccgcgctggccacgagggagaaggcggaggctgccctcgagaagggaaacgcggacgaagcggaagcccttctcaccgaggtctggactggacgcatacgccagtctgcgattgtgcatgctctctcagttgctggatccgagtttgatgattacacttgtatgtttgcataggttattgggttcaatgcttgtggtggtctgcatttggtgtacatgagcaggtttgttccattgtttcgtgttcaatgtgcgacttgccgacttgtgtgctttgtgtaagtttggcatgaaacatcctgttgaaattacgcaggtctaaggcgagattggaaattggggatatccctggtgcacttggggatgctgaggaagcaataagaatagctcccagatttcctcaggtacttgctttagttagaacctccaaagttattgagtataacctttcttgtacaaccatattcatgttcttacatccatgggagtatattagtgtaaggttgaagaaatacaaatatcagtattggatgtctatgtct

SEQ ID NO: 39358 - protein, 209 aa, Zea mays subsp. mays
SSSQGIYHPQKKSVPPHPEIRIRGHAAMAMAMPMAVARVTSLACAPRQAQHRRRHSLAPPCASGAVEVRVCTNRTCARQGGREVLAALAGLAPPAVDVASCGCLGRCGAGPNVAASVPGSTAVFGHVGTAARGAQLLEHLLGPAEFDAALGLTALATREKAEAALEKGNADEAEALLTEVWTGRIRQSAIVHALSVAGSEFDDYTCMFA

SEQ ID NO: 39359 - protein, 182 aa, Zea mays subsp. mays
MAMAMPMAVARVTSLACAPRQAQHRRRHSLAPPCASGAVEVRVCTNRTCARQGGREVLAALAGLAPPAVDVASCGCLGRCGAGPNVAASVPGSTAVFGHVGTAARGAQLLEHLLGPAEFDAALGLTALATREKAEAALEKGNADEAEALLTEVWTGRIRQSAIVHALSVAGSEFDDYTCMFA

SEQ ID NO: 39360 - protein, 180 aa, Zea mays subsp. mays
MAMPMAVARVTSLACAPRQAQHRRRHSLAPPCASGAVEVRVCTNRTCARQGGREVLAALAGLAPPAVDVASCGCLGRCGAGPNVAASVPGSTAVFGHVGTAARGAQLLEHLLGPAEFDAALGLTALATREKAEAALEKGNADEAEALLTEVWTGRIRQSAIVHALSVAGSEFDDYTCMFA

SEQ ID NO: 39361 - DNA, 771 bp, Zea mays subsp. mays
accggatcaccagcctacagctcgtcacatctctctctccgcccggccggcctctagactcactctagccatatggccacggtgcacggcagcaggctcatcttcctcttcgaggccacgctcttctcggcgctgctgctcgtcccggcacgccctgcttccgccacagacggcagcgcgtacccggccggcgactgcccctacccgtgcctgccgccgcccgccgtcaccgccaactgcccgccgcctccgccggctgcggcgtcgtactcgtacccgccaccgccgggggcttacattccctacttccagcctgcggcgggtggcggtggtggcggcggtagtggggggtacggcggctacccggcgccgccgccgcccaaccccatcctgccgtggtacccatggtactacaagacgccgccgtcgtcctcggccgccacgtcgggcagggggagtcgcgttcttcttgggtcggccgccatggtagctgctgctgccctgctgatcatggcttagccgcagcccgcagcagtcgttctttttgcatcttcgatcttgtcctctcccccaggttttctttctttttttcttttgttgatttactgctcaggatttatattcagaggtatatatataacgaggcagcattatatatattgcttgtactcctaatttatcagctacatgtctctagttccatgattaaaatgattaccactcaactttgagtagtggagcaactatgggcgtgtttgccaccttggtccg

SEQ ID NO: 39362 - protein, 162 aa, Zea mays subsp. mays
PDHQPTARHISLSARPASRLTLAIWPRCTAAGSSSSSRPRSSRRCCSSRHALLPPQTAARTRPATAPTRACRRPPSPPTARRLRRLRRRTRTRHRRGLTFPTSSLRRVAVVAAVVGGTAATRRRRRPTPSCRGTHGTTRRRRRPRPPRRAGGVAFFLGRPPW

SEQ ID NO: 39363 - protein, 148 aa, Zea mays subsp. mays
MATVHGSRLIFLFEATLFSALLLVPARPASATDGSAYPAGDCPYPCLPPPAVTANCPPPPPAAASYSYPPPPGAYIPYFQPAAGGGGGGGSGGYGGYPAPPPPNPILPWYPWYYKTPPSSSAATSGRGSRVLLGSAAMVAAAALLIMA

SEQ ID NO: 39364 - protein, 108 aa, Zea mays subsp. mays
MVLQDAAVVLGRHVGQGESRSSWVGRHGSCCCPADHGLAAARSSRSFCIFDLVLSPRFSFFFSFVDLLLRIYIQRYIYNEAALYILLVLLIYQLHVSSSMIKMITTQL

SEQ ID NO: 39365 - DNA, 1039 bp, Zea mays subsp. mays
ccctgatgatgactgcataattacagtttctgcgaaagagttctttgaagatcctgtatctccaacaattgatgctgcagttcgtttgcagcctagatgcagcgagaaaagtgatttagaatcagctgagcagtcatacacaacacgcttgctggtgtcaacatcacgtattgggtgcctaattggcaaaggtggttcaatcattactgagatacggagaacatccagagcaaatgtacgtattctttcaaaagaaaatgttccaaaggtagcagcagaagatgatgagatggttcagatcactggaggccttgatgttgcaagaaatgctcttgtgcaaatagctacaaggctgaaagccaatttctttgaaagagagggctctttatctgcatttccacctgttatcccttaccatcctttgcctgctggtgtttcggatgaaccaaaatatctaggcagagacaccaagcctgttgggcactatctatattcaagtggttttcgtacatcggatgacacgattccttctgacagctatgcaagttatggcggctcccaggcacctggaagaggatatggggcttacagcgggtacagtgctcgctcctctaatagtgggttatctggtcatagttctcttcactatggaaagcgtcatggttattaggatttagattgcttgataaagcagctatctgatggacctgttattttcacctttgccacccctgctcccctcacgtactataaaaacagccaagacattgaagtttggagcctgcttattggagtcccttcccaaaccagatgaccaagagagcccaacctggaagctttgcttaagaggacccgtgtggatgccatagaccaccttatattcctcactacattactttgtcttcctgtgggcctatgtttttagccctgccgcaaatgttctgaacctatgtattgaaaggtcgcatttgagactgcatgtatttgcttgtttgaaacctgattcagtttagtgattttgttgaaacacttgtttcct

SEQ ID NO: 39366 - protein, 222 aa, Zea mays subsp. mays
PDDDCIITVSAKEFFEDPVSPTIDAAVRLQPRCSEKSDLESAEQSYTTRLLVSTSRIGCLIGKGGSIITEIRRTSRANVRILSKENVPKVAAEDDEMVQITGGLDVARNALVQIATRLKANFFEREGSLSAFPPVIPYHPLPAGVSDEPKYLGRDTKPVGHYLYSSGFRTSDDTIPSDSYASYGGSQAPGRGYGAYSGYSARSSNSGLSGHSSLHYGKRHGY

SEQ ID NO: 39367 - protein, 126 aa, Zea mays subsp. mays
MVQITGGLDVARNALVQIATRLKANFFEREGSLSAFPPVIPYHPLPAGVSDEPKYLGRDTKPVGHYLYSSGFRTSDDTIPSDSYASYGGSQAPGRGYGAYSGYSARSSNSGLSGHSSLHYGKRHGY

SEQ ID NO: 39368 - DNA, 727 bp, Zea mays subsp. mays
cctaatttgattatgatgaagaacagtagcctccaccagcaacaagcaaaagtccctatgcaggctctctacactcctggtcaccaatcacagacttccttaagttcatcaaaggtaggaccttctctaacaaacctttctaccggaggaggggatctatctcgatcttcaaacgcccctgttgcttctggttcaccatccaattcggtgtccaaaagtaccggtggcagcccacccgccacaggaaatgcaaagggtgttcagcagcctgtccaactgccatcaccacagcagcagtcagccaagaactccgcgtcgacgtctggctccaggactactcccacgaatcatttcagtatggccatgccatccatccttggccagcagcctaatgcatcgcctggttccaatcctgggagcaagcagcactcacatacgcagccagcatcgatgaaacagcagccattcccgcaaggccatttcttcatatccaacacgtacgctcctccggctccgggagccggaggtgctgctgccctaggcctctaccagaagcgaccaggcgacaagacgcagcagcagcagcagcagcaggcatcgcaccagcagagcgccatgtcagctgccggcggcaataacgtgaaagcactccatccttcatccggcgggtttatgcatctcgcagcccagtctgcaggtggcatggcgcacacccacgtgtcggcgg

SEQ ID NO: 39369 - protein, 242 aa, Zea mays subsp. mays
PNLIMMKNSSLHQQQAKVPMQALYTPGHQSQTSLSSSKVGPSLTNLSTGGGDLSRSSNAPVASGSPSNSVSKSTGGSPPATGNAKGVQQPVQLPSPQQQSAKNSASTSGSRTTPTNHFSMAMPSILGQQPNASPGSNPGSKQHSHTQPASMKQQPFPQGHFFISNTYAPPAPGAGGAAALGLYQKRPGDKTQQQQQQQASHQQSAMSAAGGNNVKALHPSSGGFMHLAAQSAGGMAHTHVSA

SEQ ID NO: 39370 - protein, 238 aa, Zea mays subsp. mays
MMKNSSLHQQQAKVPMQALYTPGHQSQTSLSSSKVGPSLTNLSTGGGDLSRSSNAPVASGSPSNSVSKSTGGSPPATGNAKGVQQPVQLPSPQQQSAKNSASTSGSRTTPTNHFSMAMPSILGQQPNASPGSNPGSKQHSHTQPASMKQQPFPQGHFFISNTYAPPAPGAGGAAALGLYQKRPGDKTQQQQQQQASHQQSAMSAAGGNNVKALHPSSGGFMHLAAQSAGGMAHTHVSA

SEQ ID NO: 39371 - protein, 237 aa, Zea mays subsp. mays
MKNSSLHQQQAKVPMQALYTPGHQSQTSLSSSKVGPSLTNLSTGGGDLSRSSNAPVASGSPSNSVSKSTGGSPPATGNAKGVQQPVQLPSPQQQSAKNSASTSGSRTTPTNHFSMAMPSILGQQPNASPGSNPGSKQHSHTQPASMKQQPFPQGHFFISNTYAPPAPGAGGAAALGLYQKRPGDKTQQQQQQQASHQQSAMSAAGGNNVKALHPSSGGFMHLAAQSAGGMAHTHVSA

SEQ ID NO: 39372 - DNA, 796 bp, Zea mays subsp. mays
aacacaaaacacatccatcctcgctagctcgctctctcttgcaactccagtgcttctcactgccactgccagcaggtcgagctgctccgcaagtctgctttgctgctgcacctgcaagtctgcaaccgcgcacagagatgtcgacgactgtgagccgtgcgtccctcgaccagaaactcgccctcgccaagcgctgctcccgagaggcgaccctcgccggagccaaggcggcagccgtggcgactatcgcctccgcgatccccaccctggccagcgtgcggatgctgccatgggccaaggccaacatcaaccccaccggccaggcgctcatcgtctccacggtggctgggatggcctacttcatcgccgccgataagaagatcctgtcgctggcgaggcgccactcgttcgaccaagcccctgagcacctcaagaacacctccttccagggcaccggccgtccccacccggctttcttcaggccgtgagacgagacctccgtcgagctagctagctacctgcctctttcagttcgtcagtgcaaattaagcaccaaatgtcgaccgatgcctctgaataaatttaactgcgaggctagctagctgctgtacatcgatctgctagtattactacggcgaggctgctgaacagcgctgtagagtagtattggtgctcagttcggaatgtatgtgtaatctgaacgccaagtttaattttatgttacttctaccgattaaccaaccttgtctgttattctcctgtaaagagagagagagcaacaataagggcctgttgg

SEQ ID NO: 39373 - protein, 161 aa, Zea mays subsp. mays
HKTHPSSLARSLLQLQCFSLPLPAGRAAPQVCFAAAPASLQPRTEMSTTVSRASLDQKLALAKRCSREATLAGAKAAAVATIASAIPTLASVRMLPWAKANINPTGQALIVSTVAGMAYFIAADKKILSLARRHSFDQAPEHLKNTSFQGTGRPHPAFFRP

SEQ ID NO: 39374 - protein, 124 aa, Zea mays subsp. mays
TQNTSILASSLSLATPVLLTATASRSSCSASLLCCCTCKSATAHRDVDDCEPCVPRPETRPRQALLPRGDPRRSQGGSRGDYRLRDPHPGQRADAAMGQGQHQPHRPGAHRLHGGWDGLLHRRR

SEQ ID NO: 39375 - protein, 116 aa, Zea mays subsp. mays
MSTTVSRASLDQKLALAKRCSREATLAGAKAAAVATIASAIPTLASVRMLPWAKANINPTGQALIVSTVAGMAYFIAADKKILSLARRHSFDQAPEHLKNTSFQGTGRPHPAFFRP

SEQ ID NO: 39376 - DNA, 1062 bp, Zea mays subsp. mays
ataaacagagtgagagactggtagcagccgcatgtgctagagctagacagaagtcagtctccttcccctctctctagtgctcgccggctctttccgtcgccatggacgtcctcctctgctgctgcctgctgcttctcctggcctccgccgcgtccgccggcagcgagcggtgcgtgcggcaggggaaggcggcctactcttcctcgctctctccggcccctcacgatgagatgccgagacgcaaggctgtgcagcgccgggggagtgcgggtggtgctgaccgacttccacaggagcaaccgtacggacttcctgctcgccgggccggcgttcgcgggcctggccaagcccgggatggcccagcagttgaacaggcgagacgccctctccgtagagtacaaaaggattccctgcgagtacaaggagaagaacctgtcgatccgggtggaagaagcgggcgacaggagccggggcaagctggtggtgaagctgctgtaccagggcgggcagaccgacgtactggcggtggaggtggcccccgtggggtcgtcgtcggagtggcggttcatgacaagggcgtacgggccggtgtggagcacggaccgggcccccgccggcccgctgcagttccgcgcggtcgtcacgggcggctacgacggcaagtgggtgtgggccgagcaggaggtgctgccggccgactggcgccccggccaggtctacgacaccggcgtccgcatcgttgacgtcgcccgggacgcatcccgcggctgcaccgccgccgccatggacgactggaagtgaagtgaggatatggctgggtagattaaaaatacgtatgaatacatactaacacgtcgccacatcggtgctgcgacactctggtaagaagaggacagcatgcaatggctccaagaacagcatcccccccaagcgcgtccggctgtccagaggagaggaggaagaagattggagtagctagcagctagggtgtaattgtgtatgcaggatcttctatcaaggtcgatccgattagatgcaggcaaaaaaaaagagctgggatcc

SEQ ID NO: 39377 - protein, 213 aa, Zea mays subsp. mays
MDVLLCCCLLLLLASAASAGSERCVRQGKAAYSSSLSPAPHDEMPRRKAVQRRGSAGGADRLPQEQPYGLPARRAGVRGPGQARDGPAVEQARRPLRRVQKDSLRVQGEEPVDPGGRSGRQEPGQAGGEAAVPGRADRRTGGGGGPRGVVVGVAVHDKGVRAGVEHGPGPRRPAAVPRGRHGRLRRQVGVGRAGGAAGRLAPRPGLRHRRPHR

SEQ ID NO: 39378 - protein, 191 aa, Zea mays subsp. mays
MRCRDARLCSAGGVRVVLTDFHRSNRTDFLLAGPAFAGLAKPGMAQQLNRRDALSVEYKRIPCEYKEKNLSIRVEEAGDRSRGKLVVKLLYQGGQTDVLAVEVAPVGSSSEWRFMTRAYGPVWSTDRAPAGPLQFRAVVTGGYDGKWVWAEQEVLPADWRPGQVYDTGVRIVDVARDASRGCTAAAMDDWK

SEQ ID NO: 39379 - protein, 170 aa, Zea mays subsp. mays
MPRRKAVQRRGSAGGADRLPQEQPYGLPARRAGVRGPGQARDGPAVEQARRPLRRVQKDSLRVQGEEPVDPGGRSGRQEPGQAGGEAAVPGRADRRTGGGGGPRGVVVGVAVHDKGVRAGVEHGPGPRRPAAVPRGRHGRLRRQVGVGRAGGAAGRLAPRPGLRHRRPHR

SEQ ID NO: 39380 - DNA, 735 bp, Zea mays subsp. mays
agtggtgcccacagctaaagccttgtgcaaaattatcattaagctgtcatcaatcatcatggctgccattacggcaggtctgctggtactcctcgctgctgccgtcgccgctccggcgcacgccacggactacacggtcggcgactcgtccgggtggagcagcggcgtggactacgccacctgggcgagcggcaagaccttcgctgctggggacaacctagtgttccagtacagcgcgatgcacacggtggtggaggtgagctccgcggactacggcgcgtgctcggccagcaactccatccagtcctacagcgaccagaacaccaagatcgcgctcacagcgcccggcacgcgctacttcatctgcggcaccccgggccactgcggcaacggcatgaagctcgccgtcacggtcgccgctgggaccgccaccaccaccccggcgtcatccccgcccgccgctgactcgcctccagagacagccacgccgtccgggtctacgcccacggcaacgacgtcgccgtcggcgcccacgacgaagcccacctcgagcagcactggcgctgcctgcggtggggaggcccggctcgctatgggcgttttggcctgggccgcgggcctcgccgggctcgccctgatgggttaggcaagaggcagtgctgtttccgttccatgcttttcctgttgcaggcttttgtggcccgttgtgtttaatctgaattcacgtctatggcc

SEQ ID NO: 39381 - protein, 214 aa, Zea mays subsp. mays
VVPTAKALCKIIIKLSSIIMAAITAGLLVLLAAAVAAPAHATDYTVGDSSGWSSGVDYATWASGKTFAAGDNLVFQYSAMHTVVEVSSADYGACSASNSIQSYSDQNTKIALTAPGTRYFICGTPGHCGNGMKLAVTVAAGTATTTPASSPPAADSPPETATPSGSTPTATTSPSAPTTKPTSSSTGAACGGEARLAMGVLAWAAGLAGLALMG

SEQ ID NO: 39382 - protein, 195 aa, Zea mays subsp. mays
MAAITAGLLVLLAAAVAAPAHATDYTVGDSSGWSSGVDYATWASGKTFAAGDNLVFQYSAMHTVVEVSSADYGACSASNSIQSYSDQNTKIALTAPGTRYFICGTPGHCGNGMKLAVTVAAGTATTTPASSPPAADSPPETATPSGSTPTATTSPSAPTTKPTSSSTGAACGGEARLAMGVLAWAAGLAGLALMG

SEQ ID NO: 39383 - protein, 135 aa, Zea mays subsp. mays
MHTVVEVSSADYGACSASNSIQSYSDQNTKIALTAPGTRYFICGTPGHCGNGMKLAVTVAAGTATTTPASSPPAADSPPETATPSGSTPTATTSPSAPTTKPTSSSTGAACGGEARLAMGVLAWAAGLAGLALMG

SEQ ID NO: 39384 - DNA, 417 bp, Zea mays subsp. mays
atgctgtcgttccggcgccaggtgaccaaggacaacaacttgtcagtgaaatcggggtcacgcaaatctggccctgatgaccaccattggagctccccagccaaactgccacataaggacgttgacaagatttccagagaaaagaagcagccgtggatgccgttcatctgctgccactccgtgcgctgataatatattttgcatcagttgacaactctacatacatgtgctgctgtaactaatgctatccgtctttgtgtagatagtctgcaatctagtatctgatattttgaatcagtgcaattttgatgtatccgctacctgacttgttagacatttgcgcgtgaatctgtcctgatgttcagattcagctagtgtttctgtggactgaacaggcctggaatcttgtaccggatt

SEQ ID NO: 39385 - protein, 62 aa, Zea mays subsp. mays
MLSFRRQVTKDNNLSVKSGSRKSGPDDHHWSSPAKLPHKDVDKISREKKQPWMPFICCHSVR

SEQ ID NO: 39386 - protein, 44 aa, Zea mays subsp. mays
MTTIGAPQPNCHIRTLTRFPEKRSSRGCRSSAATPCADNIFCIS

SEQ ID NO: 39387 - DNA, 903 bp, Zea mays subsp. mays
tcttccttttacttttttctgatatttctatcggctacgatctcatgcgttagcgagtgccgccccgcccgcgctatccactcgtctctccgtccccatggccacttatctcaacgcaccgccggcagccaccacgacgactgcaagctgccgccatgccttctccggtggcagcctccgtctactccggccgagccgaccgacgctgcacgtgacgtgccaagccgccgcctcctcccagcagccgtcgtccccgtccaggaggtcagcctgcctcctcggcatcgcgtgcgccgtcctgctccgcccacgtgccgcctccgccgccgaaaccgacgacgagccggccaacaacggctggtggctgaccgagttccccttgcccgtgcccaagatcgtcaacaaggagatcaacaacgcggagacgggcacgcgctccttcctcaagaacggcatctacatggcggacatcgggcccagcttcgcggcgcacgcgtaccggctgcgcagcacggccttcgacctgctggcgctggaggacctgctgggcaaggacgcctccaactacgtcaacaagtacctccgcctcaagtccaccttcatgtactacgacttcgacaagctcatctccgccgccgaagacaagccgcccttcgtcgacctcgccaaccgcctcttcgacagcttcgagacgctccaggaggccgtcacagccaaggacgacgccaggatcggcgaccgctacgccgagacaaagctcatcctccaggagctcatggccaagatggcctagcagaaccacaatttttcattcatatatcatgatgtgtaaatgaatacttgaaactcacaaggggtattgcagaattcccagagcagggaaatacaattatcatgtcagac

SEQ ID NO: 39388 - protein, 274 aa, Zea mays subsp. mays
SSFYFFLIFLSATISCVSECRPARAIHSSLRPHGHLSQRTAGSHHDDCKLPPCLLRWQPPSTPAEPTDAARDVPSRRLLPAAVVPVQEVSLPPRHRVRRPAPPTCRLRRRNRRRAGQQRLVADRVPLARAQDRQQGDQQRGDGHALLPQERHLHGGHRAQLRGARVPAAQHGLRPAGAGGPAGQGRLQLRQQVPPPQVHLHVLRLRQAHLRRRRQAALRRPRQPPLRQLRDAPGGRHSQGRRQDRRPLRRDKAHPPGAHGQDGLAEPQFFIHIS

SEQ ID NO: 39389 - protein, 231 aa, Zea mays subsp. mays
MATYLNAPPAATTTTASCRHAFSGGSLRLLRPSRPTLHVTCQAAASSQQPSSPSRRSACLLGIACAVLLRPRAASAAETDDEPANNGWWLTEFPLPVPKIVNKEINNAETGTRSFLKNGIYMADIGPSFAAHAYRLRSTAFDLLALEDLLGKDASNYVNKYLRLKSTFMYYDFDKLISAAEDKPPFVDLANRLFDSFETLQEAVTAKDDARIGDRYAETKLILQELMAKMA

SEQ ID NO: 39390 - DNA, 918 bp, Zea mays subsp. mays
gacacccgcgcgcgccctcgcgcggacaaagccgtgaggggcagagccgagggaggcggggctgtgccggccacgcaatgcagcagccggagcctgccgatctgccgggctgggccttcccgccacgggcgggaccggcgcctgccgccgcgcgcggggcgcaccaccgccgggccagatctgaggttgccttccgcctgccggacgacctcggcctcggcggcggcggcggccccgatggcgacgccttcgacgagatcggttcggaggacgacctcttctccaccttcatggacatcgagaagatctccacctccgggccctccgaccgcgccgccgagaactcgtctccgccgcgccccaagcaccgccacagcagctccgtcgatggctcgggcttcttcttctcacccggcgccggcggtggcgcggggaaggatgccgccgcgtcgctggctgaggtcttggaggccaagaagtccatgactcccgagcaactggccgagctcgccgccatcgaccccaagcgcgccaagaggtaccgcctcctcgatcgcggcaatccatccacttctttagttacggaggtggcgaggaattgactaaggcgtcgaggacaatcatgtgctcatgctttatgatgggaatggctggagattaataaggtgtttggtttgaggaataagctatctagaataagttgatccatcatcactttattagtcagttagcattaacatgaaaaataatgtcgtcccaccaaattaaatttgaggaatggacttatgacgcaccaacccatcttggatggagtgaacacatccttaaggtgtttggtttaggaatgaggtggtctatttcttctcacttctcacttttttatttggttcgtggaataaaatgggttgatccatcacc

SEQ ID NO: 39391 - protein, 199 aa, Zea mays subsp. mays
HPRAPSRGQSREGQSRGRRGCAGHAMQQPEPADLPGWAFPPRAGPAPAAARGAHHRRARSEVAFRLPDDLGLGGGGGPDGDAFDEIGSEDDLFSTFMDIEKISTSGPSDRAAENSSPPRPKHRHSSSVDGSGFFFSPGAGGGAGKDAAASLAEVLEAKKSMTPEQLAELAAIDPKRAKRYRLLDRGNPSTSLVTEVARN

SEQ ID NO: 39392 - protein, 174 aa, Zea mays subsp. mays
MQQPEPADLPGWAFPPRAGPAPAAARGAHHRRARSEVAFRLPDDLGLGGGGGPDGDAFDEIGSEDDLFSTFMDIEKISTSGPSDRAAENSSPPRPKHRHSSSVDGSGFFFSPGAGGGAGKDAAASLAEVLEAKKSMTPEQLAELAAIDPKRAKRYRLLDRGNPSTSLVTEVARN

SEQ ID NO: 39393 - protein, 161 aa, Zea mays subsp. mays
DTRARPRADKAVRGRAEGGGAVPATQCSSRSLPICRAGPSRHGRDRRLPPRAGRTTAGPDLRLPSACRTTSASAAAAAPMATPSTRSVRRTTSSPPSWTSRRSPPPGPPTAPPRTRLRRAPSTATAAPSMARASSSHPAPAVARGRMPPRRWLRSWRPRSP

SEQ ID NO: 39394 - DNA, 1114 bp, Zea mays subsp. mays
aaaccggagcattccattgtaccccgcggtgacgcgtcccggccccggcggccggcgggtctgcctaccggtaccggccccgctcgctcgccgagtcaacggcttgactgcgcccgcccgccacgttcgtagtactatacaagtacatgcctttgccttccctttcctctcctctcctcctctcccacagtcccacccgtttcgcagtgcagaagccggcgaaacttccaagcccaaggaaggaaaaaaaaaactgtcacctttaactcgatcccctcttccccgcccgagtcagagcggcggcgccggagccggagccgacagcttccggcaagcgggggctacttggtgcggcgggctatttccgcggttttgtgccacagcgggactgaactgcccgcccaggctgccctatcagggtcaccaagattgaacaagactgaactgccgcgcttcaggatactgaactgccatctcagttaaatgatatactgcacaacagtgggcagcgatagtttgagacacattagcaatgagttgtttttctcaccttttcaagagaaaaagggggccacaacaacaagacgatccatctgacaattatttcactggttctgagaatataacaagattcagctacagggaactggttagagccacatcaaattttgaccaaggcaataagattggtgagggcggctatggacctgtctacaagggaacactcaaggatgggacacttattgccgtgaaggttctgtctttacattctagacaaggggcaaaggagtttcttaatgagcttcttgcaatctctgatgtaacacatgagaatcttgtcaaactctatggctgctgtgtagaaggaaaccacaggatccttatctacaattatcttgaaaataatagtcttgcacatacccttctagattcgcgacacagcaacatccagttcaactggagaactcgggtaaatatctgcatcggtgttgcccaaggattagctttcctccatggcagtgtcagccctcacattgttcaccgtgacatcaaggcgagcaatatacttcttgataaggatatgacgccaaaaatatctgattttggtctggca

SEQ ID NO: 39395 - protein, 194 aa, Zea mays subsp. mays
MSCFSHLFKRKRGPQQQDDPSDNYFTGSENITRFSYRELVRATSNFDQGNKIGEGGYGPVYKGTLKDGTLIAVKVLSLHSRQGAKEFLNELLAISDVTHENLVKLYGCCVEGNHRILIYNYLENNSLAHTLLDSRHSNIQFNWRTRVNICIGVAQGLAFLHGSVSPHIVHRDIKASNILLDKDMTPKISDFGLA

SEQ ID NO: 39396 - protein, 143 aa, Zea mays subsp. mays
NRSIPLYPAVTRPGPGGRRVCLPVPAPLARRVNGLTAPARHVRSTIQVHAFAFPFLSSPPLPQSHPFRSAEAGETSKPKEGKKKLSPLTRSPLPRPSQSGGAGAGADSFRQAGATWCGGLFPRFCATAGLNCPPRLPYQGHQD

SEQ ID NO: 39397 - DNA, 994 bp, Zea mays subsp. mays
aagttggaatgatgtactggacgtactagagcactcccttgctgctaacaacatttcatatgttcggatgaaaggaggaagaaaatcacaggcagcactctcccaattcaagggtcaggagagcaatataaatgtagataaagtgaacagggcagcctgcaaaatgcagcctgttcaagtacttctgatgcttatacagcatggagcaaacggtcttaatctactagaggcacagcatgttattctagtggagccattactaaatcctgctgctgaggcacaagctatcagcaggatccatagagttggacaagacaaaagcacatttgttcaccgttttatagtgaagaaaacaatagaagagagcatctacaaattgaacaggagcagagctgtctgctctactataaaccgtaaatccaaaaacttcaaagatgagcctgttttgacgctgaaggatgtggagtcgctattcccgatggcaggacctgatgaacccctagaacaggcagatcaaaattacggcgatagcttgaggagtttgcctccatctgttgccgctgggttagctgctgaaagaaggcgactaatggagcaataagttaatggagtttgcctccatctgttgccgctgggttagctgctgaaagaaggcgactaatcaagggacctccatccatcgttgtggcagttgtgctaattttacttgatcagaatttctcttcgcagcacagtaacgacagtaggagaatgatgctccttagttatgaagcacccccatcatgagaatcaggctatttacgttgtaactttaggattttttatgtacctgtaggccttttagactcttgtacataagcttctagttttagttcgtgtatacggcccatcctgtagttttgatgtagcagctctcagctctgccactgctacaccaacttatggcatgtataagtgtactaatacatggtcatcagcatgatacattctttag

SEQ ID NO: 39398 - protein, 199 aa, Zea mays subsp. mays
SWNDVLDVLEHSLAANNISYVRMKGGRKSQAALSQFKGQESNINVDKVNRAACKMQPVQVLLMLIQHGANGLNLLEAQHVILVEPLLNPAAEAQAISRIHRVGQDKSTFVHRFIVKKTIEESIYKLNRSRAVCSTINRKSKNFKDEPVLTLKDVESLFPMAGPDEPLEQADQNYGDSLRSLPPSVAAGLAAERRRLMEQ

SEQ ID NO: 39399 - protein, 177 aa, Zea mays subsp. mays
MKGGRKSQAALSQFKGQESNINVDKVNRAACKMQPVQVLLMLIQHGANGLNLLEAQHVILVEPLLNPAAEAQAISRIHRVGQDKSTFVHRFIVKKTIEESIYKLNRSRAVCSTINRKSKNFKDEPVLTLKDVESLFPMAGPDEPLEQADQNYGDSLRSLPPSVAAGLAAERRRLMEQ

SEQ ID NO: 39400 - protein, 145 aa, Zea mays subsp. mays
MQPVQVLLMLIQHGANGLNLLEAQHVILVEPLLNPAAEAQAISRIHRVGQDKSTFVHRFIVKKTIEESIYKLNRSRAVCSTINRKSKNFKDEPVLTLKDVESLFPMAGPDEPLEQADQNYGDSLRSLPPSVAAGLAAERRRLMEQ

SEQ ID NO: 39401 - DNA, 1052 bp, Zea mays subsp. mays
aggcaagaagcaaggcaacacagcaagcagcagaaaacatctccgggagtctgaaccacccacagcgcggcaggccacaggttccgcttccgcacagctgctagctagcgtgcgttcgcaagtagcagtagcgttccatcgaggcaatggcggtgatggccgaagtagtgtcgaccaccggcgcggcgctccggagcccggcctcgcagccgctgccggccgcggtgaagaacgcagacgctgagaagctccagttcatcgaggagatgacctccaacgtggacgccgtgcaggagcgcgtgctgggggagatcctcgcccgcaacgccggcaccgagtacctcgccaagtacggcctcgccgccgctactacggaccgcgccaccttccgcgccaaggtgccgatggcgacgtacgaggacctgcagccgtacatccgccgcattgccgacggcgaccgctcgcccatcctgtcggggcacccggtgtccgagttcctcaccagctccggcacgtccgccggcgagcgcaagctcatgcccaccatcgaggacgagctcaaccgccgccagctgctgtacagcctccagatgcccgtaatgaacctgtaagcttttggactgctacagcgctactccagttagagatggccaaacgggccgcccggcccggcccggcccgggcccggtgaagcccggccaaaaaccgggccgggcctgctgtgccatcgtgctcaagtttctgtctaagcccggcccgcagcgggcctaaacgggccgggccggcccgtttagcacgaaaaaaacgggccgaaaacgtgctaaacgggccggtaagcacgttttagtgtaaaaaaaccgggcttaacgggcttagaggtaaacgggccgtgccgggctagcccgccgtgcctagtttcctgtccaagcccgcccgcttattctaccgtgccgggttcggaccgggcccaaaaaccgggcttcgtgccgggctcacgggcctcgtgctttttggccatctataactccagtaccagtaattactgacagcac

SEQ ID NO: 39402 - protein, 154 aa, Zea mays subsp. mays
MAVMAEVVSTTGAALRSPASQPLPAAVKNADAEKLQFIEEMTSNVDAVQERVLGEILARNAGTEYLAKYGLAAATTDRATFRAKVPMATYEDLQPYIRRIADGDRSPILSGHPVSEFLTSSGTSAGERKLMPTIEDELNRRQLLYSLQMPVMNL

SEQ ID NO: 39403 - protein, 151 aa, Zea mays subsp. mays
MAEVVSTTGAALRSPASQPLPAAVKNADAEKLQFIEEMTSNVDAVQERVLGEILARNAGTEYLAKYGLAAATTDRATFRAKVPMATYEDLQPYIRRIADGDRSPILSGHPVSEFLTSSGTSAGERKLMPTIEDELNRRQLLYSLQMPVMNL

SEQ ID NO: 39404 - protein, 114 aa, Zea mays subsp. mays
MTSNVDAVQERVLGEILARNAGTEYLAKYGLAAATTDRATFRAKVPMATYEDLQPYIRRIADGDRSPILSGHPVSEFLTSSGTSAGERKLMPTIEDELNRRQLLYSLQMPVMNL

SEQ ID NO: 39405 - DNA, 623 bp, Zea mays subsp. mays
acacgcaaacaaaaaaatggctcacctcttcagagagctgtctctgggtcactccaagcgagagacgacgccgccgccaccgtcgatggcatccacgattccctccgatctaccaccgtctccactcggacaactcgccgtccagttctccgaatccgacctccgcctcatttcctacgagatcttcgtcgccgcatgccgtagcgccaccgggaagcctctctcatccgccgtctcgtcactctccgttgctaatccggactctccgagcaacggcgcctctcccgcttctccagctgcccagcgttctctgaccgcagccgccgcgagcaagatgaagaaggccttggggatgaagtcgttgtcatccttatcgcctggatctaccaagagccctggctcgggctctggttcgggctctggctcgggtggtaagtcgaagcgccccactactgtcggtgagctgatgcggatccaaatgcgagtatcggagtccgtcgattcgcgcgttcgtagagctttccttaggatcgctgctagtcaggttagctcagttttttttttttttttttttttttgaattaaaatgttaaatttaaactcaaaaaaaaaaagacctttac

SEQ ID NO: 39406 - protein, 192 aa, Zea mays subsp. mays
HANKKMAHLFRELSLGHSKRETTPPPPSMASTIPSDLPPSPLGQLAVQFSESDLRLISYEIFVAACRSATGKPLSSAVSSLSVANPDSPSNGASPASPAAQRSLTAAAASKMKKALGMKSLSSLSPGSTKSPGSGSGSGSGSGGKSKRPTTVGELMRIQMRVSESVDSRVRRAFLRIAASQVSSVFFFFFFF

SEQ ID NO: 39407 - protein, 187 aa, Zea mays subsp. mays
MAHLFRELSLGHSKRETTPPPPSMASTIPSDLPPSPLGQLAVQFSESDLRLISYEIFVAACRSATGKPLSSAVSSLSVANPDSPSNGASPASPAAQRSLTAAAASKMKKALGMKSLSSLSPGSTKSPGSGSGSGSGSGGKSKRPTTVGELMRIQMRVSESVDSRVRRAFLRIAASQVSSVFFFFFFF

SEQ ID NO: 39408 - protein, 164 aa, Zea mays subsp. mays
MASTIPSDLPPSPLGQLAVQFSESDLRLISYEIFVAACRSATGKPLSSAVSSLSVANPDSPSNGASPASPAAQRSLTAAAASKMKKALGMKSLSSLSPGSTKSPGSGSGSGSGSGGKSKRPTTVGELMRIQMRVSESVDSRVRRAFLRIAASQVSSVFFFFFFF

SEQ ID NO: 39409 - DNA, 700 bp, Zea mays subsp. mays
aagacttcactagaatctactcgtcgagtcaccaaagataaggctctatcggactcggagtctcggacagcacagcaaagcaagagccgctactcaagtatagtctctgacaccggccgaccctgccctccaacccaagccatggcggacaacaacaaccggcggaaccacgggcagaccttgctcgccggcgcgggcctgggcctgctcgccgtgaactcgggcctcgccatctaccgcgcgaggggcgacacggccgccgtcctcttcgtcgcggggtcctgcgccaccctgctcctcctcttcgcctgcctccgcgcctacgagcgggcggcgcccgggtcgccggcccgggaccgggcgcggcgcgccgtgtggccgctcgccacgctgctcacgctctcgttcgcctggaaggtggcggcggccatgccttccgccgccgcggccgccctcgtatggggcctggccgtggccaccaccgccggcggcttcgtggcactgtacgtgcagcaggcatgaacacgtgggcgcgggacggactaggcaagcagctgcagacttgcagttcgttcagggatctagatctgggcgccgcgcgcttgtgtagaaatgtacagtgtatttggctagcttttcgattttgtgcatatgtatgtagctgactggctgatactataaaacagagtggcctctgtgt

SEQ ID NO: 39410 - protein, 173 aa, Zea mays subsp. mays
KTSLESTRRVTKDKALSDSESRTAQQSKSRYSSIVSDTGRPCPPTQAMADNNNRRNHGQTLLAGAGLGLLAVNSGLAIYRARGDTAAVLFVAGSCATLLLLFACLRAYERAAPGSPARDRARRAVWPLATLLTLSFAWKVAAAMPSAAAAALVWGLAVATTAGGFVALYVQQA

SEQ ID NO: 39411 - protein, 126 aa, Zea mays subsp. mays; identical to SEQ ID NO: 34257

SEQ ID NO: 39412 - DNA, 990 bp, Zea mays subsp. mays
tcatatagctgaagcgaagtcacagaaatactcgtatgaagttcttttcagaagcttgcagaaacttcttattgatactgccacttcagaatacctgtttactgatgatttctttggcgaagaatccatattccatgatatatttgcaggaccgattcaagttgttgatgaacatttcaatactgtactcctgaactgttatgatgcaattggcataatgcttatgatcagaataattcatcagcaccagctcatcatgtttaagcggcgaatcccatgtttggactcttacctagacaaagttaatatgtcactctggcctcgcttcaagatggtgttcgacttgcatttgaacagcttgcgaaatgcaaatattaaaacactttgggaggatgatgtccatccacactatgttacaaggagatatgctgaatttacagcttctctagttcatctcaatgttgagcatggggacggtcagcttgatctaaatttggagcgattgtggatggccattgaggatttgcttgttaagttggccaagatgttttccaaaccgaagctacaaactgtctttctgataaacaactatgatttaacaatttccattttgaaggaagctggaactgagggtgggaaagcacaacaacacttcgaggaggttcttaagagcaacatcgcaatatatgtggaagagttgctcctggagcagttcagtagtttgatcagattcgtcaaatctcgtccagcggatgagacggctgcaaattccgagaaagccagcattttcaaccccacagcccacccccattctccatttgttgattacatacctactcgatttattcatttaatctatctcgtccgtacatcattgttgcaaaatttctgtagaacccccaaaaaacatctcctgattcatgtgaagaatgactgtaaatttttacttccatgtttaccagacaactgaggaaaaaaggtatagattgc

SEQ ID NO: 39413 - protein, 322 aa, Zea mays subsp. mays
HIAEAKSQKYSYEVLFRSLQKLLIDTATSEYLFTDDFFGEESIFHDIFAGPIQVVDEHFNTVLLNCYDAIGIMLMIRIIHQHQLIMFKRRIPCLDSYLDKVNMSLWPRFKMVFDLHLNSLRNANIKTLWEDDVHPHYVTRRYAEFTASLVHLNVEHGDGQLDLNLERLWMAIEDLLVKLAKMFSKPKLQTVFLINNYDLTISILKEAGTEGGKAQQHFEEVLKSNIAIYVEELLLEQFSSLIRFVKSRPADETAANSEKASIFNPTAHPHSPFVDYIPTRFIHLIYLVRTSLLQNFCRTPKKHLLIHVKNDCKFLLPCLPDN

SEQ ID NO: 39414 - protein, 250 aa, Zea mays subsp. mays
MLMIRIIHQHQLIMFKRRIPCLDSYLDKVNMSLWPRFKMVFDLHLNSLRNANIKTLWEDDVHPHYVTRRYAEFTASLVHLNVEHGDGQLDLNLERLWMAIEDLLVKLAKMFSKPKLQTVFLINNYDLTISILKEAGTEGGKAQQHFEEVLKSNIAIYVEELLLEQFSSLIRFVKSRPADETAANSEKASIFNPTAHPHSPFVDYIPTRFIHLIYLVRTSLLQNFCRTPKKHLLIHVKNDCKFLLPCLPDN

SEQ ID NO: 39415 - protein, 248 aa, Zea mays subsp. mays
MIRIIHQHQLIMFKRRIPCLDSYLDKVNMSLWPRFKMVFDLHLNSLRNANIKTLWEDDVHPHYVTRRYAEFTASLVHLNVEHGDGQLDLNLERLWMAIEDLLVKLAKMFSKPKLQTVFLINNYDLTISILKEAGTEGGKAQQHFEEVLKSNIAIYVEELLLEQFSSLIRFVKSRPADETAANSEKASIFNPTAHPHSPFVDYIPTRFIHLIYLVRTSLLQNFCRTPKKHLLIHVKNDCKFLLPCLPDN

SEQ ID NO: 39416 - DNA, 1037 bp, Zea mays subsp. mays
gtggtttgaactcattggtttcgacaacagcagctcagcggcgctgaatagctttttcgctattgggtgcgccagtggatcatttctgggtggtgtgatagcagatgtcttatctagatactatccagattctgctcgcgtcatgtgcgctcagttcagcgccttcatgggcatccctttttcatggatcctcctcacagtcattccccagtctgttgattactggtctgcctatgccgtcacactctttttaatgggaattaccataagctggtgcgctacttgtgcaaacaaccccatgttcgcagaggtagtccctcccaagcaccgcacaatgatctacgcctttgaccgcgcatttgagggttcatttggctcgcttgctgcacctgctgttggattagtgaccgaaaagatctatggctacaatgcaaaggccgtcgatctatcacatggatcagtggatggagcttatgcactctctagaggtctattgactatgatgattgtcccttttgctctgtgcctcatgttttacaccccactgtatacagtgttcaagcgtgaccgtgaaaatgctagattggccagcatcaaggagcaggaacttacttgaaaagctttctaacaaggagtactgatgtagtttggattattatagtctacaacaccgccaacctggaggttttgattgaagtactttggttgatgtctaggatactcaggttttatgtttcttcagtcggatatcatttaagagtacacattttgtacacaagcgatagattgtttgatctcgtcgtatgtaactggttcagtatacattcggaccttaacctggagagtggagacagggtgttgcagctttccattgaactttcagcatatagatacagttctttctcgttttgttactatttacggtctgtaatcttgttttgaactgcctgaaccatcacgccattccaatgctgatgtcatttgcagaactcttgtaccagtttcagtttatatcattataagatcaacgcttttct

SEQ ID NO: 39417 - protein, 204 aa, Zea mays subsp. mays
WFELIGFDNSSSAALNSFFAIGCASGSFLGGVIADVLSRYYPDSARVMCAQFSAFMGIPFSWILLTVIPQSVDYWSAYAVTLFLMGITISWCATCANNPMFAEVVPPKHRTMIYAFDRAFEGSFGSLAAPAVGLVTEKIYGYNAKAVDLSHGSVDGAYALSRGLLTMMIVPFALCLMFYTPLYTVFKRDRENARLASIKEQELT

SEQ ID NO: 39418 - protein, 157 aa, Zea mays subsp. mays
MCAQFSAFMGIPFSWILLTVIPQSVDYWSAYAVTLFLMGITISWCATCANNPMFAEVVPPKHRTMIYAFDRAFEGSFGSLAAPAVGLVTEKIYGYNAKAVDLSHGSVDGAYALSRGLLTMMIVPFALCLMFYTPLYTVFKRDRENARLASIKEQELT

SEQ ID NO: 39419 - protein, 149 aa, Zea mays subsp. mays
MGIPFSWILLTVIPQSVDYWSAYAVTLFLMGITISWCATCANNPMFAEVVPPKHRTMIYAFDRAFEGSFGSLAAPAVGLVTEKIYGYNAKAVDLSHGSVDGAYALSRGLLTMMIVPFALCLMFYTPLYTVFKRDRENARLASIKEQELT

SEQ ID NO: 39420 - DNA, 1037 bp, Zea mays subsp. mays
acagagagaggaaacgcaaccacatcaagaactccgccatcaccagacgacatcagctcccccaccatccatcgttctccagggattacgctttcattcgaagccagtacgaagttcatccgtaaaaaaggttccgacagctcaatatcgaccatcaacaaagataaggatgcctaataaaccactttcagcattgactctacaagatcgaaatgcagaggttcaaatacaggtccacaggaaatgggagtttcgaggtgccgttgacaatggccctatattacacatcgacatgatcctgacagactgcacaggcaatgctatccattgtcagattccttcgttcctagcagctacaagaggcgatgaatttcaagttggcaaaatatacaagatgacccgcttttcagtagcccgtgcaaaatccacctacaagcctgttgatggtgatctcatgttgtatgtcaaaccatacacaacccttgaactttgtcacacttcaccatcaggttttcccctttatgtttatcatctaacaagctatgacaagattgatccagatggatcaaatgcaagaaacttccatgacgtccttggtattattacggaaatctctgcgattaagcctgtcggaaatgcacacataccctcatcttacaatcgacatgttctgataaaaaacctcagcgacgacattctgaaaattactctatggggaaaacgtgcacaagaattttcgttgaccaacacttatgacccacagaaacaaactcctatcgtggtcttatttgttggttgtttaccaaaagaatatcaaggggaagtactgttaagtggtggcgcagcctgtcattggtacttcaacccatcaattgaagaagctgaagctttttatagcaggattgaatctgaaaagataaacatagaattgcccagtcttgacaaacaagaaattacacctccaagttttccacaacgagaacatcacaaccttaaatacatactgtctttaaacccacatgatgtaccggatcaag

SEQ ID NO: 39421 - protein, 345 aa, Zea mays subsp. mays
QREETQPHQELRHHQTTSAPPPSIVLQGLRFHSKPVRSSSVKKVPTAQYRPSTKIRMPNKPLSALTLQDRNAEVQIQVHRKWEFRGAVDNGPILHIDMILTDCTGNAIHCQIPSFLAATRGDEFQVGKIYKMTRFSVARAKSTYKPVDGDLMLYVKPYTTLELCHTSPSGFPLYVYHLTSYDKIDPDGSNARNFHDVLGIITEISAIKPVGNAHIPSSYNRHVLIKNLSDDILKITLWGKRAQEFSLTNTYDPQKQTPIVVLFVGCLPKEYQGEVLLSGGAACHWYFNPSIEEAEAFYSRIESEKINIELPSLDKQEITPPSFPQREHHNLKYILSLNPHDVPDQ

SEQ ID NO: 39422 - protein, 289 aa, Zea mays subsp. mays
MPNKPLSALTLQDRNAEVQIQVHRKWEFRGAVDNGPILHIDMILTDCTGNAIHCQIPSFLAATRGDEFQVGKIYKMTRFSVARAKSTYKPVDGDLMLYVKPYTTLELCHTSPSGFPLYVYHLTSYDKIDPDGSNARNFHDVLGIITEISAIKPVGNAHIPSSYNRHVLIKNLSDDILKITLWGKRAQEFSLTNTYDPQKQTPIVVLFVGCLPKEYQGEVLLSGGAACHWYFNPSIEEAEAFYSRIESEKINIELPSLDKQEITPPSFPQREHHNLKYILSLNPHDVPDQ

SEQ ID NO: 39423 - protein, 248 aa, Zea mays subsp. mays
MILTDCTGNAIHCQIPSFLAATRGDEFQVGKIYKMTRFSVARAKSTYKPVDGDLMLYVKPYTTLELCHTSPSGFPLYVYHLTSYDKIDPDGSNARNFHDVLGIITEISAIKPVGNAHIPSSYNRHVLIKNLSDDILKITLWGKRAQEFSLTNTYDPQKQTPIVVLFVGCLPKEYQGEVLLSGGAACHWYFNPSIEEAEAFYSRIESEKINIELPSLDKQEITPPSFPQREHHNLKYILSLNPHDVPDQ

SEQ ID NO: 39424 - DNA, 914 bp, Zea mays subsp. mays
ctctcgcgccccgcggtgagctacccccgctcgccttagaccatggccctcccgccgtcctcctcgccgtcgtcgctctccgccgcgtcagcgcagcccacgcccctgcacctgcacctcccgaccaaggcgcccggccgcctcccgctgctccccttctcgcgcgccgccctcccgccgccgctgcgcctccgcattgcgcgcaccagcctccccccgggcacgcccctcccgcgcgcgctcctgggcacaccttccgcctccgacgtcggcggcggcggcgccggcttcggcggccatgacgacgacggccacaaccaccacggcggcgagggtggcggcgacgacggcggccatggcgacgacgccggccacggtgatgacgcgcccggcggcggcgacgcccgcggggaggcgctgttcgtgctggcgcagctgggccgcaagctcgacagcctgccgtccgatctcgccgccgccgtcgacagcggccgcatcggggccgacatcgtgcgccgcttcaccgaactcgaggccaacggcttcttccgatggctcctccagttccagggcttcagggagaggctcctcgccgacgagctcttcctcaccaagctcggcatagagtgcggcatcggtctcgtcgccaagaccgtggctgagttccagaagaggggggacaatttcttcaaagagattgaagttgtcatatctgatgtggtcatggcgattgttgcggacgtcatgcttgtctatcttcctgctccaactattggtttacagccgccactggcaagaaacgctggagctattgccaactttttctataactgccctgataatactttccaaattgctatggctggaaggtcattctcacttctgcagaggattggagcttttgtgaggaatgg

SEQ ID NO: 39425 - protein, 290 aa, Zea mays subsp. mays
MALPPSSSPSSLSAASAQPTPLHLHLPTKAPGRLPLLPFSRAALPPPLRLRIARTSLPPGTPLPRALLGTPSASDVGGGGAGFGGHDDDGHNHHGGEGGGDDGGHGDDAGHGDDAPGGGDARGEALFVLAQLGRKLDSLPSDLAAAVDSGRIGADIVRRFTELEANGFFRWLLQFQGFRERLLADELFLTKLGIECGIGLVAKTVAEFQKRGDNFFKEIEVVISDVVMAIVADVMLVYLPAPTIGLQPPLARNAGAIANFFYNCPDNTFQIAMAGRSFSLLQRIGAFVRN

SEQ ID NO: 39426 - DNA, 1059 bp, Zea mays subsp. mays
aaaggcctaaaccgaactcgcagtcgcaacaggtcagccctcaccgcccccccggtcgtcccaggcatggccccagcgagagcgctgcccgcccctctggttgtccatggccgccgccgccagctacgtcgtcggagaaagtactgcaagttgtgctatctgaagggcagttccatggtccccactatccaagcccagggcgacgtcgggctgctggaccgccgctgcctcgccggctacgacttctcccgcggcgacgtcgttgttttcaggttgtcgacggatcatgggatgaagatggtccagaggatgatcgcgctgccaggggattggatccagatcccggagaagcgggacatccggcaggtccccagcggccactgttgggtggaaggggacaatgccggcaacagctgggactcgagacactatggccccgttcctctggacctgatggaagggaagatcacacacataatctggccaccccatagagtgcgtcgggtggacaggatggtgccggaaggcaggattatgcctctgtcagcgactccaaggaggaagcaacaatagtctcaatcgacggcgtcgaaggcgtcaacaattggaagaacttgatgggaagacaactcgagcgcgagaacaacatctaatggcgtgtttagtttgcaggttggactgcttccagagtcatccgaacctacgtccgagcctatattatcatttggtttgaatcgcggaacgatgtcgtccgtcactacgttgttctaataatatactaacacgtgggatcagctcactccgcaagaaagtgcaagaccacttcgtccggagccaggccacgatggatgagccaaaccatcaaaccaaacacgctgtaaatgtcaagtacagcgggccacaatgagctgggtaaccacgagtgggctgtgcgttgagaaagacgtgttgtgcaggcgctgaccggtcgtctatagtacttaagcaacaatcagaactttgtatcggcatcgaagaattaatgaatagaacaaaaacgctagttctcagcctttcttc

SEQ ID NO: 39427 - protein, 190 aa, Zea mays subsp. mays
KGLNRTRSRNRSALTAPPVVPGMAPARALPAPLVVHGRRRQLRRRRKYCKLCYLKGSSMVPTIQAQGDVGLLDRRCLAGYDFSRGDVVVFRLSTDHGMKMVQRMIALPGDWIQIPEKRDIRQVPSGHCWVEGDNAGNSWDSRHYGPVPLDLMEGKITHIIWPPHRVRRVDRMVPEGRIMPLSATPRRKQQ

SEQ ID NO: 39428 - protein, 168 aa, Zea mays subsp. mays
MAPARALPAPLVVHGRRRQLRRRRKYCKLCYLKGSSMVPTIQAQGDVGLLDRRCLAGYDFSRGDVVVFRLSTDHGMKMVQRMIALPGDWIQIPEKRDIRQVPSGHCWVEGDNAGNSWDSRHYGPVPLDLMEGKITHIIWPPHRVRRVDRMVPEGRIMPLSATPRRKQQ

SEQ ID NO: 39429 - protein, 163 aa, Zea mays subsp. mays
RPKPNSQSQQVSPHRPPGRPRHGPSESAARPSGCPWPPPPATSSEKVLQVVLSEGQFHGPHYPSPGRRRAAGPPLPRRLRLLPRRRRCFQVVDGSWDEDGPEDDRAARGLDPDPGEAGHPAGPQRPLLGGRGQCRQQLGLETLWPRSSGPDGREDHTHNLATP

SEQ ID NO: 39430 - DNA, 626 bp, Zea mays subsp. mays
agtacaaactcccgtcgtggcatctcaccgtttccaggatacgaccatgaggtcggccatcctgcttacgatctgcaccttgtccgcgctgctgctggtagcgcgcggctcggagaagccatcggccgcgccgccgccggtggtggccgtgggcgtggcggcggccagcgacctcatccgctccggcggtcaccgctacctggacgtcagaacagaggaggaattcaggagtgggcatgtggaggattcactcaacgtgccctatcttttcttcacttcacaaggaagggagaagaaccccaagttcatcgcacaggtcgcagcgggtttcgacaaagaggacaacatagttgtgggctgcaaaagcggagtgaggtctgaattagcatgtgctgatctcatggcagctggatttagaaatgtgaagaacatcgaaggtggttataccgcatgggtggaaagtggccttgccgtgaagaaatctcaagcacaagatgaactatgatgtgccctatcatgttggttcttccttgctttgacgacaaccttcgtatagaaaataataggtttaaatgagcaaaaatatacttccttggttatttaaatatatgacacagttgattttc

SEQ ID NO: 39431 - protein, 167 aa, Zea mays subsp. mays
VQTPVVASHRFQDTTMRSAILLTICTLSALLLVARGSEKPSAAPPPVVAVGVAAASDLIRSGGHRYLDVRTEEEFRSGHVEDSLNVPYLFFTSQGREKNPKFIAQVAAGFDKEDNIVVGCKSGVRSELACADLMAAGFRNVKNIEGGYTAWVESGLAVKKSQAQDEL

SEQ ID NO: 39432 - protein, 152 aa, Zea mays subsp. mays
MRSAILLTICTLSALLLVARGSEKPSAAPPPVVAVGVAAASDLIRSGGHRYLDVRTEEEFRSGHVEDSLNVPYLFFTSQGREKNPKFIAQVAAGFDKEDNIVVGCKSGVRSELACADLMAAGFRNVKNIEGGYTAWVESGLAVKKSQAQDEL

SEQ ID NO: 39433 - protein, 126 aa, Zea mays subsp. mays
STNSRRGISPFPGYDHEVGHPAYDLHLVRAAAGSARLGEAIGRAAAGGGRGRGGGQRPHPLRRSPLPGRQNRGGIQEWACGGFTQRALSFLHFTRKGEEPQVHRTGRSGFRQRGQHSCGLQKRSEV

SEQ ID NO: 39434 - DNA, 1084 bp, Zea mays subsp. mays
cgaggtggaacccttactgtacgacgagtctcctccaggctcaagggaactcgccgaccatctcagcagctgcgctccaccgtatcctactagctccgcggcgaggagcggtctcgccgccacagcggagaactcctgcgggaggaaacccctcccggactcactgctacggacctcgaacctcgggggctcctcgctccgcaggcagttccgtcaggaagaggagtgcagcagcctggcgcaaaagctgcagaaaccgattgacgacgacaggtacaaggacgccgccgacgagtgctccgagcatcaaccgccctcggccacgaaccctaaaccgcggaacgacgcgcgccggtcgtccccggaggtcgtcgtcgacgctaaagcgagaaggctgctgggcaggagctcgtcggacatgaacaaccaccaggacgcaagggtggccgccctggtcaggaggaacgtggcgctggaagagcagctgtcggcggcgctggcgagcaaggacgaggcggagaagaacctgtccctggtcatcgacagcaaagacggcctggagaagaggctggccgagaaggacagggaggtcgaggcgctgagggagaaggcgacggggttggagctggcgcaggaggaggccaacagcctctccaacaccgtccacgccgacaacgtgcggctggagcgcgaggtggcgttcctcaaggccgtcatggacgagacccagaaggaactgcactcgactcgcggagttcttgcaggagaacgcgcacgggcattccagcttcaggttgaagtctttcatctgaagcagcgcctgcagacgatggaagggaggtcacccgcagcaccaagaaagcctcagaatacgtagggtagggtgcaggcgtgtagagtttttgagcgatagatctgctgtagattcattcagtgttgtactgtaactgtagtaggtgccggagctactgtcatttgtaatattattcgacgcgatgcgatgcaaacgtatttcgcaactgggacgtacgtaattgtgtagaatgagttgcggtcgactatatatgcaagatgtcttttatct

SEQ ID NO: 39435 - protein, 291 aa, Zea mays subsp. mays
EVEPLLYDESPPGSRELADHLSSCAPPYPTSSAARSGLAATAENSCGRKPLPDSLLRTSNLGGSSLRRQFRQEEECSSLAQKLQKPIDDDRYKDAADECSEHQPPSATNPKPRNDARRSSPEVVVDAKARRLLGRSSSDMNNHQDARVAALVRRNVALEEQLSAALASKDEAEKNLSLVIDSKDGLEKRLAEKDREVEALREKATGLELAQEEANSLSNTVHADNVRLEREVAFLKAVMDETQKELHSTRGVLAGERARAFQLQVEVFHLKQRLQTMEGRSPAAPRKPQNT

SEQ ID NO: 39436 - protein, 152 aa, Zea mays subsp. mays
MNNHQDARVAALVRRNVALEEQLSAALASKDEAEKNLSLVIDSKDGLEKRLAEKDREVEALREKATGLELAQEEANSLSNTVHADNVRLEREVAFLKAVMDETQKELHSTRGVLAGERARAFQLQVEVFHLKQRLQTMEGRSPAAPRKPQNT

SEQ ID NO: 39437 - DNA, 1074 bp, Zea mays subsp. mays
aacagcactagctagctagctagaatcgaaacagaatggatgcctctactaccttcctcttcctcgcgcttgcatgcatggcggccactaatactctccctcactgtgccaacgcaaggcatttcctccctcctagtcgtagccatggcagcagcactggcacgaggagctctagcgccgtcgacgccgccgccgccgccgccagcagcagcaagctctcgtggccactgctaccgtggaagaagcctggccgtggcggcagcagccgtggctccgggagcgggcacggtttcggctggaccgtctcgcacaacgggtcggacaccgacgtcgggttcggcggcggcgccggcgccggcacgagcagctccggaggtggctcgagcgcgggcgggggagctggtctcggcgtcggcatccacgtcggcaacgacggagtggacgtcgcgatcggcgtcgccggaggcggcgccgtcgtcgtcagtaccagcaacggcggcggcgtgggtgtcggcgctggcggtggaggaggagtcgggatccacctgggccccgacgtcgtggccgtcacccgtggcggtggcggtggcgccggcggcgatgattcgtcgtctggcagcggaaccggggtgggacgcgccggaagcgctgtgggcagcgcccatgggtatgggaatgcaagcggtggaacaggggccggtggcgggagtggagctggctctggcggccaaggtggatacggcggcggcggtggcggtggcaccggaagtagcggtggccatccatgacgaccatgagcttgcattggtgaccgactgatgactgctgcatgatggttggatccggtgcctttggtttggggataaaaatgctgctttcgttggatccagcgcctttggggattgtattcaaaactatatactttttatagctgtctagtattgttgtggttactttgttttacgttgctgattgatgaggttcgttgattagtacgtactgttatccagcgcagtaatataacgcggttttcactcttcttggatgcactaaaacaatgtcagttggtggagt

SEQ ID NO: 39438 - protein, 259 aa, Zea mays subsp. mays
MPLLPSSSSRLHAWRPLILSLTVPTQGISSLLVVAMAAALARGALAPSTPPPPPPAAASSRGHCYRGRSLAVAAAAVAPGAGTVSAGPSRTTGRTPTSGSAAAPAPARAAPEVARARAGELVSASASTSATTEWTSRSASPEAAPSSSVPATAAAWVSALAVEEESGSTWAPTSWPSPVAVAVAPAAMIRRLAAEPGWDAPEALWAAPMGMGMQAVEQGPVAGVELALAAKVDTAAAVAVAPEVAVAIHDDHELALVTD

SEQ ID NO: 39439 - protein, 250 aa, Zea mays subsp. mays
MDASTTFLFLALACMAATNTLPHCANARHFLPPSRSHGSSTGTRSSSAVDAAAAAASSSKLSWPLLPWKKPGRGGSSRGSGSGHGFGWTVSHNGSDTDVGFGGGAGAGTSSSGGGSSAGGGAGLGVGIHVGNDGVDVAIGVAGGGAVVVSTSNGGGVGVGAGGGGGVGIHLGPDVVAVTRGGGGGAGGDDSSSGSGTGVGRAGSAVGSAHGYGNASGGTGAGGGSGAGSGGQGGYGGGGGGGTGSSGGHP

SEQ ID NO: 39440 - protein, 236 aa, Zea mays subsp. mays
MAATNTLPHCANARHFLPPSRSHGSSTGTRSSSAVDAAAAAASSSKLSWPLLPWKKPGRGGSSRGSGSGHGFGWTVSHNGSDTDVGFGGGAGAGTSSSGGGSSAGGGAGLGVGIHVGNDGVDVAIGVAGGGAVVVSTSNGGGVGVGAGGGGGVGIHLGPDVVAVTRGGGGGAGGDDSSSGSGTGVGRAGSAVGSAHGYGNASGGTGAGGGSGAGSGGQGGYGGGGGGGTGSSGGHP

SEQ ID NO: 39441 - DNA, 958 bp, Zea mays subsp. mays
aagtacgcctctatccgaagccaaaccacacgcacacgccgcgccagcctcacgctctcacccatgttttgtgcgcgcacgcgtcctgcttcttctcgccaacgacaagccgcacgcagcgtctcgccagctagctgatcatgagcaacggcgacacgctcgacaagctggtggtgttcctggcgaagcgcgacggcatcgacaagctggtcaagacgttccagtacgtgtccaagctggcgcactggggcgccgagtcttcgctcccggagctcgcgcagcgcgccaagagctgggagacggcgtccgggctgagccgcaaggcgttccggtcgggccgcttcctggccgggttcaacgcgctgcgccgcggcccggtcccggtcccgggggagctcggcgcgctggccgtgctggccaacgccggcgagatggtctacttcttcttcgaccacttcacgtggctgtcccgcgcgggcgtgctcgagccctggctggcgcgccgggccagcttcgtgtcggccttcggcgaggccgtcggctacgtgtttttcatcgccatggacttcatcatgatcaggcggggcctgcggcaggagagggagctgctgagggaaggcgccaaggacgccgcggagaaggaggtgcggaggatccgggtggacagggtgatgcggctcatggcgacggcggccaacgccgccgacctgatcatcgccgtcgcggaaaccgatcccaacccgttctgcaaccacgccgtcacgctggggattagcggcctcgtgtcagcgtgggctggctggtacagaaactggccctcgtgaactgggccgcttcggcctacatgtgcatatttttcattcacttatttaactgcggctgcgatgcatgatgatattgccagatttgaaccttttctatctccagcaataacctttaaggcctaatttgaaaactt

SEQ ID NO: 39442 - protein, 257 aa, Zea mays subsp. mays
STPLSEAKPHAHAAPASRSHPCFVRARVLLLLANDKPHAASRQLADHEQRRHARQAGGVPGEARRHRQAGQDVPVRVQAGALGRRVFAPGARAARQELGDGVRAEPQGVPVGPLPGRVQRAAPRPGPGPGGARRAGRAGQRRRDGLLLLRPLHVAVPRGRARALAGAPGQLRVGLRRGRRLRVFHRHGLHHDQAGPAAGEGAAEGRRQGRRGEGGAEDPGGQGDAAHGDGGQRRRPDHRRRGNRSQPVLQPRRHAGD

SEQ ID NO: 39443 - protein, 227 aa, Zea mays subsp. mays
MSNGDTLDKLVVFLAKRDGIDKLVKTFQYVSKLAHWGAESSLPELAQRAKSWETASGLSRKAFRSGRFLAGFNALRRGPVPVPGELGALAVLANAGEMVYFFFDHFTWLSRAGVLEPWLARRASFVSAFGEAVGYVFFIAMDFIMIRRGLRQERELLREGAKDAAEKEVRRIRVDRVMRLMATAANAADLIIAVAETDPNPFCNHAVTLGISGLVSAWAGWYRNWPS

SEQ ID NO: 39444 - protein, 130 aa, Zea mays subsp. mays
MVYFFFDHFTWLSRAGVLEPWLARRASFVSAFGEAVGYVFFIAMDFIMIRRGLRQERELLREGAKDAAEKEVRRIRVDRVMRLMATAANAADLIIAVAETDPNPFCNHAVTLGISGLVSAWAGWYRNWPS

SEQ ID NO: 39445 - DNA, 650 bp, Zea mays subsp. mays
acggaactcatcccgctgtgcgcttcgtttcgtggcggcgaacggccggtcgagcgccgccgcccttggctgggtcttcactcagtccttcgccggcgacgagcgtccacctggtgtctactgaactgagcagacagtagcaagagccactatgctgttcttctcctacttcaaggagctcgtggggaaggaggtgacggtggaactcaagaatgacctggcgatccgcgggacgctccactcggtagaccagtacctcaacatcaagctggaaaacacccgcgttgtcgaccaggacaagtatccccacatgctgtcagtgcggaactgcttcatccggggctcggtggtgcggtacgtgctgctcccgcaggacggcgtggacgtggacatcctgcacgacgccaccaggagggaggcgcgcggaggctgatcggcatcggcatcggcccccctcacctgtgctgcttctcccccggggaggagattgatctgccttgccctgatctcgtctggttgtacgaaacatatgctgatctgagtggccccaactcccccagcacacacttgatccaccacccacccagctccctgcctggtacttgcatgttccttgctgtgtgtgtgtgtgttcagcacacacttgatcc

SEQ ID NO: 39446 - protein, 93 aa, Zea mays subsp. mays
MLFFSYFKELVGKEVTVELKNDLAIRGTLHSVDQYLNIKLENTRVVDQDKYPHMLSVRNCFIRGSVVRYVLLPQDGVDVDILHDATRREARGG

SEQ ID NO: 39447 - DNA, 897 bp, Zea mays subsp. mays
acgcagtttctcgcgccatctgaagtcagctggggcgacgaagaaatgtcctctagcgatcaaaacccagctgccacacccgcgtcgtcgggccccgccgagccctcgccgccgggcaggccaacggcggtgtcctcgcgtgtcctcgacatgggcgcgcagctggcgcaggcgctgaagccggtgcggcagatgaagcagcacgcgtgcagcttcgcgctgtacgcccacgacttgcaccgccaggtggaggtccaccacttcgtcgcccggctcaaccaggacgtcctccagtgcgccgtctacgactccgacaagccctcggcccgcctcatcggcgtggagtacatcgtctccgacaccatcttcgagggcctggccccggacgagcagaggctgtggcactcgcacgcgtacgaggtgaaggccgggctgtggaccgacgtcggcgtgccggaggcgctgcagagctcggagatggcgagcctcgcaaggacgtacggcaagttctggtgcacctggcaggcggaccgcggcgacgcgctgcccctcggcgcgccggcgctcatggtgtcgccgcaggccgccgagcccggccgcgtgcgcggcgagctggtgcgcggccgtgacgagaggtacgggatcgacagctcggcaggggggctcaaggcggcgagggtggagatggacgagccggagtggatcaacccgaacgccgactactggcggctgcacggcaaggggttcgcggtagacgtcgtcccggccgagatgaagcgacacgcgcccttcccgtgagctgccggtcttcttgttgtgacacgtccgtaaggagcataaagatcgttcttgtatccagaggcgtattttgaagaagaagaaaaagagcttgtgttg

SEQ ID NO: 39448 - protein, 265 aa, Zea mays subsp. mays
TQFLAPSEVSWGDEEMSSSDQNPAATPASSGPAEPSPPGRPTAVSSRVLDMGAQLAQALKPVRQMKQHACSFALYAHDLHRQVEVHHFVARLNQDVLQCAVYDSDKPSARLIGVEYIVSDTIFEGLAPDEQRLWHSHAYEVKAGLWTDVGVPEALQSSEMASLARTYGKFWCTWQADRGDALPLGAPALMVSPQAAEPGRVRGELVRGRDERYGIDSSAGGLKAARVEMDEPEWINPNADYWRLHGKGFAVDVVPAEMKRHAPFP

SEQ ID NO: 39449 - protein, 250 aa, Zea mays subsp. mays
MSSSDQNPAATPASSGPAEPSPPGRPTAVSSRVLDMGAQLAQALKPVRQMKQHACSFALYAHDLHRQVEVHHFVARLNQDVLQCAVYDSDKPSARLIGVEYIVSDTIFEGLAPDEQRLWHSHAYEVKAGLWTDVGVPEALQSSEMASLARTYGKFWCTWQADRGDALPLGAPALMVSPQAAEPGRVRGELVRGRDERYGIDSSAGGLKAARVEMDEPEWINPNADYWRLHGKGFAVDVVPAEMKRHAPFP

SEQ ID NO: 39450 - protein, 215 aa, Zea mays subsp. mays
MGAQLAQALKPVRQMKQHACSFALYAHDLHRQVEVHHFVARLNQDVLQCAVYDSDKPSARLIGVEYIVSDTIFEGLAPDEQRLWHSHAYEVKAGLWTDVGVPEALQSSEMASLARTYGKFWCTWQADRGDALPLGAPALMVSPQAAEPGRVRGELVRGRDERYGIDSSAGGLKAARVEMDEPEWINPNADYWRLHGKGFAVDVVPAEMKRHAPFP

SEQ ID NO: 39451 - DNA, 629 bp, Zea mays subsp. mays
aaccatattattgagatcaacaagcaacatagaaagtagaatacagtagcaacaaaagagcaacaatggcggccaagatattttccctccttatgctccttgctctttctgcatgtgttgctaacacgaccattttccctcaatgttcacaagctcctatagctgcccttattcccccatactctccatcaatgatagcttcagtatgtgaaaacccagctcttgaacctataggctccaacaagcaatcgcggcaaacaacttaccattatcacccttgttctttcaacaatcgacatccctatctttggtgcagtcattggtacaaaccatcaagcaacaaatactactaccatttggccagctagctgcagcaagccctgcttccttcttgacaccgcaacagttgctgcctttctacctgcagtttgtggctaaccccgcaaccctcttacaactgcaacaattgctgcactttgtccaacttgctttgacaaacccatcagcctcctaccaacaacacatcattggtggtgccctcttctagattgcttattagttataattcaataatgaagtttttttgttgatgtatgtgtcctcccagaaataagaagttacatttccat

SEQ ID NO: 39452 - protein, 100 aa, Zea mays subsp. mays
MAAKIFSLLMLLALSACVANTTIFPQCSQAPIAALIPPYSPSMIASVCENPALEPIGSNKQSRQTTYHYHPCSFNNRHPYLWCSHWYKPSSNKYYYHLAS

SEQ ID NO: 39453 - protein, 91 aa, Zea mays subsp. mays
MLLALSACVANTTIFPQCSQAPIAALIPPYSPSMIASVCENPALEPIGSNKQSRQTTYHYHPCSFNNRHPYLWCSHWYKPSSNKYYYHLAS

SEQ ID NO: 39454 - protein, 58 aa, Zea mays subsp. mays
MIASVCENPALEPIGSNKQSRQTTYHYHPCSFNNRHPYLWCSHWYKPSSNKYYYHLAS

SEQ ID NO: 39455 - DNA, 993 bp, Zea mays subsp. mays
attttcacctccacccacccgactcggcggcctgcgctcgtccgcccgttcctcgccggcgccgtctcttccgcagaccggtccgtgggtcgagggagccgcttcttcctccagcttatggcagacagaagtgatggaccgattgggaggctcccagaacatcttattatagaaatactcattcgtttaccggtctatgagtgggtgcaattagcatgtgtcaacaagcattgggcaagcatatttcaaggagaatgcgtgtggcaaactgctattgcaaggaactggccatctgctggtctccagaaacgctggcctgggccaattcctagaggttctgctaggaggagatttcaagcactgtatgtcagtgagaacttagtaccatctggtggggagattgatgagcttgttggtcacacttatctctacttaaaagaacagcttgagcgtcctgtcatgcctccttccagcatacttcatggcaccatcattgaccaattcattgcttgcggcaatacaggagaaaaggcccatgatcttgcttcaaaaatatggcttgcagtcattgacagcttggaagaaaaccagcaaactttcttactgttaaaacgtgtggcacaagaaggagaatttttccttccgtttccatactccagatcatatagggtactatggagggtgtttgacaagctgttcaccgacttccgcgactgtttcagcggggctgagtaccatgatgttctatcgactgctaagtctaggtttcagccggtgccttccacatggcttggccattagcgcactgcagttgctcttgttgtgcgcactctacagtgtcgtagataaagcagtgatacttacagcagtcatttcgagtacatgtagcatcttgacagcttcaagagcattaaaatgttgtttgagatggaatactcagtgttcttgcaagtccttgaaagtaattcgatacactctgtcatttgcacagtt

SEQ ID NO: 39456 - protein, 266 aa, Zea mays subsp. mays
IFTSTHPTRRPALVRPFLAGAVSSADRSVGRGSRFFLQLMADRSDGPIGRLPEHLIIEILIRLPVYEWVQLACVNKHWASIFQGECVWQTAIARNWPSAGLQKRWPGPIPRGSARRRFQALYVSENLVPSGGEIDELVGHTYLYLKEQLERPVMPPSSILHGTIIDQFIACGNTGEKAHDLASKIWLAVIDSLEENQQTFLLLKRVAQEGEFFLPFPYSRSYRVLWRVFDKLFTDFRDCFSGAEYHDVLSTAKSRFQPVPSTWLGH

SEQ ID NO: 39457 - protein, 227 aa, Zea mays subsp. mays
MADRSDGPIGRLPEHLIIEILIRLPVYEWVQLACVNKHWASIFQGECVWQTAIARNWPSAGLQKRWPGPIPRGSARRRFQALYVSENLVPSGGEIDELVGHTYLYLKEQLERPVMPPSSILHGTIIDQFIACGNTGEKAHDLASKIWLAVIDSLEENQQTFLLLKRVAQEGEFFLPFPYSRSYRVLWRVFDKLFTDFRDCFSGAEYHDVLSTAKSRFQPVPSTWLGH

SEQ ID NO: 39458 - DNA, 893 bp, Zea mays subsp. mays
aaccatcaggacgcggacgcggacgcggacgcggctcacatcaaacacccccttcagctgtgctcagtgctcactgccgcaaaaccacagccacacagggaagcgcccagcgccctttcacatcaccacatccacgctcctccgttccatggccatgtcgagcagcgccagcaagaagcaagcccaggcccaggcccaggcccagaaggccgggcggaggcccccggcggtgtcgtcggccgcggccgcggacgcggagatgcagagggtgttctcgcgcatcgacgcggacggcgacgggcggatctcgccgtcggagctggcggcggtgtcgcgcgccatctccccgccggcgagctcctcgcacgggcggcgcgaggtggcggccatgatggaggagctggacacggaccgcgacggcttcgtggacctgggcgagttcagggcgttccacgcgcgcggcggcggcgttggcggcgacgacgacgacgacgcggagctccgcgccgccttcgccgtgtacgacgccgacggcgacgggcgcatcacggcggccgagctgggcagcgtgctcgcccgcattggcgaggggtgcagcgccgaggagtgccgccggatgatcgccggcgtcgacgccgacggcgacggctgcgtcgggttcgaggagttcaagatgatgatgcgcagcccccagccccagccccaggccggcgccggagtgactgccgtgccggacaaggccaaggaggagtgacgggtgtaggtgtaggtgtactcaccagggcatcagtctgggggaagggatcgagttcctctgcctcttctgttgctttcacctcctctggagaggcatgaaaatactcaacttgctgcataagactacttattactgt

SEQ ID NO: 39459 - protein, 284 aa, Zea mays subsp. mays
NHQDADADADAAHIKHPLQLCSVLTAAKPQPHREAPSALSHHHIHAPPFHGHVEQRQQEASPGPGPGPEGRAEAPGGVVGRGRGRGDAEGVLAHRRGRRRADLAVGAGGGVARHLPAGELLARAARGGGHDGGAGHGPRRLRGPGRVQGVPRARRRRWRRRRRRRGAPRRLRRVRRRRRRAHHGGRAGQRARPHWRGVQRRGVPPDDRRRRRRRRRLRRVRGVQDDDAQPPAPAPGRRRSDCRAGQGQGGVTGVGVGVLTRASVWGKGSSSSASSVAFTSSGEA

SEQ ID NO: 39460 - protein, 250 aa, Zea mays subsp. mays
TIRTRTRTRTRLTSNTPFSCAQCSLPQNHSHTGKRPAPFHITTSTLLRSMAMSSSASKKQAQAQAQAQKAGRRPPAVSSAAAADAEMQRVFSRIDADGDGRISPSELAAVSRAISPPASSSHGRREVAAMMEELDTDRDGFVDLGEFRAFHARGGGVGGDDDDDAELRAAFAVYDADGDGRITAAELGSVLARIGEGCSAEECRRMIAGVDADGDGCVGFEEFKMMMRSPQPQPQAGAGVTAVPDKAKEE

SEQ ID NO: 39461 - protein, 201 aa, Zea mays subsp. mays
MAMSSSASKKQAQAQAQAQKAGRRPPAVSSAAAADAEMQRVFSRIDADGDGRISPSELAAVSRAISPPASSSHGRREVAAMMEELDTDRDGFVDLGEFRAFHARGGGVGGDDDDDAELRAAFAVYDADGDGRITAAELGSVLARIGEGCSAEECRRMIAGVDADGDGCVGFEEFKMMMRSPQPQPQAGAGVTAVPDKAKEE

SEQ ID NO: 39462 - DNA, 671 bp, Zea mays subsp. mays
atcgtctttgctcgaggagtcgaggttcaggttccacggtgcggcgagagctcgcagccatggagagcaagagcccatggtcgctgcggctgctagtttgctgcgcggcaatggtggccgtcgcgcttctctcccagcaaggaggccaggccgcttgtttcgtgccgacgccgggtccagctccggcaccgccaggctcctccgcgacgaacacgaacgactcctccgctgctcctcggccagccaagcccagcgcattccaacccccaatggtgagtgggtactaccgatagtacaatcaaacacagtatcaagactgatccaatgaacgtgcctttgattttaccttggcaacaacgttcgattatctgcatgcagtacggtggtgtcacccccggcagcctccagccccacgagtgcggcggccggtgcgcggggcggtgctcggcgacggcgtaccagaagccgtgcctcttcttctgccgcaagtgctgcgcggcgtgcctgtgcgtgccgccgggcacctacggcaacaagaacacctgcccctgctacaacaactggaagaccaagctgggaggccccaagtgcccctagtagggcctccctctcggtctacttgatgagatcttctgttcaaaaaatcaaaaggaataagaatctgtttaacc

SEQ ID NO: 39463 - protein, 108 aa, Zea mays subsp. mays
SSLLEESRFRFHGAARARSHGEQEPMVAAAASLLRGNGGRRASLPARRPGRLFRADAGSSSGTARLLRDEHERLLRCSSASQAQRIPTPNGEWVLPIVQSNTVSRLIQ

SEQ ID NO: 39464 - protein, 96 aa, Zea mays subsp. mays
RLCSRSRGSGSTVRRELAAMESKSPWSLRLLVCCAAMVAVALLSQQGGQAACFVPTPGPAPAPPGSSATNTNDSSAAPRPAKPSAFQPPMVSGYYR

SEQ ID NO: 39465 - protein, 90 aa, Zea mays subsp. mays
MNVPLILPWQQRSIICMQYGGVTPGSLQPHECGGRCAGRCSATAYQKPCLFFCRKCCAACLCVPPGTYGNKNTCPCYNNWKTKLGGPKCP

SEQ ID NO: 39466 - DNA, 580 bp, Zea mays subsp. mays
ctctcttgcttgttctttacaaagctcttttagcgccaattgctaatggccaactagccgctatgatgcttgctagggcgacagcaatttcatgtcaatggttgatgggctcatgctcagttaattcagtcactctgcctgatggaaaatcatggtcaagtggggtgttcgttgagaaatgcaagtacctggaagagagcaagtgccttggcatttgcatcaacacatgcaaactgccaactcagactttcttcaaagatcacatgggtgttgatttgtacatggagccaaattttgaagactatagctgccagttcaacttcggggtgccgcctccacctcttgatactgacaaagccctcaaggaaccgtgcttggacatctgcacaaacgcaaggcggcgtagagagctcggaagaaatagcagcccagatgagctcagttgcccccaagtttgatatgctccctgtaaaagactgcacatcatagattattgcgcgttgggcttgggcatggtgtgccttgcttgcatttgtcagtcttcgtgcaacgatgtcaagtaatttcggtaataccattt

SEQ ID NO: 39467 - protein, 151 aa, Zea mays subsp. mays
LLLVLYKALLAPIANGQLAAMMLARATAISCQWLMGSCSVNSVTLPDGKSWSSGVFVEKCKYLEESKCLGICINTCKLPTQTFFKDHMGVDLYMEPNFEDYSCQFNFGVPPPPLDTDKALKEPCLDICTNARRRRELGRNSSPDELSCPQV

SEQ ID NO: 39468 - protein, 131 aa, Zea mays subsp. mays
MMLARATAISCQWLMGSCSVNSVTLPDGKSWSSGVFVEKCKYLEESKCLGICINTCKLPTQTFFKDHMGVDLYMEPNFEDYSCQFNFGVPPPPLDTDKALKEPCLDICTNARRRRELGRNSSPDELSCPQV

SEQ ID NO: 39469 - protein, 130 aa, Zea mays subsp. mays
MLARATAISCQWLMGSCSVNSVTLPDGKSWSSGVFVEKCKYLEESKCLGICINTCKLPTQTFFKDHMGVDLYMEPNFEDYSCQFNFGVPPPPLDTDKALKEPCLDICTNARRRRELGRNSSPDELSCPQV

SEQ ID NO: 39470 - DNA, 886 bp, Zea mays subsp. mays
acgtcggcgtcttccatcgaagtggccttttcggcggcgagtgagagggcgaggaataaaactcgcgtcgcgcacgcaccgcaacaataatatccttccacgcgaatattcgccgcttcccacctcccccgccccgcatatccttccgtccgtccgttcgtctcccccctttcccttcccctctatttcaccaccccatcagccgcccgccaccgcgacgatcaccggcgcaatccgttcaccccaccactcatccactccccctccgcgaatctcatttctttactgcggctaggaggaggcggcggcggcgatgaagttcggcaagagcctgagcggacagatcgtggagacgctcccggagtggcgcgacaagttcctgtcctacaaggatctcaagaagcgcctcaagctcatcggcgccgggaacggggctgagcggcagccgaagcgggcccgccgcgacgactccggggaggctgacgcggccgcggccgcggcggcaatgacgccagaggaggcggagttcatgcagctcctggaggctgagctcgacaaattcaactcttttttcgtcgagaaagaggaggagtacatcatccgtcagaaggagctgcaggaccgggtggccagggcggccgggcgggagtccaaggaggagctcatgcgggtgcgcaaggagattgtcgacttccacggcgagatggtgctgctggagaactacagcgccctcaactacacagctagtagcaacttagcctggactgtggctgtgaattagggatgaagcctctagattcctggggctaacaatcagtgtttgccatagctaacatgggtcaaataaagagacgaattgctgtgttgcttgtcagcaagggacaat

SEQ ID NO: 39471 - protein, 155 aa, Zea mays subsp. mays
MKFGKSLSGQIVETLPEWRDKFLSYKDLKKRLKLIGAGNGAERQPKRARRDDSGEADAAAAAAAMTPEEAEFMQLLEAELDKFNSFFVEKEEEYIIRQKELQDRVARAAGRESKEELMRVRKEIVDFHGEMVLLENYSALNYTASSNLAWTVAVN

SEQ ID NO: 39472 - protein, 97 aa, Zea mays subsp. mays
RRRLPSKWPFRRRVRGRGIKLASRTHRNNNILPREYSPLPTSPAPHILPSVRSSPPFPFPSISPPHQPPATATITGAIRSPHHSSTPPPRISFLYCG

SEQ ID NO: 39473 - protein, 91 aa, Zea mays subsp. mays
MTPEEAEFMQLLEAELDKFNSFFVEKEEEYIIRQKELQDRVARAAGRESKEELMRVRKEIVDFHGEMVLLENYSALNYTASSNLAWTVAVN

SEQ ID NO: 39474 - DNA, 523 bp, Zea mays subsp. mays
cgtttatctcttcttccactgcctcccaaccacttcgtcctcgccggctcgcaactccttgatggcggccacggcgagtctcactaccactgctccctcccctccagctctcctcaaagcatcagctcctttgcttatctcctttcgccccgtctcccgccactgcaagaacctgtgcatcaagaccaaggccacagaaaatgatcagtctgctaaaaagcatcagaaggtgaagagcattctttgccaggactgcgaaggaaatggggcaatcacatgcaccaaatgtgaaggaaatggggtaaattctgttgactattttgaaggccgatttaaagctggatctttatgctggttgtcagaattggttcggcaggtgtctaataaaggcttcctgttgggaaagaattggatccacgggcagcttttagtcatttgtttggaggcattggattcattggagggtcgatttgtgattgtaatcacgattaatgtaatggattggaaattcggaaggggccag

SEQ ID NO: 39475 - protein, 174 aa, Zea mays subsp. mays
VYLFFHCLPTTSSSPARNSLMAATASLTTTAPSPPALLKASAPLLISFRPVSRHCKNLCIKTKATENDQSAKKHQKVKSILCQDCEGNGAITCTKCEGNGVNSVDYFEGRFKAGSLCWLSELVRQVSNKGFLLGKNWIHGQLLVICLEALDSLEGRFVIVITINVMDWKFGRGQ

SEQ ID NO: 39476 - protein, 154 aa, Zea mays subsp. mays
MAATASLTTTAPSPPALLKASAPLLISFRPVSRHCKNLCIKTKATENDQSAKKHQKVKSILCQDCEGNGAITCTKCEGNGVNSVDYFEGRFKAGSLCWLSELVRQVSNKGFLLGKNWIHGQLLVICLEALDSLEGRFVIVITINVMDWKFGRGQ

SEQ ID NO: 39477 - DNA, 938 bp, Zea mays subsp. mays
actgctcgagctcagctcaagtaaccacagaaaatggcgtcacttctccgccctctcgtcctcgtgctcctgatcgcctcctgcacagcgcagcagtcaccgccggcgcagcccccgccaacgccgaacgcgccaccggccaactcgccgccccaggcgcctccagccggcaacccgccgccggcaggcaacccgccacccgcgcccaccgccactccacctccggccccgaccactccgcccccggccccgaccactcctcccccggctcccacaacgccgcccccggcgccgacaactccacctccggcccccaccacgccgcctccgtccccaccagcgtcgccaccgcccgctcccaccactccgccaccgtctcccccggcaagcccgccgcccgctcccgccaccccgccaccgtctccgcccatggcgccacctcccgccacgccccctccacccgccaccccgccgccaccggccgcgcccacgccggccccgagcgtgggtacggtggtggccgtggaggcggcggctacggcggtggcgggcgccgtgatggcggcggcggctacggcggtggcggcggcggctacggtggcggcggcggctacggtggtggtggcggcggctacggcggtggcaaccgtggcggcggctacggcaactccgacgggaactggaggaactgagcggtggggcccgcgcggccaagttatcctgttcgctaccgtgttgtttaccctagtccagagggtttatcttcgttcgtctcatgtttgttgttgcccatctgtgtttttgattgcaaggtcgctttgtgtcagttttagtgctgtgttcatcctcggctccagcagacccatgcatcaaccagcatggactgcggatcgatggatgctgttacccccgtcaggctttatcctaagttaatcttc

SEQ ID NO: 39478 - protein, 299 aa, Zea mays subsp. mays
MASLLRPLVLVLLIASCTAQQSPPAQPPPTPNAPPANSPPQAPPAGNPPPAGNPPPAPTATPPPAPTTPPPAPTTPPPAPTTPPPAPTTPPPAPTTPPPSPPASPPPAPTTPPPSPPASPPPAPATPPPSPPMAPPPATPPPPATPPPPAAPTPAPSVGTVVAVEAAATAVAGAVMAAAATAVAAAATVAAAATVVVAAATAVATVAAATATPTGTGGTERWGPRGQVILFATVLFTLVQRVYLRSSHVCCCPSVFLIARSLCVSFSAVFILGSSRPMHQPAWTADRWMLLPPSGFILS

SEQ ID NO: 39479 - protein, 229 aa, Zea mays subsp. mays
CSSSAQVTTENGVTSPPSRPRAPDRLLHSAAVTAGAAPANAERATGQLAAPGASSRQPAAGRQPATRAHRHSTSGPDHSAPGPDHSSPGSHNAAPGADNSTSGPHHAASVPTSVATARSHHSATVSPGKPAARSRHPATVSAHGATSRHAPSTRHPAATGRAHAGPERGYGGGRGGGGYGGGGRRDGGGGYGGGGGGYGGGGGYGGGGGGYGGGNRGGGYGNSDGNWRN

SEQ ID NO: 39480 - protein, 167 aa, Zea mays subsp. mays
MAPPPATPPPPATPPPPAAPTPAPSVGTVVAVEAAATAVAGAVMAAAATAVAAAATVAAAATVVVAAATAVATVAAATATPTGTGGTERWGPRGQVILFATVLFTLVQRVYLRSSHVCCCPSVFLIARSLCVSFSAVFILGSSRPMHQPAWTADRWMLLPPSGFILS

SEQ ID NO: 39481 - DNA, 881 bp, Zea mays subsp. mays
aattagtatcctctcttcttaacttcagttagctgttgtagctacgctgctcagtactgaccagaacacaaccatctaccctctctcacattatgcttgtgtgcaggcaatcttatcccgtgttggatacaccaagggtccctgcctcctccacgtccattggttcctctcgtgttgattggaccaggaacagggtgtgcaccattccgtgcatttgtggaggaaagggctgcacaggctgcagctgaaccaacagccccggttctgttcttcttcggctgtagaaaccaagaaaacgattttctatacaaggatttctggctaactcatgcgcaggatgagggggtgttgtcctcgaaaaggggcggtggtttcttcgtcgctttttcccgggatcagccgcaaaaggtctacgtgcaacataagataatggaacagagttcaagagtgtggaacttattactgtccgatgcagtgatctacattgcaggctcttcgacgaaaatgcctgccgatgttacagctgcgctagaggaggttatttgtaaagaaggtggtgtcaagcaagcggatgcttcgaaatggctcagggatctagaaagggctggtagacttaacatcgagacatggtcatagttgtgatgggcaagaatagagatggcaatgggtacccgcgacccaatacccgatgggtatttactccattagggtatgtatgtgggctaaatattctacccgtgggtctgttattgggcaaaaatcttcacccaatgggtaaacgggtattagaacgttccgccttcacccatacccgttaacccgtgggtataaactacccaatataaacttagtccaagcatgaactttgactttagtcatcc

SEQ ID NO: 39482 - protein, 68 aa, Zea mays subsp. mays
MEQSSRVWNLLLSDAVIYIAGSSTKMPADVTAALEEVICKEGGVKQADASKWLRDLERAGRLNIETWS

SEQ ID NO: 39483 - protein, 63 aa, Zea mays subsp. mays
MVIVVMGKNRDGNGYPRPNTRWVFTPLGYVCGLNILPVGLLLGKNLHPMGKRVLERSAFTHTR

SEQ ID NO: 39484 - protein, 58 aa, Zea mays subsp. mays
MGKNRDGNGYPRPNTRWVFTPLGYVCGLNILPVGLLLGKNLHPMGKRVLERSAFTHTR

SEQ ID NO: 39485 - DNA, 961 bp, Zea mays subsp. mays
ctatattgggacacacaatttccataacttcactacaagaaccaaggcagaggatcctgcagcaaaaagatttatcatttcctttgctgctgaccgtgttgtcagcctggatgggattgattttgtcaggtgtgaagttgttggacagagtttcatgctccatcagatccggaagatgattggtcttgctgtagctgtgatgaggaactgtgcacctgaatcaatttatgatgtcgcctttcgcaaggatgtcaatcttaatgtgcctactgcacctgaggtcggactgtacctagatgaatgtatgttcacatcatacaacaagaaatggaaggattcacatgaggcagttttcatggaaccttattctgaggaggccgaagagttcaaggtcaagtatattttcactcatattgcggcgatggaacacaaggagggagctgtagctttgtggttgcattcattgaaccacagaaattatccagatttccgttacatggaaactgccgagcacaatgctggtgctgaagttgagagtattgctgctggtgcagagcccaaggttggagctgaagttgagaatactgaagaagtacagatgccaagcgacaatctaagtgagtaataaattttgccaaggggcatgcaaaactgaagaaaatatctgtttgtcgtgttactgagagggacctcaaacatttctaatgagatatcgtaatatagagaatgaagactcatatgttctccaatggaatatgaacatcaagaggttaatgtgcatcactttatgccatcatgatccctatgttaatcttctgaaataagaacctagaggtctatattagtcttatatctgaacttcattaattgcttccagacaattgtatgacaaatggcactcggaaatgtttcagcaatgtttttgtttgctgaaattattatgggattcactattttctcg

SEQ ID NO: 39486 - protein, 207 aa, Zea mays subsp. mays
YIGTHNFHNFTTRTKAEDPAAKRFIISFAADRVVSLDGIDFVRCEVVGQSFMLHQIRKMIGLAVAVMRNCAPESIYDVAFRKDVNLNVPTAPEVGLYLDECMFTSYNKKWKDSHEAVFMEPYSEEAEEFKVKYIFTHIAAMEHKEGAVALWLHSLNHRNYPDFRYMETAEHNAGAEVESIAAGAEPKVGAEVENTEEVQMPSDNLSE

SEQ ID NO: 39487 - protein, 156 aa, Zea mays subsp. mays
MLHQIRKMIGLAVAVMRNCAPESIYDVAFRKDVNLNVPTAPEVGLYLDECMFTSYNKKWKDSHEAVFMEPYSEEAEEFKVKYIFTHIAAMEHKEGAVALWLHSLNHRNYPDFRYMETAEHNAGAEVESIAAGAEPKVGAEVENTEEVQMPSDNLSE

SEQ ID NO: 39488 - protein, 149 aa, Zea mays subsp. mays
MIGLAVAVMRNCAPESIYDVAFRKDVNLNVPTAPEVGLYLDECMFTSYNKKWKDSHEAVFMEPYSEEAEEFKVKYIFTHIAAMEHKEGAVALWLHSLNHRNYPDFRYMETAEHNAGAEVESIAAGAEPKVGAEVENTEEVQMPSDNLSE

SEQ ID NO: 39489 - DNA, 716 bp, Zea mays subsp. mays
acaccttgcacttagtctggacagaagagaagttgcaagaacagcttgatgtgcttgatcgacgatgggagatttcaaggcgaagggcattggcatccttcaagtctggagataaactagctgcttatcgttatgtgaggcagtctaaattattctcacaaagccggagcagatgcacacagttgttggaaaggattgaagaagtcatcagcctaattgctagtgctgaatcaaataagaaggtttatgaggcaatacaaattggtatcctggcaatgaaggacaacactgtcagcatagatgaggttaacatccacatgaaggagattgatgagcttgttgctgcacaaagagaagttgatgctgcccttgtaccactccagtcgttagatgatgaaggagatattgatgaagagttcagcaagcttgaagcagaattgcaggatgacgtccctcatattcatgttcaagaaccaatggcaccttccaacgaggaatcacctgatgaagtggttgaatcattgagccataacatgtcaagaattagactggagcccatctaaatgctccattttacgtttaatcaatttgacctgtacatagtgtgatctagtcaaatcatctagtcccaacaatgtgtcttatgtttcttgttacaccatccttataaaagggcaattctgttgcagatattcctcaatgttgcctgctgtttt

SEQ ID NO: 39490 - protein, 186 aa, Zea mays subsp. mays
TLHLVWTEEKLQEQLDVLDRRWEISRRRALASFKSGDKLAAYRYVRQSKLFSQSRSRCTQLLERIEEVISLIASAESNKKVYEAIQIGILAMKDNTVSIDEVNIHMKEIDELVAAQREVDAALVPLQSLDDEGDIDEEFSKLEAELQDDVPHIHVQEPMAPSNEESPDEVVESLSHNMSRIRLEPI

SEQ ID NO: 39491 - protein, 95 aa, Zea mays subsp. mays
MKDNTVSIDEVNIHMKEIDELVAAQREVDAALVPLQSLDDEGDIDEEFSKLEAELQDDVPHIHVQEPMAPSNEESPDEVVESLSHNMSRIRLEPI

SEQ ID NO: 39492 - DNA, 1127 bp, Zea mays subsp. mays
attttcgcctgctacttttaccttggaggaaccaccaacctcttcatgcagtaattggggctcagaaagtggagcatttgactgtagcccttctgaagtaaaaccttctcagtatgattattgcccttcagcccagtcatctacaaaaggccaaaattttcgaggcagtaaaataaaggtggaagaacaagaagaatgcagcagcataagcaatgcaaggaaggaacaggaaaatgaagatctaagtcccctatctgtgcttgaacccaccacctctctaagcgagagttgctggtcttctgagtgttcggacagcagcggtgggggtaaggttaatccatcactttttgatgttaaaaatggtcaggggaatttcttgattaacccagcatcagttgatatcgaggcaaagacaacagactcagcctcttcggcatcagcagatacatcggatgtttcagatatcacccaatgctctaaaagatcaagacacacagagctggagtacatcgcagatgtgctaagcagtgtgaacttgacaacagatgaactgggatcactcttcgtcaatcaggatagatcagctctgcaccccctcctcttcgagaaactggagaatacgcatgcgtacacacaagggaaagcgcccttttgccatcgagggtacaggcggctgttgttcgactgcgtgaatgagtgcctggagacaagacgcacgacctacttccgggcaggatatgcggcatggagcaaaggagcagcgacgctgggcatggaggcccaagtctgcagtgaggtaaccagctggaagagcatgggagactggacggaggacgagctcgtcgacaaggacatgagcggcgggctgggcacatgggtcgatttccgggtggaggagttcgaggccggtgaggaggtggagagccacgtactgagctcactgctcgatgaggtggtcggcgacatggtcgcgagacggcggcggccaggagtatttgtgatttgagaatgggtcctgtaattttgtttcgttttgctgttacatatctccccaatttattctgtcaccccagaagtgtgttgttcaaatcagtgataaatgttcatcgatcgttttcagctcggcc

SEQ ID NO: 39493 - protein, 334 aa, Zea mays subsp. mays
FSPATFTLEEPPTSSCSNWGSESGAFDCSPSEVKPSQYDYCPSAQSSTKGQNFRGSKIKVEEQEECSSISNARKEQENEDLSPLSVLEPTTSLSESCWSSECSDSSGGGKVNPSLFDVKNGQGNFLINPASVDIEAKTTDSASSASADTSDVSDITQCSKRSRHTELEYIADVLSSVNLTTDELGSLFVNQDRSALHPLLFEKLENTHAYTQGKAPFCHRGYRRLLFDCVNECLETRRTTYFRAGYAAWSKGAATLGMEAQVCSEVTSWKSMGDWTEDELVDKDMSGGLGTWVDFRVEEFEAGEEVESHVLSSLLDEVVGDMVARRRRPGVFVI

SEQ ID NO: 39494 - DNA, 724 bp, Zea mays subsp. mays
gaatttggtgaagaggaattaatggaacagaacgagaatggttctactatgattgagaagccatccacttctaacactattaaaacctctgtgcctgttcctgtcgacagtctcatgctgagcctgctcagtgagcaaactcggtggatttcaggttaccatgaacatgaagctctcctccaagaaaatgaagaagaaaagcttacaaaggaggagcaggacctggctttgttcgaatgggagtcattgaggaaagctgcatctgatcctgagagaaaatcaagcatgagcgcagttccaacatatcccaatcctgtgcggccacttaagcctgcttcaagaagccggcaactgcagcaacctaaggctaactcaaataaccaaaagaagtgcaccaacttaacccacttgctgactctgagaagccatggcacaaaagcagggtgcacgacaacctgtaacgagtgcggccaggaaattagttgggagactctaaacagagatggtagatcgagatgatgcctgtctctgtggcattgccagatttttttgggggtctttatgtaatgttaacgtccaggtagcagtatatatattgcgtatacgagagtattagagtaggtagaatgtagaatggacaaaaaatggctcttgtggtacacatggtagaacgcatgggatgcaaaaaatgaacgatcacattgttatggaatgtagtcgtaac

SEQ ID NO: 39495 - protein, 172 aa, Zea mays subsp. mays
EFGEEELMEQNENGSTMIEKPSTSNTIKTSVPVPVDSLMLSLLSEQTRWISGYHEHEALLQENEEEKLTKEEQDLALFEWESLRKAASDPERKSSMSAVPTYPNPVRPLKPASRSRQLQQPKANSNNQKKCTNLTHLLTLRSHGTKAGCTTTCNECGQEISWETLNRDGRSR

SEQ ID NO: 39496 - protein, 165 aa, Zea mays subsp. mays
MEQNENGSTMIEKPSTSNTIKTSVPVPVDSLMLSLLSEQTRWISGYHEHEALLQENEEEKLTKEEQDLALFEWESLRKAASDPERKSSMSAVPTYPNPVRPLKPASRSRQLQQPKANSNNQKKCTNLTHLLTLRSHGTKAGCTTTCNECGQEISWETLNRDGRSR

SEQ ID NO: 39497 - protein, 156 aa, Zea mays subsp. mays
MIEKPSTSNTIKTSVPVPVDSLMLSLLSEQTRWISGYHEHEALLQENEEEKLTKEEQDLALFEWESLRKAASDPERKSSMSAVPTYPNPVRPLKPASRSRQLQQPKANSNNQKKCTNLTHLLTLRSHGTKAGCTTTCNECGQEISWETLNRDGRSR

SEQ ID NO: 39498 - DNA, 1112 bp, Zea mays subsp. mays
actagagcaaatactctcaagtcccaactaaccaaaactgggaggaagagaaaagctgcagacacggtctctctctcacccttcaccgcttcacgtagcagcaagaaaaagaaagaaaataaaaagagagagagagacagagatggcttgcaccttgaaactccaaaacccaccacgaaaaaagaccttctctggcccctgaccctgagagagagttgctgttgctgccattcggtcggtgcctccttttcggtacgccgctggtatgtggtatcactggtatggttgttctcccatcccaaggcgacgagggaataggaagctagaaagttcgtctgcagtctgcacctttgcccatggcctaggcgcctagctcaggccgtagctcagcgtccgtccatgggccagggagtctgaaaccttgcttgccttgcctgcccgctcctctcacttctctctctcctcctcgctcgtgtccccggcgttctgctggtccctggggactggagagcgaaggtctgtctcctttgcgcctgctctgcttcttcaatgctgggcgtcggtggcttgggctcgggctcgggcatggaaccaggtaccagctgcggtgctctgctcagagagcttcagcaaatctgggcagaagtaggggaaagtgagggcgagaagaacaaggcgttgctggacatcgaaagagagtgcctggaagtctaccgcaggaaggtggacgatgccaatcggactagggtccagctgcaccagtcagtggctgccaaagaagctgaggttgcatctctgatggcaacccttggggagcacaagctgtacttgaaggtatacaactatacacggtgatgggctgatgatgaggtgacgcactaattaggttggttggcgtattggacatgcatggttcgcttcttgctgaaatggacatggactgtagatatatgaagcctcttgaggagacttgtttttctacgaatgctgaactttactttctcaccaagctttagtcagttctttctaaactgccgtgaattaataacattaccaatgttacacagtagtttgggttgcatatgttctacagcgttcattttattgcctac

SEQ ID NO: 39499 - protein, 105 aa, Zea mays subsp. mays
TRANTLKSQLTKTGRKRKAADTVSLSPFTASRSSKKKKENKKRERDRDGLHLETPKPTTKKDLLWPLTLRESCCCCHSVGASFSVRRWYVVSLVWLFSHPKATRE

SEQ ID NO: 39500 - protein, 101 aa, Zea mays subsp. mays
MLGVGGLGSGSGMEPGTSCGALLRELQQIWAEVGESEGEKNKALLDIERECLEVYRRKVDDANRTRVQLHQSVAAKEAEVASLMATLGEHKLYLKVYNYTR

SEQ ID NO: 39501 - protein, 89 aa, Zea mays subsp. mays
MEPGTSCGALLRELQQIWAEVGESEGEKNKALLDIERECLEVYRRKVDDANRTRVQLHQSVAAKEAEVASLMATLGEHKLYLKVYNYTR

SEQ ID NO: 39502 - DNA, 960 bp, Zea mays subsp. mays
actacgcgcgaggcacggcacggcacggcacgaccgagctccagtctgcccccgcccccgcccccatccgcacgtccgccttgatccggcaaatggcgtcgccggcgcggcggctcctgcagaccaactccgtgcagtacccgacgctccccgcggccgacccgccgagcgcgctggccgtcgactccgacgtggtggtcatcctcgccgcgctcctctgcgcgctcatctgcgtcgtggggctggcctccgtggcccggtgcgcgcgctcccgcgccgcgcccgccgccgccgccaggagggggctcaggaagaaggcgctcagggcgctgccgagcctcgcgtacgaggacgccgtggcggcccgggccggggccggggacggggccggggacggggcggcggaggtcctggcggagtgcgccatctgcctgtcggagttcgcgccacgggaggaggtccgcgtgctgccgcagtgcggccacgccttccacgtcgcctgcatcgacacctggctcgccgcccactcctcctgtccctcgtgccgccgcgtcctcgtcgtcggcgacgacgccagtaagcgcccgccccaccagcctaagcgctgccgcaagtgcgacgcggccatggacgagccctcctcgtcgtccggttccgccggcgccacgcctgccggttcctgacccttctcaccagtgccacagccacgccaccaccgccgccagtttctagcaactgggccggcaatcttagctccactggaattccctcatcatcaggcgccgccggtttctagcaactgggttggcaatctttagctccactccacttcattccaaggattcgaacgttgatgctgtaaattgcaggttggtcgattatgtacatatttattttcagattagaaacatgctaaagtatcgtgtgaatgtgaatctcagaaacagaatctttcttcgc

SEQ ID NO: 39503 - protein, 226 aa, Zea mays subsp. mays
YARGTARHGTTELQSAPAPAPIRTSALIRQMASPARRLLQTNSVQYPTLPAADPPSALAVDSDVVVILAALLCALICVVGLASVARCARSRAAPAAAARRGLRKKALRALPSLAYEDAVAARAGAGDGAGDGAAEVLAECAICLSEFAPREEVRVLPQCGHAFHVACIDTWLAAHSSCPSCRRVLVVGDDASKRPPHQPKRCRKCDAAMDEPSSSSGSAGATPAGS

SEQ ID NO: 39504 - protein, 196 aa, Zea mays subsp. mays
MASPARRLLQTNSVQYPTLPAADPPSALAVDSDVVVILAALLCALICVVGLASVARCARSRAAPAAAARRGLRKKALRALPSLAYEDAVAARAGAGDGAGDGAAEVLAECAICLSEFAPREEVRVLPQCGHAFHVACIDTWLAAHSSCPSCRRVLVVGDDASKRPPHQPKRCRKCDAAMDEPSSSSGSAGATPAGS

SEQ ID NO: 39505 - protein, 192 aa, Zea mays subsp. mays
LRARHGTARHDRAPVCPRPRPHPHVRLDPANGVAGAAAPADQLRAVPDAPRGRPAERAGRRLRRGGHPRRAPLRAHLRRGAGLRGPVRALPRRARRRRQEGAQEEGAQGAAEPRVRGRRGGPGRGRGRGRGRGGGGPGGVRHLPVGVRATGGGPRAAAVRPRLPRRLHRHLARRPLLLSLVPPRPRRRRRRQ

SEQ ID NO: 39506 - DNA, 1486 bp, Zea mays subsp. mays
gctgctgcctgctcttctttttctgctgagtacaagaaacagtctttgctcgcgtcgtgggttcttcccctgttcgattcaccgcgaggtctgcgacggaggtttgcgtgcctccgattgctgcatccgttgctgatcgaggagactgggaccttcaaagagcaataggactcatggaggttggagacgcaagaaacggttctgcagcagcggcactgacaaagggaagtgcggatgatgccgcccgcaaaccgctccctccttgctgcgtcaaggccaaggcgcgtgtgcctgaaaccgaggccaactgccatgatactgtggtttcagggtggttcacggaacccagatcgcgttttggtaaaacaagcaaagtgcagtacttcaataacccgatgtggcctggagaggctcattcattgaaagtggagaagatcttgtttcaagggaaatcgccttaccaagaaattttagtttttgagtcttcaacctatggaaatgttcttgtgcttgatggtatagttcagttgactgacaaggatgaatgcgcataccaggaaatggttactcaccttccactgtgctcaattcctgcaccgaagaatgttttggttgttggaggtggtgatggtggtgtactgcgcgaaatagccagacatgattcagtggaaactattgatatatgtgagattgatcaactagttattgatgtttgcaaagaattctttccaaacttatccattggattcaaagatcctcgtgtccgacttcatgttggtgatgctgttgatttcctgaggaattctcccgaaggaaaatatgatgctattattgtagattcatcagatccaattgggccagcacaggcactcgtggagaaactgtttattcagacaattgctagagctttgaagcctggtggtgttctttgtaatcttgctgagagcatgtggctgcacacacatctaatccaggatatgcttgctatctgtcgacagacattcaaaggtgctgtgcactatgcctggacaagtgttccaacatatcccagtggtgtcattggatttttgctatgtgcaaaagaaggtcgtgcagtgaacttcttaactcctgtgaatccaattgagaaaatagaaggaacaacaaaagctggaagggaactcagattttacaattccgagatccatagggctgcttttgttctgccaacatttgtaagaagagaactggaagcatataccactcctagtacctctgctgaaaacgagaaaccgaaagaatcggtgtcagaaccgcagaagataaagatattgtcaaacaacgccattcttacagcttcctagccctgagccgtactcaatcttgctcggtatagttgtattctcacagaataaatcagtcactggcttttgctgacaccgcacgagcagctttagtatagtgagttgaatgatgatcgattgaataagagggtagatattgaact

SEQ ID NO: 39507 - protein, 389 aa, Zea mays subsp. mays
MEVGDARNGSAAAALTKGSADDAARKPLPPCCVKAKARVPETEANCHDTVVSGWFTEPRSRFGKTSKVQYFNNPMWPGEAHSLKVEKILFQGKSPYQEILVFESSTYGNVLVLDGIVQLTDKDECAYQEMVTHLPLCSIPAPKNVLVVGGGDGGVLREIARHDSVETIDICEIDQLVIDVCKEFFPNLSIGFKDPRVRLHVGDAVDFLRNSPEGKYDAIIVDSSDPIGPAQALVEKLFIQTIARALKPGGVLCNLAESMWLHTHLIQDMLAICRQTFKGAVHYAWTSVPTYPSGVIGFLLCAKEGRAVNFLTPVNPIEKIEGTTKAGRELRFYNSEIHRAAFVLPTFVRRELEAYTTPSTSAENEKPKESVSEPQKIKILSNNAILTAS

SEQ ID NO: 39508 - protein, 315 aa, Zea mays subsp. mays
MWPGEAHSLKVEKILFQGKSPYQEILVFESSTYGNVLVLDGIVQLTDKDECAYQEMVTHLPLCSIPAPKNVLVVGGGDGGVLREIARHDSVETIDICEIDQLVIDVCKEFFPNLSIGFKDPRVRLHVGDAVDFLRNSPEGKYDAIIVDSSDPIGPAQALVEKLFIQTIARALKPGGVLCNLAESMWLHTHLIQDMLAICRQTFKGAVHYAWTSVPTYPSGVIGFLLCAKEGRAVNFLTPVNPIEKIEGTTKAGRELRFYNSEIHRAAFVLPTFVRRELEAYTTPSTSAENEKPKESVSEPQKIKILSNNAILTAS

SEQ ID NO: 39509 - protein, 260 aa, Zea mays subsp. mays
MVTHLPLCSIPAPKNVLVVGGGDGGVLREIARHDSVETIDICEIDQLVIDVCKEFFPNLSIGFKDPRVRLHVGDAVDFLRNSPEGKYDAIIVDSSDPIGPAQALVEKLFIQTIARALKPGGVLCNLAESMWLHTHLIQDMLAICRQTFKGAVHYAWTSVPTYPSGVIGFLLCAKEGRAVNFLTPVNPIEKIEGTTKAGRELRFYNSEIHRAAFVLPTFVRRELEAYTTPSTSAENEKPKESVSEPQKIKILSNNAILTAS

SEQ ID NO: 39510 - DNA, 943 bp, Zea mays subsp. mays
ttttttatttgtacattacctaaatgtattgtccctgtgtgcaatccagctattgattttcaattaattggtgatatttaagtggtcgagggttaaatattgtttatttgccaagcgagccaaccaacatcatacatagaatatgcactatatctataacatttagtagatatttccatttattgattgccgcacttgacgtcgtcgtgatggcttgaccagacagttaaactaatagagattactaggatatacaccatccagtcaaaaggattgtactagcctctattgtctggggcttttaaggtgattagtgaaagcctgagatacgtatatgttaatgagttttacttgtgatccttatttgtttcagtggtgtaagaccatttggagtatcactgttgattgctgggtatgatgacaatggcccacagttgtatcaggttgatccctcaggatcatacttctcctggaaggcatcagccatgggaaaaaatgtgtcaaatgcaaagacatttcttgaaaagagatacacagaggatatggaacttgatgatgccatccacactgcaattttgactttgaaagaaggatatgaggggcaaatttcctccaacaacattgaaatcggaattattcgagctgaccgtgagttcaaagttctaagcccatcagagatcaaggatttcttggaagaggtggagtaagttgtctgttgatgatttactgtttcaaacaagaatagcagcatcacttatgagcagccagcctgaagcttgtcttggttttatcactctgtaaactgatttgctccagcgacatgtcttggttttatcactctgtaaactgatttgctccagcgacatgtggttcttacatttgaaactctcctgaacgcatactgtagacaaatgagatacgtaagatggatgttgtttttgac

SEQ ID NO: 39511 - protein, 73 aa, Zea mays subsp. mays
MGKNVSNAKTFLEKRYTEDMELDDAIHTAILTLKEGYEGQISSNNIEIGIIRADREFKVLSPSEIKDFLEEVE

SEQ ID NO: 39512 - protein, 54 aa, Zea mays subsp. mays
MELDDAIHTAILTLKEGYEGQISSNNIEIGIIRADREFKVLSPSEIKDFLEEVE

SEQ ID NO: 39513 - protein, 54 aa, Zea mays subsp. mays
MMTMAHSCIRLIPQDHTSPGRHQPWEKMCQMQRHFLKRDTQRIWNLMMPSTLQF

SEQ ID NO: 39514 - DNA, 1870 bp, Zea mays subsp. mays
atcctcctcctcgcccctgttcctcgcgtcttcccgtcgtctccgactcgcttccagttcccgatttgccgaacgccagcgacgccgtcgcatggagatctccttcgaggcgtgggagggcgtgcagcggcacggccaggacctcgcggaccgcctcgcgcagggcttcacgggcctgctccaggcgccgccgcagttcccgtggccgccggcgccgcacaagcggatgcccttcgacatcgacctccccgtcgtccccttcggcgccggcgtgccgaaaaaggacctccccttcccggccgccgccgccgccgtctcctcggtcatcgacatcggaggcaggctaggccaggccggcgccgagcttggggcgtccgtaggcggggccgtgcagcacgccgtgcgccatctgcccgtgccgttccgcaacgcccagatccggcgccgcacgctaccgccggcgccgcctcaggcgcccctgccgcccgcgacttcggtgggcgagggcgcggcagggcgctccgtcgaaagggctgctgtagataggtgccccctcgaggcggcggccgccgccgccgctgcggccactgggagcgcggctgcgtcgagcgtcagcggccatgttagcggggacgatttggacgaggacgacgaaggcttcggctgcggtattgggactcttggaaactttaagaaggccaacggtactgtaaatatgtcggcaacatacaattccaggagtcaagacatcgagagttctgttgttgcacatggagacctctggaggctagaggcatcgcgtggtggatcaacttctggaaatggcacttcgcctctgtaccttgttcagttggggcctctactttttgttcgagactctacacttctgttgcctgttcatctatcaaagcaacacctgctttggtacggttatgatcgcaagaatggtgtccattcactctgtccagctatatggtcaaaacataggagatggttgatgatgtcaatgatgtgtctcaatccaatagcttgttcgtttatggatttgcaattccctaatgggcaactaacatatgttgctggtgaggggatatcagccagtggttttcttccgttatttggtgggttgcttcaagctcaaggaaaatatcctggagaaacaagagtgagcttttcttgcaagaataagcgtggcacaaggtttactcctatgtttcaatggcctgacaagtctgtttcgttaggagttactcaagccttggcatggaaaagatctggtcttatggtgagacccagtatacaagtcagtgtgtgccctacgtttggaggaagtgatcctggggtacgggcagaagttgtccattcattgaaagaggaattgaatctgatgtgtggcctctcttgctcgcggcatccatcagcttatactgctctatctattggacgatcaaagtggaacggtcaagtgggcagttctggagtggtaatcaccttggaaacacctcttaataacattggaaggccgtcgttatctgttcaactgaatggtggttttgagttgtgattcttcagactccagcgctgaagctgtacataccagtgtgtatatattgccatcaccaatgttcgtgctccatagtttgtggaagtgggctgcagcctgccggcttgcaggtcgtttttgttactgtagtctataggtagtctcaactcagcaaatcagctgccatggtacccaacccatgcgggcacagaagtcaactactttgttgttcaatcattatgacaatccttaggtcttatttggatactctcgtattcacattaatctcacatttattgaagtgaaatttaaattaatttacactcc

SEQ ID NO: 39515 - protein, 520 aa, Zea mays subsp. mays
SSSSPLFLASSRRLRLASSSRFAERQRRRRMEISFEAWEGVQRHGQDLADRLAQGFTGLLQAPPQFPWPPAPHKRMPFDIDLPVVPFGAGVPKKDLPFPAAAAAVSSVIDIGGRLGQAGAELGASVGGAVQHAVRHLPVPFRNAQIRRRTLPPAPPQAPLPPATSVGEGAAGRSVERAAVDRCPLEAAAAAAAAATGSAAASSVSGHVSGDDLDEDDEGFGCGIGTLGNFKKANGTVNMSATYNSRSQDIESSVVAHGDLWRLEASRGGSTSGNGTSPLYLVQLGPLLFVRDSTLLLPVHLSKQHLLWYGYDRKNGVHSLCPAIWSKHRRWLMMSMMCLNPIACSFMDLQFPNGQLTYVAGEGISASGFLPLFGGLLQAQGKYPGETRVSFSCKNKRGTRFTPMFQWPDKSVSLGVTQALAWKRSGLMVRPSIQVSVCPTFGGSDPGVRAEVVHSLKEELNLMCGLSCSRHPSAYTALSIGRSKWNGQVGSSGVVITLETPLNNIGRPSLSVQLNGGFEL

SEQ ID NO: 39516 - protein, 490 aa, Zea mays subsp. mays
MEISFEAWEGVQRHGQDLADRLAQGFTGLLQAPPQFPWPPAPHKRMPFDIDLPVVPFGAGVPKKDLPFPAAAAAVSSVIDIGGRLGQAGAELGASVGGAVQHAVRHLPVPFRNAQIRRRTLPPAPPQAPLPPATSVGEGAAGRSVERAAVDRCPLEAAAAAAAAATGSAAASSVSGHVSGDDLDEDDEGFGCGIGTLGNFKKANGTVNMSATYNSRSQDIESSVVAHGDLWRLEASRGGSTSGNGTSPLYLVQLGPLLFVRDSTLLLPVHLSKQHLLWYGYDRKNGVHSLCPAIWSKHRRWLMMSMMCLNPIACSFMDLQFPNGQLTYVAGEGISASGFLPLFGGLLQAQGKYPGETRVSFSCKNKRGTRFTPMFQWPDKSVSLGVTQALAWKRSGLMVRPSIQVSVCPTFGGSDPGVRAEVVHSLKEELNLMCGLSCSRHPSAYTALSIGRSKWNGQVGSSGVVITLETPLNNIGRPSLSVQLNGGFEL

SEQ ID NO: 39517 - protein, 445 aa, Zea mays subsp. mays
MPFDIDLPVVPFGAGVPKKDLPFPAAAAAVSSVIDIGGRLGQAGAELGASVGGAVQHAVRHLPVPFRNAQIRRRTLPPAPPQAPLPPATSVGEGAAGRSVERAAVDRCPLEAAAAAAAAATGSAAASSVSGHVSGDDLDEDDEGFGCGIGTLGNFKKANGTVNMSATYNSRSQDIESSVVAHGDLWRLEASRGGSTSGNGTSPLYLVQLGPLLFVRDSTLLLPVHLSKQHLLWYGYDRKNGVHSLCPAIWSKHRRWLMMSMMCLNPIACSFMDLQFPNGQLTYVAGEGISASGFLPLFGGLLQAQGKYPGETRVSFSCKNKRGTRFTPMFQWPDKSVSLGVTQALAWKRSGLMVRPSIQVSVCPTFGGSDPGVRAEVVHSLKEELNLMCGLSCSRHPSAYTALSIGRSKWNGQVGSSGVVITLETPLNNIGRPSLSVQLNGGFEL

SEQ ID NO: 39518 - DNA, 2181 bp, Zea mays subsp. mays
tctcccatcacagtgcgccacccgcacccaccaacgaggcaacgaaacccagtcggaagctagaccggcgacaagtgcagcgctcgccgcgatggattctgactacggcgtgccgcgcgagctgtcggaggtgcagaagaagcgcgcgctctaccagcccgaggtgcccccctgcctccaggggactactgtcagggtggagtatggtgacgccgcaattgcagctgaccaggcaggcgctcatgtgatcagccatgcgttccctcacacctatgggcagccccttgcacatttcctcaggaagacggctgttgtccttgatgctaaggtcatatctgaacacccggtggtcagggttggcattgtcttctgtggcaggcaatccccaggaggccacaatgttgtttggggactctatgaggctatcaaggcccacaaccaaaacagcaaactcattggtttcctcggtggatcagatggtttgctagcgcagagaacattggagatcactaatgaagttcttgcttcatataaaaatcaaggtggatatgacatgcttggtcggacaaaggatcagattaggacgacagagcaggtcaatggtgcaatggctagttgccaggctttgaagttggatgctctggttataattggaggtgtcacttccaacactgacgctgctcaacttgctgagacttttgctgaggcaaagtgtgcaacgaaggttgtaggtgttcctgtaactttgaatggggacctcaagaaccagtttgttgagactactgttggctttgacaccatatgcaaggtgaatgcacaacttatcagcaatgtctgcactgatgctctatctgctgagaagtattactacttcattcgtttgatgggacgcaaggcttctcatgtggcattggaatgtgctcttcaatcacacccgaacatggtcatcctaggagaggaggtggctgcttccaaacttacaatttttgatattacgaagcagatttgtgatgcggttcaggcaagggcagaaaaagacaagaaccatggggttgttcttattcctgagggtcttgtggagagtattcctgaactatatgctctgcttcaggaaatccatggcctccatggcaaaggtgtttctgttgagaatatctcttctcagctttcaccctgggcatctgcactctttgagtttttgcccccttttatcaggaagcagctacttctccatcctgaatctgatgattcagctcaactttctcagattgagacagagaagcttctagcccagttagttgagactgagatgaacagacgtttgaaggagggcacttacaaaggaaagaagtttaatgcaatctgtcacttctttggctaccaagctaggggagcactgccttccaagtttgactgcgattatgcctatgtcttggggcatgtgtgctaccacatcatagctgccggtttgaacggttacatggccacagtgacaaatgttaagagtccagtgaacaagtggcgatgtggtgcggctcctatttcgtctatgatgactgtgcagcgatggtcgcgtggcccttcagccacccaaatcggaaagcctgctgttcacatggctagcgttgacttgaaaggaaaagcatacgatgtattgaggcagaattcttccaggtttttgttggaagatgtctacaggaacccaggtccgctccagtttgaaggaccaggtgccgattcaaagcctatctcactgtgcgtcgaggatcaagactacatgggcaggataaagaaattgcaggaatacctggagaaggtgaagagcattgtgaagcctgggtgctcgcaggatgtccttaaggcggcgctgagcgccatgtcttctgtgacggagacactgaacatcatgacctcatcgtccaccggccagactgcactgtgactcgtttggtgccgttttgtggtgcggatcagaatccccactttttccatggtgtcgattgacaaagttaggagcagtaatcctggtgccacacgggtcattcttttgtagcttcttgggagagttctgtcagttttgaattcgatagtttattatggagaggcttgttggtgagtttgagctcgaataatttttgaaacagacggattgcggaatcttaataaaccaaaatttgtgac

SEQ ID NO: 39519 - protein, 646 aa, Zea mays subsp. mays
LPSQCATRTHQRGNETQSEARPATSAALAAMDSDYGVPRELSEVQKKRALYQPEVPPCLQGTTVRVEYGDAAIAADQAGAHVISHAFPHTYGQPLAHFLRKTAVVLDAKVISEHPVVRVGIVFCGRQSPGGHNVVWGLYEAIKAHNQNSKLIGFLGGSDGLLAQRTLEITNEVLASYKNQGGYDMLGRTKDQIRTTEQVNGAMASCQALKLDALVIIGGVTSNTDAAQLAETFAEAKCATKVVGVPVTLNGDLKNQFVETTVGFDTICKVNAQLISNVCTDALSAEKYYYFIRLMGRKASHVALECALQSHPNMVILGEEVAASKLTIFDITKQICDAVQARAEKDKNHGVVLIPEGLVESIPELYALLQEIHGLHGKGVSVENISSQLSPWASALFEFLPPFIRKQLLLHPESDDSAQLSQIETEKLLAQLVETEMNRRLKEGTYKGKKFNAICHFFGYQARGALPSKFDCDYAYVLGHVCYHIIAAGLNGYMATVTNVKSPVNKWRCGAAPISSMMTVQRWSRGPSATQIGKPAVHMASVDLKGKAYDVLRQNSSRFLLEDVYRNPGPLQFEGPGADSKPISLCVEDQDYMGRIKKLQEYLEKVKSIVKPGCSQDVLKAALSAMSSVTETLNIMTSSSTGQTAL

SEQ ID NO: 39520 - protein, 616 aa, Zea mays subsp. mays
MDSDYGVPRELSEVQKKRALYQPEVPPCLQGTTVRVEYGDAAIAADQAGAHVISHAFPHTYGQPLAHFLRKTAVVLDAKVISEHPVVRVGIVFCGRQSPGGHNVVWGLYEAIKAHNQNSKLIGFLGGSDGLLAQRTLEITNEVLASYKNQGGYDMLGRTKDQIRTTEQVNGAMASCQALKLDALVIIGGVTSNTDAAQLAETFAEAKCATKVVGVPVTLNGDLKNQFVETTVGFDTICKVNAQLISNVCTDALSAEKYYYFIRLMGRKASHVALECALQSHPNMVILGEEVAASKLTIFDITKQICDAVQARAEKDKNHGVVLIPEGLVESIPELYALLQEIHGLHGKGVSVENISSQLSPWASALFEFLPPFIRKQLLLHPESDDSAQLSQIETEKLLAQLVETEMNRRLKEGTYKGKKFNAICHFFGYQARGALPSKFDCDYAYVLGHVCYHIIAAGLNGYMATVTNVKSPVNKWRCGAAPISSMMTVQRWSRGPSATQIGKPAVHMASVDLKGKAYDVLRQNSSRFLLEDVYRNPGPLQFEGPGADSKPISLCVEDQDYMGRIKKLQEYLEKVKSIVKPGCSQDVLKAALSAMSSVTETLNIMTSSSTGQTAL

SEQ ID NO: 39521 - protein, 462 aa, Zea mays subsp. mays
MLGRTKDQIRTTEQVNGAMASCQALKLDALVIIGGVTSNTDAAQLAETFAEAKCATKVVGVPVTLNGDLKNQFVETTVGFDTICKVNAQLISNVCTDALSAEKYYYFIRLMGRKASHVALECALQSHPNMVILGEEVAASKLTIFDITKQICDAVQARAEKDKNHGVVLIPEGLVESIPELYALLQEIHGLHGKGVSVENISSQLSPWASALFEFLPPFIRKQLLLHPESDDSAQLSQIETEKLLAQLVETEMNRRLKEGTYKGKKFNAICHFFGYQARGALPSKFDCDYAYVLGHVCYHIIAAGLNGYMATVTNVKSPVNKWRCGAAPISSMMTVQRWSRGPSATQIGKPAVHMASVDLKGKAYDVLRQNSSRFLLEDVYRNPGPLQFEGPGADSKPISLCVEDQDYMGRIKKLQEYLEKVKSIVKPGCSQDVLKAALSAMSSVTETLNIMTSSSTGQTAL

SEQ ID NO: 39522 - DNA, 724 bp, Zea mays subsp. mays
cgtggtgtgccacagatcaccgtgtgctttgacatcgacgccaacggcatcctgaacgtgtctgccgaggacaagacaacggggcagaagaacaagatcacaatcaccaacgacaagggccgtctctccaaggaggagatcgagaagatggttcaggacgctgagaagtacaagtctgaggatgaggagcacaagaagaaggtggaggccaagaactcgctggagaactactcctacaacatgcgcaacacgatcaaggacgagaagattgcgtccaagctgccggccgatgacaagaagaagatcgaggacgccatcgacgcggccatcagctggctggacgccaaccagctcgccgaggcggacgagttcgaggacaagatgaaggagctggagagcctctgcaaccccatcatcgccaagatgtaccagggcgcgggtgaagacatgggcggcgctggcggcatggacgaggacgcccctgccggcagcggcggccctggccccaagatcgaggaggtggactaagcggtttgttgtcagtcttgagtgtgctgcagttgctggctggcccagttgctgccgagagttatcgtcagttggtgcggtgtgtccgcttaaactttatttgtggttggttggtacttttgtggtggttatttttttggacctcgtgatagtcggtcggttcaatgttatcgcggctactggcaaaccttaagtg

SEQ ID NO: 39523 - protein, 175 aa, Zea mays subsp. mays
RGVPQITVCFDIDANGILNVSAEDKTTGQKNKITITNDKGRLSKEEIEKMVQDAEKYKSEDEEHKKKVEAKNSLENYSYNMRNTIKDEKIASKLPADDKKKIEDAIDAAISWLDANQLAEADEFEDKMKELESLCNPIIAKMYQGAGEDMGGAGGMDEDAPAGSGGPGPKIEEVD

SEQ ID NO: 39524 - protein, 126 aa, Zea mays subsp. mays
MVQDAEKYKSEDEEHKKKVEAKNSLENYSYNMRNTIKDEKIASKLPADDKKKIEDAIDAAISWLDANQLAEADEFEDKMKELESLCNPIIAKMYQGAGEDMGGAGGMDEDAPAGSGGPGPKIEEVD

SEQ ID NO: 39525 - protein, 95 aa, Zea mays subsp. mays
MRNTIKDEKIASKLPADDKKKIEDAIDAAISWLDANQLAEADEFEDKMKELESLCNPIIAKMYQGAGEDMGGAGGMDEDAPAGSGGPGPKIEEVD

SEQ ID NO: 39526 - DNA, 1691 bp, Zea mays subsp. mays
gatatttaggttaagggacaagcttgagatggcattggctttagctgaggaaaatgaagctgctgctattgaagttcgtcaaactgcagagattagtaaaatttatgctgaggaaaaagaagaggaggttaagattcttgaacgatctgtcgaggaacttgaaggaacagtaactgttcttgaggaagaggtatgcaaccttaaagaggaagtaaggaactatcaaatacataaacaatctgaagcccaatttcaagctattaatgacatgcttgctgaagaaaaagcatcaaaatgtgatgctgctgaggaatcgtgtcaagcgaaatgtcatctagaaaagagattgcaagctgagattcttgcacatcaaggtgtcagaaagaagattgaaggtctcaaattggaagcaaagcgtaaagatgatgagattggacaatacaaagagcatattgctgagttggtcctgcattcagaagcacagtccttgttgtttcaggagaagtacaatgaaatggaacacatggtttctagacagaggtttggtccgcatgaatcttattctgagactgtccccaagactgaaaagccttcagggcgagcaagaggatccagctcccctttccggtgcatatctagcattattcaacaaatgaactctgagagagatcaagaaatcttggtggcacgccaacgaattgaagaactagaaggtttggttagttgcaaacagaaagagatatgcttgctaacatcaagactagctgctgtggataccatgacgcatgatattataagagaactacttggtgtcaaactagacatgacaaactatgctaatttggttgaccaagaagagctgcaaaagttgctcatagcatcccagcaacagattgaacaatcaaaggcgaaggatacagagctcgaagcgctgaaggaacaacttggccatcttattctggaaagggacagcttgcttgatgacatggaccaaagaaagacggacctattggaggctcaactgctcgttgaacagctcgagcaacgggagcagatgctagaagcccagattgaaatgttgcagctggagaaagacagccttcagcaaaagaccttggagatggacgagacaatcgagcttctagccagatcaaaccaaccagatataaacccacgaatgggcgacaaccaccatcgcggcagcagtgagttcagcaggcggttagctcagtccgacatgctcctctcccacgcgaggcatgagcattctcgcaggcacgcggccggaagctcgaggacgcaccacggccggcaccgatgaagctcggggatgcttgctagtagaatgctggtgcgtcagccgccagacaccgcttgtgtttgtagcggcgcggcttctctggccgggattgtacagaagctgcaagacccgaatggcagtggccagaagaagaaacttcccacgtctgtaagatctgcgcgcctgtaaatctgatagtgcaatgtacgcgttgttgccatttgggccgttgtatgttcttccgcgaggcttttcagcgagatctccctgaaagaagataaacagctgaaagtgacaatcccacagatttgtttctactttaccgagggttagctagggttttgtgcaatacgttgacccttgtaacgaggcgcagatatttgcatgctcc

SEQ ID NO: 39527 - protein, 439 aa, Zea mays subsp. mays
IFRLRDKLEMALALAEENEAAAIEVRQTAEISKIYAEEKEEEVKILERSVEELEGTVTVLEEEVCNLKEEVRNYQIHKQSEAQFQAINDMLAEEKASKCDAAEESCQAKCHLEKRLQAEILAHQGVRKKIEGLKLEAKRKDDEIGQYKEHIAELVLHSEAQSLLFQEKYNEMEHMVSRQRFGPHESYSETVPKTEKPSGRARGSSSPFRCISSIIQQMNSERDQEILVARQRIEELEGLVSCKQKEICLLTSRLAAVDTMTHDIIRELLGVKLDMTNYANLVDQEELQKLLIASQQQIEQSKAKDTELEALKEQLGHLILERDSLLDDMDQRKTDLLEAQLLVEQLEQREQMLEAQIEMLQLEKDSLQQKTLEMDETIELLARSNQPDINPRMGDNHHRGSSEFSRRLAQSDMLLSHARHEHSRRHAAGSSRTHHGRHR

SEQ ID NO: 39528 - protein, 430 aa, Zea mays subsp. mays
MALALAEENEAAAIEVRQTAEISKIYAEEKEEEVKILERSVEELEGTVTVLEEEVCNLKEEVRNYQIHKQSEAQFQAINDMLAEEKASKCDAAEESCQAKCHLEKRLQAEILAHQGVRKKIEGLKLEAKRKDDEIGQYKEHIAELVLHSEAQSLLFQEKYNEMEHMVSRQRFGPHESYSETVPKTEKPSGRARGSSSPFRCISSIIQQMNSERDQEILVARQRIEELEGLVSCKQKEICLLTSRLAAVDTMTHDIIRELLGVKLDMTNYANLVDQEELQKLLIASQQQIEQSKAKDTELEALKEQLGHLILERDSLLDDMDQRKTDLLEAQLLVEQLEQREQMLEAQIEMLQLEKDSLQQKTLEMDETIELLARSNQPDINPRMGDNHHRGSSEFSRRLAQSDMLLSHARHEHSRRHAAGSSRTHHGRHR

SEQ ID NO: 39529 - protein, 350 aa, Zea mays subsp. mays
MLAEEKASKCDAAEESCQAKCHLEKRLQAEILAHQGVRKKIEGLKLEAKRKDDEIGQYKEHIAELVLHSEAQSLLFQEKYNEMEHMVSRQRFGPHESYSETVPKTEKPSGRARGSSSPFRCISSIIQQMNSERDQEILVARQRIEELEGLVSCKQKEICLLTSRLAAVDTMTHDIIRELLGVKLDMTNYANLVDQEELQKLLIASQQQIEQSKAKDTELEALKEQLGHLILERDSLLDDMDQRKTDLLEAQLLVEQLEQREQMLEAQIEMLQLEKDSLQQKTLEMDETIELLARSNQPDINPRMGDNHHRGSSEFSRRLAQSDMLLSHARHEHSRRHAAGSSRTHHGRHR

SEQ ID NO: 39530 - DNA, 2174 bp, Zea mays subsp. mays
ggacgactcgaccttcccgtctgcttcggaatgccctccaacttccaaagggagactctgacgttcgaggtggtcgggttccgaggaacctaccatgcggttctgggaaggccatgctacgcgaagttcatggccgtccccaactacacctacctgaagctcaagatgctgggccccaacggggtcatcaccgtcggccccacgtacaagcacgcgttcgaatgcgacgtggagtgcgtggagtacgccgaggccctcgccgagtccgaggccctcatcgccgacctggaaagcctctccaaagaggtgccagacgtgaagcgtcatgccggcaacttcgagccagtggagacggttaaagccgtccccctcgaccccagcggcgcgcctccaagcagatccgtatcggctccgggctcgatcctaaataggaagcagtgctcgtcgacttcctccgcgcgaacgccgacgtcttcgcgtggagtccctcggacatgcccggcataccgagggatgtcgccgagcactcgctggatattcgggccggagcccgacccgtcaagcagcctctgcgccgattcgacgaggagaagcgcagagcgataggcgaggagatccacaagctaatggcggcagggttcatcaaagaggtattccatcccgaatggcttgccaaccatgtgcttgtgagaaagaaaggggggaaatggcggatgtgtgtagactacactggtctcaacaaagcatgtccgaaggttccctaccctctgcctcgcatcgatcaaatcgtggtttccaccgctggctgcgaaaccctgtctttcctcgatgcctactcagggtatcatcaaattagaatgaaagagtccgaccagctcgcgacttctttcatcacgcccttcggcatgtattgctatgtcaccatgccattcggcttgaggaatgcgggcgcgacgtaccagcggtgcatgaaccatgtgttcggcgaacacatcggtcgcacggtcgaggcctacatcgatgacatcatagtcaagacgaggaaagcttccgacctcctttccgaccttgaagtgacattccgatgtctcaaggtgaaaggcgtcaagctcaatcccgagaagtgtgtcttcggggtgccccgaggcatgctcttggggttcatcgtctccgagcggggcatcgaagccaacccggagaagatcgcagccatcaccagcatggggcccatcaaggacttgaaaggcgtacaaagggtcatgggatgtctcgcggctctgagccgcttcatctcacgcctcggcgaaagaggtctgcctctgtaccgcctcttaaggaaggccgagtgcttcacttggacccctgaggccgaggaagctctcgggaacttgaaggcactcctcacaaaggcgcctatcttggtgcctccagctgccggagaagccctcttggtctacgtcgccgcgaccactcaggtggtcagcgccgcgattgtggtcgagaggcaagaagaggggcatgcattgcccgttcagaggccagtttacttcgtcagcgaggtactgtctgaaaccaagatccgctacccacaagttcagaagatgctgtatgcagtgatcctgacgcggcggaagttgcgacactacttcgagtctcatccggtaactgtggtgtcatccttccccctgggggagatcatccagtgccgagaggcctcgggcaggattgcaaagtgggcggtggaaatcatgggcgagacaatctcgttcgcccctcggaaggccatcaagtcccaggtcttggcggacttcgtggccgaatgggtcgatacccagctaccgacggctccgatccaaccggagctctggaccatgtttttcgacgggtcgctgatgaagacaggagccggcgcaggcctactcttcatctcgcccctcgggaaacacctacgctatgtgctacgcctccatttcccggcgtccaacaatgtggctgagtatgaagctctggtcaacgggttgcggatcgccatcgagctaggggtcaggcgcctcgacgcccgcggtgactcgcagctcgtcatcgaccaagtcatgaagaactcccactgccgcgacccgaagatggaggcctactgcgatgaggttcggcgcctggaagacaagttctacggg

SEQ ID NO: 39531 - protein, 560 aa, Zea mays subsp. mays
MPGIPRDVAEHSLDIRAGARPVKQPLRRFDEEKRRAIGEEIHKLMAAGFIKEVFHPEWLANHVLVRKKGGKWRMCVDYTGLNKACPKVPYPLPRIDQIVVSTAGCETLSFLDAYSGYHQIRMKESDQLATSFITPFGMYCYVTMPFGLRNAGATYQRCMNHVFGEHIGRTVEAYIDDIIVKTRKASDLLSDLEVTFRCLKVKGVKLNPEKCVFGVPRGMLLGFIVSERGIEANPEKIAAITSMGPIKDLKGVQRVMGCLAALSRFISRLGERGLPLYRLLRKAECFTWTPEAEEALGNLKALLTKAPILVPPAAGEALLVYVAATTQVVSAAIVVERQEEGHALPVQRPVYFVSEVLSETKIRYPQVQKMLYAVILTRRKLRHYFESHPVTVVSSFPLGEIIQCREASGRIAKWAVEIMGETISFAPRKAIKSQVLADFVAEWVDTQLPTAPIQPELWTMFFDGSLMKTGAGAGLLFISPLGKHLRYVLRLHFPASNNVAEYEALVNGLRIAIELGVRRLDARGDSQLVIDQVMKNSHCRDPKMEAYCDEVRRLEDKFYG

SEQ ID NO: 39532 - protein, 516 aa, Zea mays subsp. mays
MAAGFIKEVFHPEWLANHVLVRKKGGKWRMCVDYTGLNKACPKVPYPLPRIDQIVVSTAGCETLSFLDAYSGYHQIRMKESDQLATSFITPFGMYCYVTMPFGLRNAGATYQRCMNHVFGEHIGRTVEAYIDDIIVKTRKASDLLSDLEVTFRCLKVKGVKLNPEKCVFGVPRGMLLGFIVSERGIEANPEKIAAITSMGPIKDLKGVQRVMGCLAALSRFISRLGERGLPLYRLLRKAECFTWTPEAEEALGNLKALLTKAPILVPPAAGEALLVYVAATTQVVSAAIVVERQEEGHALPVQRPVYFVSEVLSETKIRYPQVQKMLYAVILTRRKLRHYFESHPVTVVSSFPLGEIIQCREASGRIAKWAVEIMGETISFAPRKAIKSQVLADFVAEWVDTQLPTAPIQPELWTMFFDGSLMKTGAGAGLLFISPLGKHLRYVLRLHFPASNNVAEYEALVNGLRIAIELGVRRLDARGDSQLVIDQVMKNSHCRDPKMEAYCDEVRRLEDKFYG

SEQ ID NO: 39533 - protein, 487 aa, Zea mays subsp. mays
MCVDYTGLNKACPKVPYPLPRIDQIVVSTAGCETLSFLDAYSGYHQIRMKESDQLATSFITPFGMYCYVTMPFGLRNAGATYQRCMNHVFGEHIGRTVEAYIDDIIVKTRKASDLLSDLEVTFRCLKVKGVKLNPEKCVFGVPRGMLLGFIVSERGIEANPEKIAAITSMGPIKDLKGVQRVMGCLAALSRFISRLGERGLPLYRLLRKAECFTWTPEAEEALGNLKALLTKAPILVPPAAGEALLVYVAATTQVVSAAIVVERQEEGHALPVQRPVYFVSEVLSETKIRYPQVQKMLYAVILTRRKLRHYFESHPVTVVSSFPLGEIIQCREASGRIAKWAVEIMGETISFAPRKAIKSQVLADFVAEWVDTQLPTAPIQPELWTMFFDGSLMKTGAGAGLLFISPLGKHLRYVLRLHFPASNNVAEYEALVNGLRIAIELGVRRLDARGDSQLVIDQVMKNSHCRDPKMEAYCDEVRRLEDKFYG

SEQ ID NO: 39534 - DNA, 2228 bp, Zea mays subsp. mays
atcacagtgcgggcggcgggcgccactctcacacctaccaggaaaccaatcaaaacttaaaaccaatcgaaattagaccggcgacgaggattagcgctcgccggcgatggattctgactacggcgtgcctcgcgagctctcggaggtgcagaagaagcgcacgctctaccagcccgagctgcccccctgcctccagggcaccactgtcagggtggagtatggtgatgctgcaattgcagctgacccggcaggtgctcatgtgatcagccatgcattccctcatacctatgcgcagcctattgctcattttctcaggaagacagctgttgtccctgatgctaaggtcatatctgaacaccaggcggtcagggttggcattgtcttctgtggcagacaatccccaggaggccacaatgttgtttgggggctctatgaggctatcaaggcccacaaccaaaacagcaaactcattggtttccttggtggatcagatggtctgctagcacagagaaccttggagatcactgataaagttattgcttcatataaaaatcaaggtggatatgacatgcttggtcgaacaaaggatcagattaggacgacagagcaggtcaatggtgctatggctagttgccaagctttgaagttggatgctctggttatcattggaggtgtcacttccaacactgatgctgctcaacttgccgagacatttgctgaggcaaagtgtgcaacaaaggttgtaggtgttcctgtaactttaaatggggaccttaagaaccagtttgttgagacaaccgttggctttgacaccatatgcaaggtgaacgcacaacttatcagcaatgtatgcactgatgctctatctgctgagaagtattactactttattcgcctgatgggacgcaaggcttctcatgtggcattggaatgtgctcttcaatcacatccaaacatggttatcctaggagaggaggtggctgcttccaaacttacaatttttgatattacgaagcagatttgtgatgcagttcaggcaagggctgaaaaagacaagaaccatggggttattcttattcctgagggccttgtggagagtattcctgaactatatgctctgcttcaggaaatccatggcctccatggcaaaggtgtttctgttgagaatatctcttctcagctttcaccttgggcatctgcactctttgagtttttgccccctttaatcaggaagcagctactactacatcctgaatctgatgattcagctcaactttcccagattgagactgaaaagctgctagcccagttagttgagactgagatgaacagacgtttgaaggagggcacttacaaaggaaagaagtttaatgcaatctgtcacttctttggctaccaagctaggggagcactgccttcaaagtttgattgcgattatgcctacgttttggggcatgtgtgctaccacatcatagctgccggattgaacagttacatggctacggtgacaaatcttaagaatccagtgaacaagtggcgatgcggcgcgactcctatttcgtctatgatgactgtgaagcgatggtcgcgtggcccttcagccacccaaattggaaagcccgctgttcacatggctagcgttgacttgaaaggaaaagcatacgatgtgttgagacagaattcttccagctttttgttggaagatgtctacagaaacccaggcccgctccagtttgaaggaccaggtgccgattcaaagcctatttcattgtgcgttgaggatcaagactatatgggcagaataaaaaagttgcaggaatacttggagaaggtgaagaggattgtgaagcctgggtgctcgcaggatgttcttaaagcggcgctgagtgccatgtcttctgtgacggaaacactgaacatcatgacttcatcttctaccggccagactccactgagtcattaggtaccatttcatggtatggatcataatccccacttttttcagtggtggcgattaacgagtttaggaacagcaaccctggtatcatacgggttattcttttgtagccttttggagagttctatcggttttggattcggtagtttatgaaggcttgttgatgagtttgagctcgaatagcttttgaaacagccggatgatgccatctttaataaaccaaattctgtgactgcattcacatttctgtcagtcacctgagtgagaaaag

SEQ ID NO: 39535 - protein, 618 aa, Zea mays subsp. mays
MDSDYGVPRELSEVQKKRTLYQPELPPCLQGTTVRVEYGDAAIAADPAGAHVISHAFPHTYAQPIAHFLRKTAVVPDAKVISEHQAVRVGIVFCGRQSPGGHNVVWGLYEAIKAHNQNSKLIGFLGGSDGLLAQRTLEITDKVIASYKNQGGYDMLGRTKDQIRTTEQVNGAMASCQALKLDALVIIGGVTSNTDAAQLAETFAEAKCATKVVGVPVTLNGDLKNQFVETTVGFDTICKVNAQLISNVCTDALSAEKYYYFIRLMGRKASHVALECALQSHPNMVILGEEVAASKLTIFDITKQICDAVQARAEKDKNHGVILIPEGLVESIPELYALLQEIHGLHGKGVSVENISSQLSPWASALFEFLPPLIRKQLLLHPESDDSAQLSQIETEKLLAQLVETEMNRRLKEGTYKGKKFNAICHFFGYQARGALPSKFDCDYAYVLGHVCYHIIAAGLNSYMATVTNLKNPVNKWRCGATPISSMMTVKRWSRGPSATQIGKPAVHMASVDLKGKAYDVLRQNSSSFLLEDVYRNPGPLQFEGPGADSKPISLCVEDQDYMGRIKKLQEYLEKVKRIVKPGCSQDVLKAALSAMSSVTETLNIMTSSSTGQTPLSH

SEQ ID NO: 39536 - protein, 464 aa, Zea mays subsp. mays
MLGRTKDQIRTTEQVNGAMASCQALKLDALVIIGGVTSNTDAAQLAETFAEAKCATKVVGVPVTLNGDLKNQFVETTVGFDTICKVNAQLISNVCTDALSAEKYYYFIRLMGRKASHVALECALQSHPNMVILGEEVAASKLTIFDITKQICDAVQARAEKDKNHGVILIPEGLVESIPELYALLQEIHGLHGKGVSVENISSQLSPWASALFEFLPPLIRKQLLLHPESDDSAQLSQIETEKLLAQLVETEMNRRLKEGTYKGKKFNAICHFFGYQARGALPSKFDCDYAYVLGHVCYHIIAAGLNSYMATVTNLKNPVNKWRCGATPISSMMTVKRWSRGPSATQIGKPAVHMASVDLKGKAYDVLRQNSSSFLLEDVYRNPGPLQFEGPGADSKPISLCVEDQDYMGRIKKLQEYLEKVKRIVKPGCSQDVLKAALSAMSSVTETLNIMTSSSTGQTPLSH

SEQ ID NO: 39537 - protein, 446 aa, Zea mays subsp. mays
MASCQALKLDALVIIGGVTSNTDAAQLAETFAEAKCATKVVGVPVTLNGDLKNQFVETTVGFDTICKVNAQLISNVCTDALSAEKYYYFIRLMGRKASHVALECALQSHPNMVILGEEVAASKLTIFDITKQICDAVQARAEKDKNHGVILIPEGLVESIPELYALLQEIHGLHGKGVSVENISSQLSPWASALFEFLPPLIRKQLLLHPESDDSAQLSQIETEKLLAQLVETEMNRRLKEGTYKGKKFNAICHFFGYQARGALPSKFDCDYAYVLGHVCYHIIAAGLNSYMATVTNLKNPVNKWRCGATPISSMMTVKRWSRGPSATQIGKPAVHMASVDLKGKAYDVLRQNSSSFLLEDVYRNPGPLQFEGPGADSKPISLCVEDQDYMGRIKKLQEYLEKVKRIVKPGCSQDVLKAALSAMSSVTETLNIMTSSSTGQTPLSH

SEQ ID NO: 39538 - DNA, 2082 bp, Zea mays subsp. mays
gcggcgcgcccgagcgcgtcgtcgcgggtggagaaggccacgagccacctgctcatggggcccgactgggccgtcaacctcgaaatctgcgacatcctcaacgccgacgtatggcaaacaaaggatgtggtgaaggcagtgaaaaagagattgcagaacaaggacccaaaggttcagttttttgctttaacgcttttggagacaatgatgaagaactgtggtgaatatgttcagtttgaagttgctgaacaacatgttctgcaagaaatggttaaaattatccagaagaagaatgatatgcaggtaagggacaaaatattattgcttttggactcctggcaagaggcatttggaggacctggaagtaaatacccacaatatcattgggcataccttgaagtaaagacgacaggtgtggtgttcccaaaacgtcctatggatgccccaccaatatttactcctccagctacacataattctgagacctatggttcacccagatattctgcgggaagtctaagtgacagaatgtcctcagatgttgagactctgagtttaggagatttgaataagattcgaaatgtgacagacctactgaatgatatggtgtatgctttaaacccatctgatcgaatggctattaacgatgaaattatcacagatcttgtgacccagtgtcgctcaaatcaacaaaagcttctgcagtttgtcagttcatcagggaacgaacagttactaaagcaaggactggagacaaatgatctcttacaaagcgtactttcaaagtatgatgctgtggcctctggtgctcctttggcggttgaagcatctgtgagagaggcaatcgaggctcctgcagtaaagtcatatgcaccccctgaacataatgataatgttaacgaagaggaagatgagtttgcccagctagctcaaaggaaaaacaaatccgtcgtaagtagtagcgacgatgcatcatccagcactttgggggaccttgcccttgtacccattgatcaagcagtttcagaatcgccatcttctgttgcaagcaatgcgctggttcttcttgatcctgctcccagtactagcactgaatcaaaagagctggacatgatcgaccttctaagcctcaccttgtgcagccctactcctgaaacttcaacagattcttcagcacaggatcaaaatggaccccagcaacctgcagttacacataatcaaaaagggcttcaggaacctacagttacaaatgggcaacaatatccttctagtgagccacagtatccttcaaactaccagcctcacactgcaaaccaggcatatgctccacagaccagcaactatgtggcaccttgggcccagaccggagcatatccacctcagcctccggcatatgcatctggctatgcctaccctgcaccgccatgggtggcgcctacacatcctgttgattctaacccttttctttcggtcaattaccaagatccacgccctgctgccacttctgttgctcaaacagcaacatatgcacctcccccagcttcatatcccccttcaatatcttatgcacagtttgcaaccccccagtcaattcagcatagcaattctgtggcttcaccgagcaatggtcagattgcaaatcaagcacaaatgaatgtgaatcaacaaccaaaagattcttcggcagcatctagcagaccatactacatacctgataatctattcagtgatttgatcgatgcaaaaagttttggcggtggaaacaagatgggcgggcccactacaatgggtagctcaaatggtggccagcctatgattggtggaaagaaatagggttatttgtctatatatatacagctgatggtgatcggtagctgccttgttatttattatgattactttgtctggtgtacatttgtacttgtatatcgccattcccccttttgacagatttggctgcattggttgattcgtgggtgcaactgttaagtttaacagagatatggacaattgctcatgtacataaatgattagcatttgctccactgaggtggatggttgtgatgaaatctgttggtattg

SEQ ID NO: 39539 - protein, 610 aa, Zea mays subsp. mays
AARPSASSRVEKATSHLLMGPDWAVNLEICDILNADVWQTKDVVKAVKKRLQNKDPKVQFFALTLLETMMKNCGEYVQFEVAEQHVLQEMVKIIQKKNDMQVRDKILLLLDSWQEAFGGPGSKYPQYHWAYLEVKTTGVVFPKRPMDAPPIFTPPATHNSETYGSPRYSAGSLSDRMSSDVETLSLGDLNKIRNVTDLLNDMVYALNPSDRMAINDEIITDLVTQCRSNQQKLLQFVSSSGNEQLLKQGLETNDLLQSVLSKYDAVASGAPLAVEASVREAIEAPAVKSYAPPEHNDNVNEEEDEFAQLAQRKNKSVVSSSDDASSSTLGDLALVPIDQAVSESPSSVASNALVLLDPAPSTSTESKELDMIDLLSLTLCSPTPETSTDSSAQDQNGPQQPAVTHNQKGLQEPTVTNGQQYPSSEPQYPSNYQPHTANQAYAPQTSNYVAPWAQTGAYPPQPPAYASGYAYPAPPWVAPTHPVDSNPFLSVNYQDPRPAATSVAQTATYAPPPASYPPSISYAQFATPQSIQHSNSVASPSNGQIANQAQMNVNQQPKDSSAASSRPYYIPDNLFSDLIDAKSFGGGNKMGGPTTMGSSNGGQPMIGGKK

SEQ ID NO: 39540 - protein, 592 aa, Zea mays subsp. mays
MGPDWAVNLEICDILNADVWQTKDVVKAVKKRLQNKDPKVQFFALTLLETMMKNCGEYVQFEVAEQHVLQEMVKIIQKKNDMQVRDKILLLLDSWQEAFGGPGSKYPQYHWAYLEVKTTGVVFPKRPMDAPPIFTPPATHNSETYGSPRYSAGSLSDRMSSDVETLSLGDLNKIRNVTDLLNDMVYALNPSDRMAINDEIITDLVTQCRSNQQKLLQFVSSSGNEQLLKQGLETNDLLQSVLSKYDAVASGAPLAVEASVREAIEAPAVKSYAPPEHNDNVNEEEDEFAQLAQRKNKSVVSSSDDASSSTLGDLALVPIDQAVSESPSSVASNALVLLDPAPSTSTESKELDMIDLLSLTLCSPTPETSTDSSAQDQNGPQQPAVTHNQKGLQEPTVTNGQQYPSSEPQYPSNYQPHTANQAYAPQTSNYVAPWAQTGAYPPQPPAYASGYAYPAPPWVAPTHPVDSNPFLSVNYQDPRPAATSVAQTATYAPPPASYPPSISYAQFATPQSIQHSNSVASPSNGQIANQAQMNVNQQPKDSSAASSRPYYIPDNLFSDLIDAKSFGGGNKMGGPTTMGSSNGGQPMIGGKK

SEQ ID NO: 39541 - protein, 542 aa, Zea mays subsp. mays
MMKNCGEYVQFEVAEQHVLQEMVKIIQKKNDMQVRDKILLLLDSWQEAFGGPGSKYPQYHWAYLEVKTTGVVFPKRPMDAPPIFTPPATHNSETYGSPRYSAGSLSDRMSSDVETLSLGDLNKIRNVTDLLNDMVYALNPSDRMAINDEIITDLVTQCRSNQQKLLQFVSSSGNEQLLKQGLETNDLLQSVLSKYDAVASGAPLAVEASVREAIEAPAVKSYAPPEHNDNVNEEEDEFAQLAQRKNKSVVSSSDDASSSTLGDLALVPIDQAVSESPSSVASNALVLLDPAPSTSTESKELDMIDLLSLTLCSPTPETSTDSSAQDQNGPQQPAVTHNQKGLQEPTVTNGQQYPSSEPQYPSNYQPHTANQAYAPQTSNYVAPWAQTGAYPPQPPAYASGYAYPAPPWVAPTHPVDSNPFLSVNYQDPRPAATSVAQTATYAPPPASYPPSISYAQFATPQSIQHSNSVASPSNGQIANQAQMNVNQQPKDSSAASSRPYYIPDNLFSDLIDAKSFGGGNKMGGPTTMGSSNGGQPMIGGKK

SEQ ID NO: 39542 - DNA, 697 bp, Zea mays subsp. mays
atcctctcactgcctcttttctcactcactgttacttcgctaaaaccctaatttcgccattcccttctctaagacatttagaaatggctttctgcaacaaacttagcggtatcttgagacaaggggtttctcagagctcaaatggtccagttacatctatgcttggctctcttcgttacatgtcctctaagctttttgttggtggtctctcttggggaactgatgacagctccttaaagcaagctttcactagctttggtgaagtcacagaagcaacggtgattgcagacagagagacagggaggtcgaggggattcggatttgttagcttcagctgtgaggattctgctaacaatgccataaaagaaatggatggaaaggagctgaatggtaggcaaatccgtgtgaatcttgcaaccgaaagatcgagtgccccgagatcatcatttggtggtggtggcggttacggtggtggcggtggtggtggctactaaagcaaacaagccagaggatttgagagagagaggagcctcagaactttcagtagttagttagtttgtttgtttcctctttgtttaactgcaaataaccttaactggttttgttaaacttatttagccctgttttttggttgtgtctgaataccgtagtattgttgctccatcttctgcaaatctattagcatcgagttcgattc

SEQ ID NO: 39543 - protein, 163 aa, Zea mays subsp. mays
PLTASFLTHCYFAKTLISPFPSLRHLEMAFCNKLSGILRQGVSQSSNGPVTSMLGSLRYMSSKLFVGGLSWGTDDSSLKQAFTSFGEVTEATVIADRETGRSRGFGFVSFSCEDSANNAIKEMDGKELNGRQIRVNLATERSSAPRSSFGGGGGYGGGGGGGY

SEQ ID NO: 39544 - protein, 136 aa, Zea mays subsp. mays
MAFCNKLSGILRQGVSQSSNGPVTSMLGSLRYMSSKLFVGGLSWGTDDSSLKQAFTSFGEVTEATVIADRETGRSRGFGFVSFSCEDSANNAIKEMDGKELNGRQIRVNLATERSSAPRSSFGGGGGYGGGGGGGY

SEQ ID NO: 39545 - protein, 111 aa, Zea mays subsp. mays
MLGSLRYMSSKLFVGGLSWGTDDSSLKQAFTSFGEVTEATVIADRETGRSRGFGFVSFSCEDSANNAIKEMDGKELNGRQIRVNLATERSSAPRSSFGGGGGYGGGGGGGY

SEQ ID NO: 39546 - DNA, 3495 bp, Zea mays subsp. mays
tcgtcgtttgtgccgagtgggttggttatcgagagcgtaagtggttcatctgactagactattttagctgtccgatcgaaagcggtgatggccgagtgcccgctgtgcgggacggcgtcgcgccgaattcatagccgatacgccagacaagtcgcggacctgccctgcgcgggtaggcagatacgtctgtgggtgatcgcgcgacggttcctgtgcgagattccgcattgtcgtcggagaattttcgccgagcggttcggtcaggatgtcgtcccggtgcagtcacgccgaacagccaggttggaatgcatcgtcgtcgccggcattgatgattgggccttccggaacaaccattgctacggaacaatcgtttgcgatctggagcgacggcggatcgtgaggttgctgctcaatcgcgagattgcaacggtgcaggcttggctatccgaccatcccgggatcaaaataagtatcgcgcgatcgtggcggcggctatggcgaggctgccgcaaaggcgctgcctgaggtcatccaggttgccgatcgctggcacctgatggaaaacgcgagcgcagccttcctcggtgccgtgcgccggtcgatgcgcgtgatctgtacggcaatcggcgctacgatgatcaatccagagttgctcacctgtgcggaacgactgcaatataacggctatctgcggcgcgaggagaccaacgccgcgatcatggcgctcgtcaaggatggcgtgccgcttaaggagatcgtccgtcgaaccgggtacagccgtaaactcactcgtcaggtcagtcgaggcgagagcacggatatcttccgaacgcggcagagcacgctcaacgcgcacttacccttcatcgatgcccaatgggctacgggctgccgtaacggcgcggagctctggcgtcgtctgcaggctcacggcttccgaggctagttacgtgtcgtcagcgaatggacgacacggcggcgacgtgcggagaaggcaaccaacaaacaactgcaaaaggtgccttctgcgcgaacgatcgtacgattgacaaggaagggcaggcgcaagggttcgaccccaagagattgatggtcggcacaagcgcctttcactctcgaaaatgaagctgttgtttcgggcgggagatcgaagcgactgcgcgatcgacgcggcaaaagcgccagactgatcagacgcgacgtagctctgtgcttcgcgatgagaagctttttccgccccctcaacccggttgctatcagcattgagccacgaaggaagctttcaacataggcaagggagtgataagcctacattgcgaaattccctgacagctggcccagcatcggtctcgatgacgaggaattgcgtgtttaattccgcaacggcatgacaagggcatgggacatgggcttaggttggtgccgaacccaagagtgatttcgacccccttcggacaatatgtttgggaaggacaagcagattctggttcttataccattagagaggaaaaagacccggagcagctcattcctaggggaactcgccttactctctatctcaagtgtgatgataagggttttgctcaccctgagaggattcaaaaacttctaaagacttactctcagtttgtttcctttcccatttacacatgggaagagaaaggcttcacaaaagaggtcgaggttgatgaagatccagcggaagcccaaaaaaaaggtgatgattcagcggaaaccaaaactgagcctaagaaaaagaccaaaactgttattgagaagtattgggattgggagctttcaaatgagacacaacctatttggcttcggaaccccaaagaggtttcaactgaggaatacaatgattttttcaagaaaaccttcaatgagtacttgggccctttggcatcatcacacttcactacagagggtgaggtagaatttaggtcaattctttttgttcctgctacaaggaaggaagatgtaactgctgatagtaggaagaccaagaatatcagactatatgttaagcgtgtattcatatcagatgactttgatggagaattgttcccaagatatttgagctttgtgaagggtgttgttgactcaaatgaccttccattgaatgtttctcgtgagaatcttcaagaaagtcgaattgttcgtataatgagaaaaaggctggtgcggaaagcctttgatatgatacttggcatttcttgcagtgaaaatagagatgattatgaaaggttctgggagaactttggaaaatttttaaagctgggtgccatggaagataaggaaaatcacaagagaattgctcctttgttgcgcttcttctcttctcaaagcaacaatgaattaattagcttggatgaatatgtggaaaacatgaaacctgagcagaaggacatttacttcattgctgcagatagtatgagcagtgccataaatgctcctttcttagagagactaacagaaaaagactatgaggttctacttttggtcgaccctatggatgaattggctatccagaatctgagctcctacaaggataagaaatttgtggacattagcaaagaagatttggatttaggtgataacaatgaggaaagagagaaggagataaagcaggagttcagccaagcctgtgactggataaagaatcgcttgggtgacaaggttgcacgtgttgacatatctaatcgtctcaggtcatcgccatgtgttcttgttgcagcgaagtttggttggtcagccaatatggaaaggctgatgagagcacagtctatgggtgatacagcctctttggatttcatgcgttcgaggaaagtttttgaaataaacccagagcatgagataatcaaggccttgaatgtggcatgcaggaataaccctgatgatcctgaagccctaaaggctctggatgttctctttgaaactgctatgatttcaagtggcttttcgcctgacaacccggcggagctcagtgggaagatttacgagatgatgacctctgccatcgctggcaaatggtcctcacagccacaggcgcaggcgcaacctgccgacccaatcccacagcacgacgcacctgtgaggtcagacgagccgcttgaagctcaagtggtggaggcagagcccgttgaggctggtcagcagaagtgagggcctgttcgtgcagaatctttgtacggagtagttttgaaccgttgtgcacaacatggctgagaatttcgagtatatgttttgacggcctgtatctgtgtcatgagctgttactggtaatgtaagacgtattggttagaaattagatgattaggaataattgggtagctggactacttgaactggttcctgaaccatcaggagggttatggactcatggttagcttctactgcgtccttgggggcagtagtaattttgaagccaattcgttgttttgtaggctctatttctgtttggctttaatacttatcggtttctactgtttctac

SEQ ID NO: 39547 - protein, 588 aa, Zea mays subsp. mays
MGHGLRLVPNPRVISTPFGQYVWEGQADSGSYTIREEKDPEQLIPRGTRLTLYLKCDDKGFAHPERIQKLLKTYSQFVSFPIYTWEEKGFTKEVEVDEDPAEAQKKGDDSAETKTEPKKKTKTVIEKYWDWELSNETQPIWLRNPKEVSTEEYNDFFKKTFNEYLGPLASSHFTTEGEVEFRSILFVPATRKEDVTADSRKTKNIRLYVKRVFISDDFDGELFPRYLSFVKGVVDSNDLPLNVSRENLQESRIVRIMRKRLVRKAFDMILGISCSENRDDYERFWENFGKFLKLGAMEDKENHKRIAPLLRFFSSQSNNELISLDEYVENMKPEQKDIYFIAADSMSSAINAPFLERLTEKDYEVLLLVDPMDELAIQNLSSYKDKKFVDISKEDLDLGDNNEEREKEIKQEFSQACDWIKNRLGDKVARVDISNRLRSSPCVLVAAKFGWSANMERLMRAQSMGDTASLDFMRSRKVFEINPEHEIIKALNVACRNNPDDPEALKALDVLFETAMISSGFSPDNPAELSGKIYEMMTSAIAGKWSSQPQAQAQPADPIPQHDAPVRSDEPLEAQVVEAEPVEAGQQK

SEQ ID NO: 39548 - protein, 332 aa, Zea mays subsp. mays
MRKRLVRKAFDMILGISCSENRDDYERFWENFGKFLKLGAMEDKENHKRIAPLLRFFSSQSNNELISLDEYVENMKPEQKDIYFIAADSMSSAINAPFLERLTEKDYEVLLLVDPMDELAIQNLSSYKDKKFVDISKEDLDLGDNNEEREKEIKQEFSQACDWIKNRLGDKVARVDISNRLRSSPCVLVAAKFGWSANMERLMRAQSMGDTASLDFMRSRKVFEINPEHEIIKALNVACRNNPDDPEALKALDVLFETAMISSGFSPDNPAELSGKIYEMMTSAIAGKWSSQPQAQAQPADPIPQHDAPVRSDEPLEAQVVEAEPVEAGQQK

SEQ ID NO: 39549 - protein, 321 aa, Zea mays subsp. mays
MILGISCSENRDDYERFWENFGKFLKLGAMEDKENHKRIAPLLRFFSSQSNNELISLDEYVENMKPEQKDIYFIAADSMSSAINAPFLERLTEKDYEVLLLVDPMDELAIQNLSSYKDKKFVDISKEDLDLGDNNEEREKEIKQEFSQACDWIKNRLGDKVARVDISNRLRSSPCVLVAAKFGWSANMERLMRAQSMGDTASLDFMRSRKVFEINPEHEIIKALNVACRNNPDDPEALKALDVLFETAMISSGFSPDNPAELSGKIYEMMTSAIAGKWSSQPQAQAQPADPIPQHDAPVRSDEPLEAQVVEAEPVEAGQQK

SEQ ID NO: 39550 - DNA, 1885 bp, Zea mays subsp. mays
atcctaatatgcatacaaacaatgaggcccagttatacggactggtggagcctaatgtacatccgcaagtattagcttcctcttctcaggggtacccttcagaaaacccggaagcagataatgctgtgcaagtcttcaggatgccagaatctaatgttcactcacaagttctcccttccacatctgaggtagcactgtattgttattttaaattgctctcctgcagtcccttttatattattattacttgtaatcatttggatatattcattaggcagcttaacttataacaatacatcgtagtctactagtcttggcccatcatcatgttgaccagggctgctagtgagtccagttttaatccacttagtttccacatttaataatctctacgtggttctcttgttattgcattattgcttctaaaatggttctgcttcaaggagttcaacacggggcactttgctggtttataattgaggaaaattagtctgctctgatataaaatttgagaatccagtcttggttttttgtgttttgtctcaggttgaacgatgactgacaattagactgccacaatttctgtcttctgttttcctagaacactcttctattcactgttgatcacagtataaatacataacctgttggccggctaagtcactcaggtagcaaaagtacatgaggctatctaccaattctaccaactaactgggccaaaccaccaaactacccatagagccaaaacctacaatttctgctactgttctacatacagtcagaggtgaaaacaaaggagcaggccctgtttcctgtacttctatggcaaaagaaaaagagtggatagtagctgattatctaacatattcttgcagtccaagaaaaaatgaagacaaatttgcttcctctttgtgtaacgcttagtgaatatcatgattaaattgtgacatgtgttgcaggctttaaatccacagattgtgagcaacagccctgtttcgatctcgtcacagcagcagcagcatatctcccagcaacaagccgcagcacagatgtaccctcaaatgcatgtgcagcattttccaaatttcatgccatatcgacaactctattctccagtttaccccatgcctatgccaaactattcgccaaatgtcccttatccatcaaatggaaataattatcttcagatgcccagtggaggttcacatttaactgcaggaagcgtgaagtatggagtttcacagtttaaaccactcccatctggtaacccttctggctatggaaattacactcatccagctggttttacaatgggttctcctggtgttattggagccacagttggtgttgatgatgtcaataggatgaagtacaaggacaacatttatgcctcaactccacaggtcgagacatctgacatctggattcagcaagctagagagatgccacctatgcaggttccttcatattacaacataccaggtcaagcaacaccaggtgcttttgtgccaaatccagcaaatgcatctttcaatgctacagctcaatcctctcatgtgcagttcccaggcttgtaccatcctcagcaacctccctctattgtaagtccgcaccccatggtgcatcaacaggtgccatcggccattggtcccaatgttggggttggggtggcagctccaggcccgcaagttggagcttatcagcaaccacagcttggccatatgaattggagacccagcttttgaagaaggtttcttaattatctgtaattagggggggtcacaagagcctttatgtaacaacagtaggctccttttaacaggaagcacctttgtttttagtgcagctctttctgatctatttaagctataacgaggtttttgtt

SEQ ID NO: 39551 - protein, 231 aa, Zea mays subsp. mays
MYPQMHVQHFPNFMPYRQLYSPVYPMPMPNYSPNVPYPSNGNNYLQMPSGGSHLTAGSVKYGVSQFKPLPSGNPSGYGNYTHPAGFTMGSPGVIGATVGVDDVNRMKYKDNIYASTPQVETSDIWIQQAREMPPMQVPSYYNIPGQATPGAFVPNPANASFNATAQSSHVQFPGLYHPQQPPSIVSPHPMVHQQVPSAIGPNVGVGVAAPGPQVGAYQQPQLGHMNWRPSF

SEQ ID NO: 39552 - protein, 227 aa, Zea mays subsp. mays
MHVQHFPNFMPYRQLYSPVYPMPMPNYSPNVPYPSNGNNYLQMPSGGSHLTAGSVKYGVSQFKPLPSGNPSGYGNYTHPAGFTMGSPGVIGATVGVDDVNRMKYKDNIYASTPQVETSDIWIQQAREMPPMQVPSYYNIPGQATPGAFVPNPANASFNATAQSSHVQFPGLYHPQQPPSIVSPHPMVHQQVPSAIGPNVGVGVAAPGPQVGAYQQPQLGHMNWRPSF

SEQ ID NO: 39553 - protein, 218 aa, Zea mays subsp. mays
MPYRQLYSPVYPMPMPNYSPNVPYPSNGNNYLQMPSGGSHLTAGSVKYGVSQFKPLPSGNPSGYGNYTHPAGFTMGSPGVIGATVGVDDVNRMKYKDNIYASTPQVETSDIWIQQAREMPPMQVPSYYNIPGQATPGAFVPNPANASFNATAQSSHVQFPGLYHPQQPPSIVSPHPMVHQQVPSAIGPNVGVGVAAPGPQVGAYQQPQLGHMNWRPSF

SEQ ID NO: 39554 - DNA, 670 bp, Zea mays subsp. mays
ttttttctccaatcggatccagtttcaagaacagtagaatcggacggaatctctcctacgccgcgatgtctctccgccgctctatcctcggtctccaccgccaaacccacaacctctccctctcaaaggcgtcacctttctcgatgagtaacatctcctccccgtccgccgccgtgagaaacccaatcggaagagaaatctcttcgatcccattttccctaacccagaaactgaaaccggactccgggaatcgttctcttgggcagtctgatctcgccaaattcgctcgtctcccgtcgtctcgagggtacagcaacgcatctctcgtacggaagatccctgttctgtttcacataaatgcagggatggaagaagttttggcggattacgttcaccaggagatgaccaggaatctgatggtgatgtctctgggcgtgttccagatcatcgttatcaaagatgtcatcgtgtttcttttcttctgagcaaggaatcatcttttgggggggggggggctcatgaactcgatcatctagtgagataaagtctcttcttgttattatcttttaatgaataatgaacattggtgcaatggcatctttaaccttccaagtttgctctgtttgattcagtttgtgtaaggctttaagtggaattctaagtgtgtttg

SEQ ID NO: 39555 - protein, 160 aa, Zea mays subsp. mays
FSPIGSSFKNSRIGRNLSYAAMSLRRSILGLHRQTHNLSLSKASPFSMSNISSPSAAVRNPIGREISSIPFSLTQKLKPDSGNRSLGQSDLAKFARLPSSRGYSNASLVRKIPVLFHINAGMEEVLADYVHQEMTRNLMVMSLGVFQIIVIKDVIVFLFF

SEQ ID NO: 39556 - protein, 139 aa, Zea mays subsp. mays
MSLRRSILGLHRQTHNLSLSKASPFSMSNISSPSAAVRNPIGREISSIPFSLTQKLKPDSGNRSLGQSDLAKFARLPSSRGYSNASLVRKIPVLFHINAGMEEVLADYVHQEMTRNLMVMSLGVFQIIVIKDVIVFLFF

SEQ ID NO: 39557 - protein, 113 aa, Zea mays subsp. mays
MSNISSPSAAVRNPIGREISSIPFSLTQKLKPDSGNRSLGQSDLAKFARLPSSRGYSNASLVRKIPVLFHINAGMEEVLADYVHQEMTRNLMVMSLGVFQIIVIKDVIVFLFF

SEQ ID NO: 39558 - DNA, 1028 bp, Zea mays subsp. mays
aaggatacatttagaaacagacaaccgctgataaacatgaggacggaggagaaagaagaaggagaagaagaagaagaagaacaacaacaatggccatcatcaagatcagctcacgaggttttactaattgttcttccatatctccactcactcttcgagcttctctccatgaccggcgtttcacgctccttaagagacgcgatcagagacgaaacagctttatggacaaagatcgttgttgaaccacccctgcgttctcgtctaaccgatgatattctacgggagatcacttccaaatccgccggaaaattaaacactctgattctccgacagtgtcttaggatcaccgacaagggacttcgacgtgtggtggacgcaaatcctctgataagaaagataattgtgcccggatgcactgaactgactccagaaggaatcattggatgcgttgaaagcttagcaaccgtggagacacttcacatcaacggcgtacatcgcttcactaaagaccatctctcagcactctccacttaccttcctcacgagggcgccatagatgtcgaggtctgtcccaaatgtgacctagtcaagatgattccctcatgctcaagagcgtcatgtaaccgtgggagaaggcaagaacgaaagtgcaggggatgctggttctgcgtccctagatgcacggagtgtgcagtgtgcctcggatcagacactgagattcaagaagcagcctgcggtggcgacagtctgtgtctcgaatgttggctcgtgcttccgaagtgcaggttctgcaataaaccttattgctcaagtcacagcagtctccgacatgatattgcaaccaatgatccttcgtctccgcccatgtttgaatgccaagcttgtcactacagggcaggtacaaacccatatgacgctttcgactatcaaatctaaaaaaaacttgtttttaaagccatacttgttactacgtacaatctttgttcatgttttgtatgaaaacattggagtatgaaatattatgagac

SEQ ID NO: 39559 - protein, 311 aa, Zea mays subsp. mays
KDTFRNRQPLINMRTEEKEEGEEEEEEQQQWPSSRSAHEVLLIVLPYLHSLFELLSMTGVSRSLRDAIRDETALWTKIVVEPPLRSRLTDDILREITSKSAGKLNTLILRQCLRITDKGLRRVVDANPLIRKIIVPGCTELTPEGIIGCVESLATVETLHINGVHRFTKDHLSALSTYLPHEGAIDVEVCPKCDLVKMIPSCSRASCNRGRRQERKCRGCWFCVPRCTECAVCLGSDTEIQEAACGGDSLCLECWLVLPKCRFCNKPYCSSHSSLRHDIATNDPSSPPMFECQACHYRAGTNPYDAFDYQI

SEQ ID NO: 39560 - protein, 299 aa, Zea mays subsp. mays
MRTEEKEEGEEEEEEQQQWPSSRSAHEVLLIVLPYLHSLFELLSMTGVSRSLRDAIRDETALWTKIVVEPPLRSRLTDDILREITSKSAGKLNTLILRQCLRITDKGLRRVVDANPLIRKIIVPGCTELTPEGIIGCVESLATVETLHINGVHRFTKDHLSALSTYLPHEGAIDVEVCPKCDLVKMIPSCSRASCNRGRRQERKCRGCWFCVPRCTECAVCLGSDTEIQEAACGGDSLCLECWLVLPKCRFCNKPYCSSHSSLRHDIATNDPSSPPMFECQACHYRAGTNPYDAFDYQI

SEQ ID NO: 39561 - protein, 255 aa, Zea mays subsp. mays
MTGVSRSLRDAIRDETALWTKIVVEPPLRSRLTDDILREITSKSAGKLNTLILRQCLRITDKGLRRVVDANPLIRKIIVPGCTELTPEGIIGCVESLATVETLHINGVHRFTKDHLSALSTYLPHEGAIDVEVCPKCDLVKMIPSCSRASCNRGRRQERKCRGCWFCVPRCTECAVCLGSDTEIQEAACGGDSLCLECWLVLPKCRFCNKPYCSSHSSLRHDIATNDPSSPPMFECQACHYRAGTNPYDAFDYQI

SEQ ID NO: 39562 - DNA, 675 bp, Zea mays subsp. mays
agaaacaaagatccaaagagaaaaatatctcaaaacacacaaaggaagaagaaagaaagaagaagaagatgccttcaagcacattctctggaactgtgagctcaccgaagctgtcagtggcagtggacatgggcaacccttttctcaacctcaccgttgatggtttcctcaagatcggagctgttggagtcacaaaatctcttgtggaagacacttacaaagccatcgacaaagggagtgtttccaagagcactcttgagcatgcgcttaagaagatgtgcaaagaaggtttttactggggatctgtggctggagtttatgttggaacagagtatggaatcgaacgtatccgtggcactagagattggaaaaacgcaatgctggcaggcgcggcgacaggagcagtgatctctgcggctactaacaaagggaaagacaaggtcgtgatcgatgccattatgggtggcgctcttgcaactgcgtctcagttccttaacaatcattatttctactgagttgtcaatcttccttttaggaccaagattggtttgttatatccaaatttggtccttatggtgtgggtttctttgtttgtttccaataaaaaagatgtattacttttgaatgaattgaatttgagtaacatgaacgttaagcaatggtctgtggtcttct

SEQ ID NO: 39563 - protein, 170 aa, Zea mays subsp. mays
KQRSKEKNISKHTKEEERKKKKMPSSTFSGTVSSPKLSVAVDMGNPFLNLTVDGFLKIGAVGVTKSLVEDTYKAIDKGSVSKSTLEHALKKMCKEGFYWGSVAGVYVGTEYGIERIRGTRDWKNAMLAGAATGAVISAATNKGKDKVVIDAIMGGALATASQFLNNHYFY

SEQ ID NO: 39564 - protein, 148 aa, Zea mays subsp. mays
MPSSTFSGTVSSPKLSVAVDMGNPFLNLTVDGFLKIGAVGVTKSLVEDTYKAIDKGSVSKSTLEHALKKMCKEGFYWGSVAGVYVGTEYGIERIRGTRDWKNAMLAGAATGAVISAATNKGKDKVVIDAIMGGALATASQFLNNHYFY

SEQ ID NO: 39565 - protein, 128 aa, Zea mays subsp. mays
MGNPFLNLTVDGFLKIGAVGVTKSLVEDTYKAIDKGSVSKSTLEHALKKMCKEGFYWGSVAGVYVGTEYGIERIRGTRDWKNAMLAGAATGAVISAATNKGKDKVVIDAIMGGALATASQFLNNHYFY

SEQ ID NO: 39566 - DNA, 1062 bp, Zea mays subsp. mays
atttcaaatttcatacacataaactaaagtctcatcctcagaatgacaggcagagaaattctccataagatgaagctgaaggctggattctgcggatctgaaacgggcagaggtaaaagcaggacgtggaagaacatctcccacggttttcactttgtcaagggcaaatcaaaccatccaatggaggactacgttgtgtctgagttcaaaaaagtggacaatcacgatttgggtttgtttgccatctttgacggtcacttgggacatgacgtggccaagtacttgcagaccaatctttttgacaacatactcaaagagaaggattttcggactgatatggacaaggctataaggaatgcatacatatcaacagatgcttttatattagagcagtcacttaaacttggcaaaggcggatcaactgctgtaactggaattctgattgatgggcaaaagctagtggttgctaacgttggagactcacgggcggtgatgtcaaagaatggtgttgcgtctcagctctcggttgatcacgaaccaagcaaggagcaaaaggaaatagagagccgtggcggctttgtgtccaatattccaggggacgttccaagagttgatggacaactagcggttgcgagggcgttcggagataagagcttaaagatacatctgagctcagaaccagacataacacaccagacaatcgatgatgagaccgagttcattgttttcgcgagtgatgggatttggaaggtgatgtcaaaccaagaagctgtggacgcgatcagaagcataaaagatccacatgaggcagccaaggagttgatagaagaagcaatctctaggaaaagcaaagatgacatctcctgtatcgttgtaagattctagtataaatttttcaccaatcaagtgtctaagagagataaaaagacatgtaaaagctcaagctatatgtgctatatatgtgaccaatataaagtctggtctcttgtaaaaccattgatgataaaatttcgccaaaatgtaaaagaaatttcgtgcaaatggttgttggtccattagtct

SEQ ID NO: 39567 - protein, 280 aa, Zea mays subsp. mays
MTGREILHKMKLKAGFCGSETGRGKSRTWKNISHGFHFVKGKSNHPMEDYVVSEFKKVDNHDLGLFAIFDGHLGHDVAKYLQTNLFDNILKEKDFRTDMDKAIRNAYISTDAFILEQSLKLGKGGSTAVTGILIDGQKLVVANVGDSRAVMSKNGVASQLSVDHEPSKEQKEIESRGGFVSNIPGDVPRVDGQLAVARAFGDKSLKIHLSSEPDITHQTIDDETEFIVFASDGIWKVMSNQEAVDAIRSIKDPHEAAKELIEEAISRKSKDDISCIVVRF

SEQ ID NO: 39568 - protein, 271 aa, Zea mays subsp. mays
MKLKAGFCGSETGRGKSRTWKNISHGFHFVKGKSNHPMEDYVVSEFKKVDNHDLGLFAIFDGHLGHDVAKYLQTNLFDNILKEKDFRTDMDKAIRNAYISTDAFILEQSLKLGKGGSTAVTGILIDGQKLVVANVGDSRAVMSKNGVASQLSVDHEPSKEQKEIESRGGFVSNIPGDVPRVDGQLAVARAFGDKSLKIHLSSEPDITHQTIDDETEFIVFASDGIWKVMSNQEAVDAIRSIKDPHEAAKELIEEAISRKSKDDISCIVVRF

SEQ ID NO: 39569 - protein, 234 aa, Zea mays subsp. mays
MEDYVVSEFKKVDNHDLGLFAIFDGHLGHDVAKYLQTNLFDNILKEKDFRTDMDKAIRNAYISTDAFILEQSLKLGKGGSTAVTGILIDGQKLVVANVGDSRAVMSKNGVASQLSVDHEPSKEQKEIESRGGFVSNIPGDVPRVDGQLAVARAFGDKSLKIHLSSEPDITHQTIDDETEFIVFASDGIWKVMSNQEAVDAIRSIKDPHEAAKELIEEAISRKSKDDISCIVVRF

SEQ ID NO: 39570 - DNA, 605 bp, Zea mays subsp. mays
agaagagaagaaatggctgcttcagtgatgctatcatcggtgacgttgaaaccggcgggtttcacggtggagaagatgtcagcgagaggattgccgtcgctcacaagaacttcattcaaaatcgtcgcgagcggtgtcaagaagatcaagaccgacaagccctttggagttaacggcagcatggacttgagggacggcgtcgacgcctccggcagaaagggaaagggatacggtgtttacaagttcgttgacaagtatggagctaacgtcgatggatacagtcctatctacaacgaggaggagtggtcaccaggtggtgatgtgtacaagggaggagtcactggattggctatttgggcggtaacactcgccggaattctcgccggaggagctcttcttgtgtacaacacaagtgctttggctcagtaaaaaatcttcaaaacatcatcatgtttctctacatgttttgtgtttattgtttctcttctctgtaatgctactttgaattttataaagaactctagtagcgtttgtgtaatacccatctttcagagatctcggtgtacaaaaacaagaagttgaatacagttttatagactgaactc

SEQ ID NO: 39571 - protein, 142 aa, Zea mays subsp. mays
RREEMAASVMLSSVTLKPAGFTVEKMSARGLPSLTRTSFKIVASGVKKIKTDKPFGVNGSMDLRDGVDASGRKGKGYGVYKFVDKYGANVDGYSPIYNEEEWSPGGDVYKGGVTGLAIWAVTLAGILAGGALLVYNTSALAQ

SEQ ID NO: 39572 - protein, 138 aa, Zea mays subsp. mays
MAASVMLSSVTLKPAGFTVEKMSARGLPSLTRTSFKIVASGVKKIKTDKPFGVNGSMDLRDGVDASGRKGKGYGVYKFVDKYGANVDGYSPIYNEEEWSPGGDVYKGGVTGLAIWAVTLAGILAGGALLVYNTSALAQ

SEQ ID NO: 39573 - protein, 133 aa, Zea mays subsp. mays
MLSSVTLKPAGFTVEKMSARGLPSLTRTSFKIVASGVKKIKTDKPFGVNGSMDLRDGVDASGRKGKGYGVYKFVDKYGANVDGYSPIYNEEEWSPGGDVYKGGVTGLAIWAVTLAGILAGGALLVYNTSALAQ

SEQ ID NO: 39574 - DNA, 803 bp, Zea mays subsp. mays
aagaaaaagcaagcccatcgtcctaccgtattagcaatggaggcagcagcaggagaggggccgacgacgacgatgaagacggtgtgcgtgaccggcgcggggggtttcgtggcctcgtggctcgtcgagcgcctcctcgccggcggacgatacaagatccacggcaccgtccgcgatcccggcgacgccaagaacgcgcacctgctggggctggacggcgccgcggagcggctgcggctgttcaaggccgacctgctcgacttcggcagcctggcggcggccattgcaggctgtgacggcgtcttccacgtggcctgccccgtccccgactataccctcaccgaccccgagaccgagctgctggctcctgccgtgacgggcaccatgaacatcctcagggcgtgctccgacgcccatgtcaggagggtcgtcgtggtctcctctctctcggctgtcatgataaaccctgactggggcgagtgcaaggtcatggacgaaggttgctggtctgatgtcgacctctgcagaactactaagcgaaatctcatcttttcctacatgactctaagggcatgtacaatgctgaaggcaactaccatctccaagtgttttgaggaatgcagaggcaagactgtgagaaaggatgttatgtactatatttaattcatacacaatctttatcactatgcatcgatcaagaatatattggatatttgtagccattttcttgcatgtttatggtggatactaaaataaggcatgtgaatttcatgtagaatcataaatataatttatatttatat

SEQ ID NO: 39575 - protein, 220 aa, Zea mays subsp. mays
KKKQAHRPTVLAMEAAAGEGPTTTMKTVCVTGAGGFVASWLVERLLAGGRYKIHGTVRDPGDAKNAHLLGLDGAAERLRLFKADLLDFGSLAAAIAGCDGVFHVACPVPDYTLTDPETELLAPAVTGTMNILRACSDAHVRRVVVVSSLSAVMINPDWGECKVMDEGCWSDVDLCRTTKRNLIFSYMTLRACTMLKATTISKCFEECRGKTVRKDVMYYI

SEQ ID NO: 39576 - protein, 208 aa, Zea mays subsp. mays
MEAAAGEGPTTTMKTVCVTGAGGFVASWLVERLLAGGRYKIHGTVRDPGDAKNAHLLGLDGAAERLRLFKADLLDFGSLAAAIAGCDGVFHVACPVPDYTLTDPETELLAPAVTGTMNILRACSDAHVRRVVVVSSLSAVMINPDWGECKVMDEGCWSDVDLCRTTKRNLIFSYMTLRACTMLKATTISKCFEECRGKTVRKDVMYYI

SEQ ID NO: 39577 - protein, 196 aa, Zea mays subsp. mays
MKTVCVTGAGGFVASWLVERLLAGGRYKIHGTVRDPGDAKNAHLLGLDGAAERLRLFKADLLDFGSLAAAIAGCDGVFHVACPVPDYTLTDPETELLAPAVTGTMNILRACSDAHVRRVVVVSSLSAVMINPDWGECKVMDEGCWSDVDLCRTTKRNLIFSYMTLRACTMLKATTISKCFEECRGKTVRKDVMYYI

SEQ ID NO: 39578 - DNA, 993 bp, Zea mays subsp. mays
cttacccttcgcggagatcggagaaaatggctgccaatttctgggaatcgtctcaatacaaacagcttttggaccaagaagaagtggatgtagttcaacctctcgacaaagaacgtggaatttcagtcgaggatttcaagctcatcaagttccatatgtctaatcatataatgaagttggctcagcacattaaagtgaggcaaagggttgtggctaccgctataacgtacatgagacgggtttataccaagaagagcatggtagagtttgagccccgtcttgttgctattgcatgcttgtacctggctttctaagctgaagagagcatagtccaggccaggaatcttgttttctacagcaaaagattgtatccggatgagtacaagtatgaactaaaagatatattaggaatggagatgagggtcttagaagcactggactattatctggttgtgtttcacccttaccggtcattatctgattttttgcaagatgctgcattgaacgatgtcaatatgaaccagtttacatggggaattgtcaacgatacttataagatggacctgattcttgtacaccctccttatcgcatagcgctagcgtgcatatacatagcaagtgtccagagagagaaagacatcaccgcatggcttcaagatcttaacgaggacatgaacttggtgaaggacattgccatggagattctggacttctacgagaactacagaaccatcacggatgaaaaagtgagttctgcgttcagcaaactggctttgaagccgtgacagctggggaatagcctccatctcttcaatttatctgatgctctctttatacaagaaaaacaaaagattaaagacttcctcagttgcccatgttagttttgtggcggacatgtaacattgttgaatcctaccaaacataattctttaagtgacaacttcatctactgacactttttggtcaaaagttgaaatttttatacgtgggaag

SEQ ID NO: 39579 - protein, 124 aa, Zea mays subsp. mays
MEMRVLEALDYYLVVFHPYRSLSDFLQDAALNDVNMNQFTWGIVNDTYKMDLILVHPPYRIALACIYIASVQREKDITAWLQDLNEDMNLVKDIAMEILDFYENYRTITDEKVSSAFSKLALKP

SEQ ID NO: 39580 - protein, 122 aa, Zea mays subsp. mays
MRVLEALDYYLVVFHPYRSLSDFLQDAALNDVNMNQFTWGIVNDTYKMDLILVHPPYRIALACIYIASVQREKDITAWLQDLNEDMNLVKDIAMEILDFYENYRTITDEKVSSAFSKLALKP

SEQ ID NO: 39581 - protein, 103 aa, Zea mays subsp. mays
YPSRRSEKMAANFWESSQYKQLLDQEEVDVVQPLDKERGISVEDFKLIKFHMSNHIMKLAQHIKVRQRVVATAITYMRRVYTKKSMVEFEPRLVAIACLYLAF

SEQ ID NO: 39582 - DNA, 848 bp, Zea mays subsp. mays
attttgacatttttctcgagcagatcaatcttcttcggttagggttccctcgccgaatccctagatctgtaacggtttccaaaagagccaatggagaacgggaaacgagacagagaagacatggaagtgcaagccgcaccacggaagccacgcgtcctcctcgccgcgagcggaagcgtcgccgccatcaaattcggaaacctctgccattgtttcgccgaatgggccgaagtgagagccgtcgtctcgaaatcgtctctccacttcctcgacaggctctccctcccgcgggaagtcactctgtacaccgacgaagacgagtggtcaacctggaacaagatcggcgatccagtgcttcacatcgagctccgacgctgggctgacgtcatggtcatagctcctttgtctgctaacacattagccaagattgctggtgggctgtgtgataatcttctgacttgtatcgtacgagcttgggattatagcaaaccggttttcgttgcgcctgcgatgaatactttgatgtggaacaatcctttcacggagaggcatctttgttcccttgatgagcttgggatcacgctcattcctcccatcaagaagagattggcgtgtggtgactatggtaatggtgcaatggctgagccttctttgatttattccactgttagactcttctgggagtcgcaggttcgtcagcaaagctgaaaccatggtttccactttgcattggttggttctgttttaatgcttgtctttgtacatcttatgtctctagaggaccattttcactggcttcactcgtgttactgtaggaatatttaagtttattgtctcgctgtttggtg

SEQ ID NO: 39583 - protein, 205 aa, Zea mays subsp. mays
MENGKRDREDMEVQAAPRKPRVLLAASGSVAAIKFGNLCHCFAEWAEVRAVVSKSSLHFLDRLSLPREVTLYTDEDEWSTWNKIGDPVLHIELRRWADVMVIAPLSANTLAKIAGGLCDNLLTCIVRAWDYSKPVFVAPAMNTLMWNNPFTERHLCSLDELGITLIPPIKKRLACGDYGNGAMAEPSLIYSTVRLFWESQVRQQS

SEQ ID NO: 39584 - protein, 195 aa, Zea mays subsp. mays
MEVQAAPRKPRVLLAASGSVAAIKFGNLCHCFAEWAEVRAVVSKSSLHFLDRLSLPREVTLYTDEDEWSTWNKIGDPVLHIELRRWADVMVIAPLSANTLAKIAGGLCDNLLTCIVRAWDYSKPVFVAPAMNTLMWNNPFTERHLCSLDELGITLIPPIKKRLACGDYGNGAMAEPSLIYSTVRLFWESQVRQQS

SEQ ID NO: 39585 - protein, 126 aa, Zea mays subsp. mays
FDIFLEQINLLRLGFPRRIPRSVTVSKRANGERETRQRRHGSASRTTEATRPPRRERKRRRHQIRKPLPLFRRMGRSESRRLEIVSPLPRQALPPAGSHSVHRRRRVVNLEQDRRSSASHRAPTLG

SEQ ID NO: 39586 - DNA, 887 bp, Zea mays subsp. mays
atttaggggctctctcagactcgggtatcgtcatcgtcatcgtcatcgtcttcgcccccgcgaagctcagtcgaagatgttaacggcggatataccaccgaatcagtcaatctacatcaaaaacctcaatgaaagaatcaagaaagaagaattgaagagatctctttactgtttgttctcacagtttgggaggatacttgatgtggttgctttgaagactcctaagctccgtggccaagcttgggttgcctttagtgatgtcactgctgctactaatgctgttcgccagatgcagaacttccctttctacgataagccgatgcgcatacaattcgcaaaagaaaagtcagattgtattgctagagaggaaggaactttcgttcccaaagataagaagaggaagaaagaagagaaagctgaaagaaagcgtgaagaaacccaacgaccaaacacagctaatggcccaactccacagaacggtgcccctccgccatcatcgttcaagccgagcggacaagaagcgatgccaccaaacaacatactcttcattcagaatcttccgcacgatacaacaaccgctatgcttgaatttctcttccgtcagtatccgggattcaaagagataagaatggtcgccgctaaaccagggattgcatttgcggagttcgaagacgatgctaaatcttccatggctatgcaaggtcttcaggacttcaaaatcactccccagtacccaatgctcatctcttttgccaagaaatgaagagaaactgcctgtgttttgtttgtcttttaagatgatgacagtgagacttggtgtgtataaccgacggtttaatgtttcggttcgattgactccggtttggtttagtcacgcggtttcacat

SEQ ID NO: 39587 - protein, 253 aa, Zea mays subsp. mays
FRGSLRLGYRHRHRHRLRPREAQSKMLTADIPPNQSIYIKNLNERIKKEELKRSLYCLFSQFGRILDVVALKTPKLRGQAWVAFSDVTAATNAVRQMQNFPFYDKPMRIQFAKEKSDCIAREEGTFVPKDKKRKKEEKAERKREETQRPNTANGPTPQNGAPPPSSFKPSGQEAMPPNNILFIQNLPHDTTTAMLEFLFRQYPGFKEIRMVAAKPGIAFAEFEDDAKSSMAMQGLQDFKITPQYPMLISFAKK

SEQ ID NO: 39588 - protein, 228 aa, Zea mays subsp. mays
MLTADIPPNQSIYIKNLNERIKKEELKRSLYCLFSQFGRILDVVALKTPKLRGQAWVAFSDVTAATNAVRQMQNFPFYDKPMRIQFAKEKSDCIAREEGTFVPKDKKRKKEEKAERKREETQRPNTANGPTPQNGAPPPSSFKPSGQEAMPPNNILFIQNLPHDTTTAMLEFLFRQYPGFKEIRMVAAKPGIAFAEFEDDAKSSMAMQGLQDFKITPQYPMLISFAKK

SEQ ID NO: 39589 - protein, 157 aa, Zea mays subsp. mays
MQNFPFYDKPMRIQFAKEKSDCIAREEGTFVPKDKKRKKEEKAERKREETQRPNTANGPTPQNGAPPPSSFKPSGQEAMPPNNILFIQNLPHDTTTAMLEFLFRQYPGFKEIRMVAAKPGIAFAEFEDDAKSSMAMQGLQDFKITPQYPMLISFAKK

SEQ ID NO: 39590 - DNA, 607 bp, Zea mays subsp. mays
attttaccgtaagcggttatcatctgcatcccgacgctcttcaaacgaggatacttctttgttcattatcatggcaacaagaagcgctatcagatttgtgtctcgcaggttctctaatggcaaagttcttagcgaagaggaaaaggctgctgagaatgttttcatcaagaaaatggagaaggagaagcttgagaagatagctaggcagggtccgggagaacaagcagcaggttcagccaaggctagtggtggtggaggaacatcatcagctgaatccacgggacctaaagtgtcagaagacaaggacaggaactatgcggtagtggcgggtgtggtggctgtcgtcggtgccattggttggtacatgaaatcaggcggaaagaagcagcagccagaggttcaagagtgaagaaaggtagtagaatgctggactttggagtggctttactataataaagtagagagtagcttactcattcctcttgtatgagaaaccttggaattgcctactactctttcttttggttttgaccaaattttcagaagagattttaagtcttttaaagtttgctggcgtttagcttcggaatctttaagttcattagtc

SEQ ID NO: 39591 - protein, 135 aa, Zea mays subsp. mays
FYRKRLSSASRRSSNEDTSLFIIMATRSAIRFVSRRFSNGKVLSEEEKAAENVFIKKMEKEKLEKIARQGPGEQAAGSAKASGGGGTSSAESTGPKVSEDKDRNYAVVAGVVAVVGAIGWYMKSGGKKQQPEVQE

SEQ ID NO: 39592 - protein, 112 aa, Zea mays subsp. mays
MATRSAIRFVSRRFSNGKVLSEEEKAAENVFIKKMEKEKLEKIARQGPGEQAAGSAKASGGGGTSSAESTGPKVSEDKDRNYAVVAGVVAVVGAIGWYMKSGGKKQQPEVQE

SEQ ID NO: 39593 - protein, 78 aa, Zea mays subsp. mays
MEKEKLEKIARQGPGEQAAGSAKASGGGGTSSAESTGPKVSEDKDRNYAVVAGVVAVVGAIGWYMKSGGKKQQPEVQE

SEQ ID NO: 39594 - DNA, 810 bp, Zea mays subsp. mays
aacatcaatcttcttccttctctcgaagccaaaaccatggcgctactactatggcaaactctaaaagaagcgatacatgcttacacaggtctctccccggtggtcttcttcaccgccctcgctctcgccttctccatttaccaagtcgtctcaggctggttcgcttcgcctttcgatgatgttcgccgacatcagagggctagatcctcggctgcagaggaagcaccaccgattcctcagcctgttcaggtcggcgagatcacagaggaggagcttaagcagtacgatggctccgatcctcaaaagccccttcttatggccatcaaacatcagatctatgacgtaactcaaagcaggatgttctatggaccaggagggccatatgctttgtttgcagggaaagacgcaagccgagcgcttgcaaagatgtcgtttgaggagaaagatctgacttgggatatctctggtcttggtccctttgagcttgaagctcttcaggactgggagtacaagttcaagagcaagtatgccactgttggcactgtcaaagtgaccgtttcagaagctgaaactgcatctgtgtctgaacccgcagagactgatgacggagacgctcatgtaatcaagcaagaaccgacagttgttgataagaatcttgagactcctgctgagagtgatgtgaagaacgagtagattctgtttccgtgatttactctgatgatgttgaagtttcaatgatataatctttgtttcattacctcaaaaaccgagtttgctggttaataaagtatttataaaatgctcgatcac

SEQ ID NO: 39595 - protein, 230 aa, Zea mays subsp. mays
NINLLPSLEAKTMALLLWQTLKEAIHAYTGLSPVVFFTALALAFSIYQVVSGWFASPFDDVRRHQRARSSAAEEAPPIPQPVQVGEITEEELKQYDGSDPQKPLLMAIKHQIYDVTQSRMFYGPGGPYALFAGKDASRALAKMSFEEKDLTWDISGLGPFELEALQDWEYKFKSKYATVGTVKVTVSEAETASVSEPAETDDGDAHVIKQEPTVVDKNLETPAESDVKNE

SEQ ID NO: 39596 - protein, 218 aa, Zea mays subsp. mays
MALLLWQTLKEAIHAYTGLSPVVFFTALALAFSIYQVVSGWFASPFDDVRRHQRARSSAAEEAPPIPQPVQVGEITEEELKQYDGSDPQKPLLMAIKHQIYDVTQSRMFYGPGGPYALFAGKDASRALAKMSFEEKDLTWDISGLGPFELEALQDWEYKFKSKYATVGTVKVTVSEAETASVSEPAETDDGDAHVIKQEPTVVDKNLETPAESDVKNE

SEQ ID NO: 39597 - protein, 125 aa, Zea mays subsp. mays
MAIKHQIYDVTQSRMFYGPGGPYALFAGKDASRALAKMSFEEKDLTWDISGLGPFELEALQDWEYKFKSKYATVGTVKVTVSEAETASVSEPAETDDGDAHVIKQEPTVVDKNLETPAESDVKNE

SEQ ID NO: 39598 - DNA, 879 bp, Zea mays subsp. mays
cacatcgagttcttcttctcggttctcaatttccacgataaaatggtgaccggcgacgtaaagctgattggctcatgggctagtgtcttcgtcatgagggccagaatcgctctcaacctcaaatctattaggtacgagtttctccaggagacatacggtactaagagcgagttgctccttaaatctaatcccgttcacaagaagatcccggttctgattcacgatgacaaacccgtgtgtgagtccaacatcatcgttcagtacatcgacgaggcttggagctcatatggaccgtctattctcccttcccagccctacgacagagccatcgctcggttctgggccgcctacgtcgacgataagtggtttattgctctgagaagtatcctaaccgctcgaggagaagaggagaagaaagcagccatagctgaagtcgaaggaaggactgaccatttagagaaagccttcatcgagtgcagcaatgggaaaccgttcttcaacggtgaccatatcggttacctagacattgccctagggagcttcttgggttggtggaaagtcgtggagttagacgccaatcatatacttcttgacgagaccaagactccctctctgttcaagtgggcagagcggttctgtaatgaccctgatgtgaagcctctcatgcccgagacagcaaagctagctgaatttgcgaggaaactctttcccaagccgcaggcttgatggcaaagtatattgactccttttaaatatattgttggagatagaaacaatataatatatcggttagtggaaatatgaaactggtttactagaacgtgtaagttatgttccatttcaatgtatccaagaccttctatcaagcaaatattttgt

SEQ ID NO: 39599 - protein, 241 aa, Zea mays subsp. mays
HIEFFFSVLNFHDKMVTGDVKLIGSWASVFVMRARIALNLKSIRYEFLQETYGTKSELLLKSNPVHKKIPVLIHDDKPVCESNIIVQYIDEAWSSYGPSILPSQPYDRAIARFWAAYVDDKWFIALRSILTARGEEEKKAAIAEVEGRTDHLEKAFIECSNGKPFFNGDHIGYLDIALGSFLGWWKVVELDANHILLDETKTPSLFKWAERFCNDPDVKPLMPETAKLAEFARKLFPKPQA

SEQ ID NO: 39600 - protein, 227 aa, Zea mays subsp. mays
MVTGDVKLIGSWASVFVMRARIALNLKSIRYEFLQETYGTKSELLLKSNPVHKKIPVLIHDDKPVCESNIIVQYIDEAWSSYGPSILPSQPYDRAIARFWAAYVDDKWFIALRSILTARGEEEKKAAIAEVEGRTDHLEKAFIECSNGKPFFNGDHIGYLDIALGSFLGWWKVVELDANHILLDETKTPSLFKWAERFCNDPDVKPLMPETAKLAEFARKLFPKPQA

SEQ ID NO: 39601 - protein, 210 aa, Zea mays subsp. mays
MRARIALNLKSIRYEFLQETYGTKSELLLKSNPVHKKIPVLIHDDKPVCESNIIVQYIDEAWSSYGPSILPSQPYDRAIARFWAAYVDDKWFIALRSILTARGEEEKKAAIAEVEGRTDHLEKAFIECSNGKPFFNGDHIGYLDIALGSFLGWWKVVELDANHILLDETKTPSLFKWAERFCNDPDVKPLMPETAKLAEFARKLFPKPQA

SEQ ID NO: 39602 - DNA, 925 bp, Zea mays subsp. mays
aaagtctatactcttttgctctctttggtgagtccgaagaatctcttttctttctagctttagtccatggcggggtctttctccttcgttcgtcgcgtgtacctcactctctacaattggatcgtctttgcaggatgggctcaagttctgtactttgcggtaaagacgttgaaggaaactggacatgaacatgtctatgacgctgtggagaagcctctccagcttgctcagaccgccgccgttctcgagattcttcatggattagtaggtttggtcagatctcctgtctctgctactctgccgcagataggttcaaggctgtttctgacttggggcatcctatgcagctttccagaggtccagtcacattttcttgttgcgtcgctggtcataagctggtctatcacggagattattcgctactccttctttggtctcaaggaagctctaggctttgcaccttcatggcacttgtggctcagatacagcagctttttagtgctatatccaaccggtatcaccagtgaagtaggtcttatctaccttgcgttacacacatcaagacgtctgagatgtacagtgttaggatgcctaacacattgaacttctcattcgacttcttctacgcaacgttactcgtccttgcaatatatgtcccaggcagtccacacatgtacaggtacatgcttggtcagcgtaagagagctctctccaaatccaagagggaataataaaaaaagcttatagagagtggagagaccaaagcctcagctcatcaactgcttcttttctcttgcctagtttctttcatgttcttctctttgttagactctttaagtctttcgttttctttaattcctcagggatcgtgtaaactttaagcaggttactatatcaagactaatgtaatgactaagttaatacg

SEQ ID NO: 39603 - protein, 178 aa, Zea mays subsp. mays
MAGSFSFVRRVYLTLYNWIVFAGWAQVLYFAVKTLKETGHEHVYDAVEKPLQLAQTAAVLEILHGLVGLVRSPVSATLPQIGSRLFLTWGILCSFPEVQSHFLVASLVISWSITEIIRYSFFGLKEALGFAPSWHLWLRYSSFLVLYPTGITSEVGLIYLALHTSRRLRCTVLGCLTH

SEQ ID NO: 39604 - DNA, 892 bp, Zea mays subsp. mays
gttacaatctgcccccaaaaaatcgatctctggtctcaactatcgatttccaggcatctacaaatggctgtatgcaccaaactcggggttttacagaacagaaatgttccagtgacatcaatgctccgctacatgtccacaaaacttttcattggtggcctatcaccaggaactgacgaccagtccttaaaagatgctttctctaccttcaatggagtgacagaggcaagagtcatgacaaacaaagtgacgggaaggtcaaggggttatggatttgtcaatttcacaagtgaggattctgccaaatctgctatttcagctatggatggacaggagttgaatgggcgtaacatccgcgtggatgttgcaaaagaatggccgagcttgccgttttcttcggttgaaggtacagaagatgagaagaaaggcaataagatggtgagccgatctgtatggaaagatccgttcgttgacgccttcttgatgaagaagaaaaacgcagctctgaacaggaaaatatggtcaaggaggtcgacgattctgccagagtatgttgattcgtcggtgagaatctacaatggcaaaactcacgtgcgttgtaagatcacagaggggaaagttgggcataagtttggagagtttgcgtttacaaggaaagtgacaaagcatcctagagcaaagtaagttttaagttcttgagtatgaattggtcagcttgagaggatttgttggagaaaaaaccagaaacgaatcaataagaatttccaagtagggatataactcatttgagcttagaagtgtttttttgtatcagcctcgaagtcttgttttaatttttatgatgatacctatgtgacattagatcatttttgaagaccagtttcactttgat

SEQ ID NO: 39605 - protein, 227 aa, Zea mays subsp. mays
VTICPQKIDLWSQLSISRHLQMAVCTKLGVLQNRNVPVTSMLRYMSTKLFIGGLSPGTDDQSLKDAFSTFNGVTEARVMTNKVTGRSRGYGFVNFTSEDSAKSAISAMDGQELNGRNIRVDVAKEWPSLPFSSVEGTEDEKKGNKMVSRSVWKDPFVDAFLMKKKNAALNRKIWSRRSTILPEYVDSSVRIYNGKTHVRCKITEGKVGHKFGEFAFTRKVTKHPRAK

SEQ ID NO: 39606 - protein, 206 aa, Zea mays subsp. mays
MAVCTKLGVLQNRNVPVTSMLRYMSTKLFIGGLSPGTDDQSLKDAFSTFNGVTEARVMTNKVTGRSRGYGFVNFTSEDSAKSAISAMDGQELNGRNIRVDVAKEWPSLPFSSVEGTEDEKKGNKMVSRSVWKDPFVDAFLMKKKNAALNRKIWSRRSTILPEYVDSSVRIYNGKTHVRCKITEGKVGHKFGEFAFTRKVTKHPRAK

SEQ ID NO: 39607 - protein, 187 aa, Zea mays subsp. mays
MLRYMSTKLFIGGLSPGTDDQSLKDAFSTFNGVTEARVMTNKVTGRSRGYGFVNFTSEDSAKSAISAMDGQELNGRNIRVDVAKEWPSLPFSSVEGTEDEKKGNKMVSRSVWKDPFVDAFLMKKKNAALNRKIWSRRSTILPEYVDSSVRIYNGKTHVRCKITEGKVGHKFGEFAFTRKVTKHPRAK

SEQ ID NO: 39608 - DNA, 639 bp, Zea mays subsp. mays
agattagtgctctctgagttttttctctctctagttgcctatgatgcaagaattaagcttagaatgtttctccaacgaagtcgttcgcttagacctaactcctccttcccaaacctcacctacttctctctccatagacgaagaagaatcatcggaggctaagattcgacggctgatatcggagcatccagtgatcatcttcagcagatcttcttgttgcatgtcccacgtcatgaaaagactcctcactactatcggagtcgtccccaccgtcatcgagctcgatgatcacgaggtttcctctctccccatggctcttgaagaagaattttccggcggcgttcttccgtctccggcggttttcattggccgtgagtgtgtcggtggtattgagtccctcgtcgcgctccatctaagtggtcaccttgtccctaagcttgtccaagttggagctctttgggtatgattgtaatctacttcttgtttcttttttgtgtcaacgtttacttcttgcttttcaatagtatttgacagtatcaaaaggagaattttagggtttcttttttctgattatcctccgatgatcaaagttatatacccatgttgaaaatgaattatgaataataattaaagatgtgc

SEQ ID NO: 39609 - protein, 141 aa, Zea mays subsp. mays
MMQELSLECFSNEVVRLDLTPPSQTSPTSLSIDEEESSEAKIRRLISEHPVIIFSRSSCCMSHVMKRLLTTIGVVPTVIELDDHEVSSLPMALEEEFSGGVLPSPAVFIGRECVGGIESLVALHLSGHLVPKLVQVGALWV

SEQ ID NO: 39610 - protein, 140 aa, Zea mays subsp. mays
MQELSLECFSNEVVRLDLTPPSQTSPTSLSIDEEESSEAKIRRLISEHPVIIFSRSSCCMSHVMKRLLTTIGVVPTVIELDDHEVSSLPMALEEEFSGGVLPSPAVFIGRECVGGIESLVALHLSGHLVPKLVQVGALWV

SEQ ID NO: 39611 - protein, 81 aa, Zea mays subsp. mays
MSHVMKRLLTTIGVVPTVIELDDHEVSSLPMALEEEFSGGVLPSPAVFIGRECVGGIESLVALHLSGHLVPKLVQVGALWV

SEQ ID NO: 39612 - DNA, 784 bp, Zea mays subsp. mays
attaagattcactttttattccgatagatcagattcatttcctgaatctgttatataaaattctttctaaagaggaagaaatctcacggttccaacaggaaaaatgggttctgaacagaatgatagcacgagcttcacacaatcatcagagccgaaactttgtgcaaacggatgtggtttctttggttcgccatcaaacatggatctgtgttcgaaatgctaccgagacatatgcgcagaggaagctcaaacagctgttgcaaaagctgccgttgagaaatctttcaagccatcgccatcgcctcctcctcctaccctcttcatagcagagcctgatgtggcgaaaccagagaaagaaaaggcggttgctactgttcttgtggtggccgagccatcttctgcaacaggagaagctacagttcctgaacagaacaaaccaccatctaaacctgcacggccgaaccggtgcctttgttgcaacaagaaggttggtatacttgggtttaagtgcaaatgcgggagcactttctgcggcgaacatcggtaccctgagagacatgattgcagctttgatttcaaagaagctgggcgtggagagattgcaaaagccaatccggttattaaagctgataaacttcaaaggttctgagaaaggctacggtgttggtctctcttttcttttatctcaaattgtatttgaatggaattgggtttctactagtggattgtttccaaaggggggtaacatgatgaatttggttctttaataaactcagtcatctct

SEQ ID NO: 39613 - protein, 181 aa, Zea mays subsp. mays
MGSEQNDSTSFTQSSEPKLCANGCGFFGSPSNMDLCSKCYRDICAEEAQTAVAKAAVEKSFKPSPSPPPPTLFIAEPDVAKPEKEKAVATVLVVAEPSSATGEATVPEQNKPPSKPARPNRCLCCNKKVGILGFKCKCGSTFCGEHRYPERHDCSFDFKEAGRGEIAKANPVIKADKLQRF

SEQ ID NO: 39614 - protein, 149 aa, Zea mays subsp. mays
MDLCSKCYRDICAEEAQTAVAKAAVEKSFKPSPSPPPPTLFIAEPDVAKPEKEKAVATVLVVAEPSSATGEATVPEQNKPPSKPARPNRCLCCNKKVGILGFKCKCGSTFCGEHRYPERHDCSFDFKEAGRGEIAKANPVIKADKLQRF

SEQ ID NO: 39615 - protein, 143 aa, Zea mays subsp. mays
MWRNQRKKRRLLLFLWWPSHLLQQEKLQFLNRTNHHLNLHGRTGAFVATRRLVYLGLSANAGALSAANIGTLRDMIAALISKKLGVERLQKPIRLLKLINFKGSEKGYGVGLSFLLSQIVFEWNWVSTSGLFPKGGNMMNLVL

SEQ ID NO: 39616 - DNA, 892 bp, Zea mays subsp. mays
aaaagaaaagaatcagtctcgtaacttttgtcggatttcccccaaaaaggaaaaaaaaaaagctaagaagaaagaaaaaatggcggatcagctcaccgatgaccagatctcagagttcaaggaagcctttagcctcttcgacaaggatggtgacggttgcatcaccaccaaggagctcggaaccgtgatgaggtctctagggcaaaacccaaccgaagctgagctgcaagacatgatcaacgaggtcgatgcagacggcaacggtaccatcgatttccccgagttcctgaacctgatggcgaggaaaatgaaggacactgactcagaggaagagctcaaggaagccttcagggttttcgacaaagaccagaacggtttcatctctgcagctgagcttcgtcatgtgatgactaacctcggggagaagctaaccgatgaggaagttgatgagatgatccgtgaagctgatgttgatggtgatggtcagatcaactatgatgagttcgttaaagtcatgatggctaagtaagtgagtgagtgtgtgagagagagtcttactatcccttgtttaaaaaaagccttaacctaaaaagaatgatacattggctttgattatggttgtgttctttaggacatgtttttgcttcttttctgttttatttgtctgcttcggctaagctatctctttagtgttatgtcaagtatgaacttcgtgttttgcttatcctttgacaattgatattctctcttcttatttgttttaatctctgttgtttccctgcaatgaatgttctacaaaaattgctgccagagacgtgtgtggttgaatataggcctcagcatttgtaattgaacaaattgaatccgagattggctacatgcctattgaaac

SEQ ID NO: 39617 - protein, 175 aa, Zea mays subsp. mays
KEKNQSRNFCRISPKKEKKKAKKKEKMADQLTDDQISEFKEAFSLFDKDGDGCITTKELGTVMRSLGQNPTEAELQDMINEVDADGNGTIDFPEFLNLMARKMKDTDSEEELKEAFRVFDKDQNGFISAAELRHVMTNLGEKLTDEEVDEMIREADVDGDGQINYDEFVKVMMAK

SEQ ID NO: 39618 - protein, 149 aa, Zea mays subsp. mays
MADQLTDDQISEFKEAFSLFDKDGDGCITTKELGTVMRSLGQNPTEAELQDMINEVDADGNGTIDFPEFLNLMARKMKDTDSEEELKEAFRVFDKDQNGFISAAELRHVMTNLGEKLTDEEVDEMIREADVDGDGQINYDEFVKVMMAK

SEQ ID NO: 39619 - protein, 113 aa, Zea mays subsp. mays
MRSLGQNPTEAELQDMINEVDADGNGTIDFPEFLNLMARKMKDTDSEEELKEAFRVFDKDQNGFISAAELRHVMTNLGEKLTDEEVDEMIREADVDGDGQINYDEFVKVMMAK

SEQ ID NO: 39620 - DNA, 1155 bp, Zea mays subsp. mays
aaaattactaatggccggcacaaccaccagcacggtcacgtccccgcctctcccctcctataccctcgcctccgcaaccgccgcagccgattcttcgcggcctcctcctcctcctcctcgcctcagatggcggcgcctgccgacgccgccggtggctcctctgacgcgttcgaggtgatccgcgttcaccaggcaaaagctgttcgtctttctccagttgaagaaatacggaccattatggaccgaagtgtcagatgtgttcttgctacccattctcaggatcatgctggttatccatctggttcaatggttgattttgcatgtgatcaggatggttaccccatattagcagtgagtagtttagcagtccattcaaagaatctctctggaaatcctaaatgctcacttcttgttgccaaagatcctgaggacagaactgatactgtaatcactgtatatggcgacgctgttcctgtttctgacgacgaaaaagattcagtgagaagtgcttacctacgcaggcaccctggatgctttctgggttgactttggtgacttcagtttcctgcacatcaaacctaaagctgtgcgctatgtatctggcgttgcaactgctctccttggttctggagaattcaatgttgcagagtataaggaagcaaaagttgatccaatatctcaattctcaactcctatcacaagccatatgaacaaggatcatgccaatgatacaaagctcattgtgcaacactccactactgtcaaggtggattttgcttatatgctggacgtggacagccttggttttaatgtgaaggctggttatgatggaagtgttctgaagttgagaatccccttcccaagacaggcgcaagacaggaaggatgttaagacactaattgtggaaatgctccaagctgcaagagcctcatcttcagatcctgaatgatgtcgtcggtctggaatgtgaagaatcgtgcaaattgaagtaaacctaatgaataagagttattgggtttccgtccaatctctgcaccaactgaaggtggggccacagacactccatggattgatacacgaccttgtatataatataacaaagagcgcttgagccttgaagtacttgtagttgaatgaatacaaagcgatttcact

SEQ ID NO: 39621 - protein, 181 aa, Zea mays subsp. mays
KITNGRHNHQHGHVPASPLLYPRLRNRRSRFFAASSSSSSPQMAAPADAAGGSSDAFEVIRVHQAKAVRLSPVEEIRTIMDRSVRCVLATHSQDHAGYPSGSMVDFACDQDGYPILAVSSLAVHSKNLSGNPKCSLLVAKDPEDRTDTVITVYGDAVPVSDDEKDSVRSAYLRRHPGCFLG

SEQ ID NO: 39622 - protein, 139 aa, Zea mays subsp. mays
MAAPADAAGGSSDAFEVIRVHQAKAVRLSPVEEIRTIMDRSVRCVLATHSQDHAGYPSGSMVDFACDQDGYPILAVSSLAVHSKNLSGNPKCSLLVAKDPEDRTDTVITVYGDAVPVSDDEKDSVRSAYLRRHPGCFLG

SEQ ID NO: 39623 - protein, 102 aa, Zea mays subsp. mays
MDRSVRCVLATHSQDHAGYPSGSMVDFACDQDGYPILAVSSLAVHSKNLSGNPKCSLLVAKDPEDRTDTVITVYGDAVPVSDDEKDSVRSAYLRRHPGCFLG

SEQ ID NO: 39624 - DNA, 857 bp, Zea mays subsp. mays
atagctgttaaaggaacctaaaatggcgaaagttttagatctttctctggttctctgtgttctgtgtgtgtccactgcagcaatagccatggcaagaaaccttggagaggaatctagcgatgatactgagttcatcaaatcctcttgtgagacagcaacgtacccggaactatgttttcagtctctgtcttcttacgcaagcgagatcaagaagcggccactacagctcgccgagacagcgctcgccgttagcatggcccaggcaaagtctgccaaaacatatatctcggacatgactgactacaaaggaatcacaaagaggcagcacgaggctgtgttggactgtgttgaagaaatgggagatactgttgataggttgagcaagtcgctgaaggagttgaagaatctggaggaaggagagagcaaagaagacttctggttctgtttgagcaatgtccggacgtggacaagcgcggcgctgacagatgagaccacgtgtcttgatgggtttggagggaaaggcatggatggggagctgaaaagcttagtcagagcacacattgtgcgtgtggcgcaagatacgagtaatgccttggctttgatcaatgtctatgcttccaagcattgaatatattgcaacggtttggtcctgaggacttgagctttttatacttttggatttggtttgtattgtgtttccaagaaatgtgttttggtttggttccgagtcatatcagtttctcttgccacattgttatatcatctacggtctatatagtttgaagctgttcattttgatgtttgattggtgatatagttttgtaagccatgaagagtattttgcaatattctctttt

SEQ ID NO: 39625 - protein, 201 aa, Zea mays subsp. mays
MAKVLDLSLVLCVLCVSTAAIAMARNLGEESSDDTEFIKSSCETATYPELCFQSLSSYASEIKKRPLQLAETALAVSMAQAKSAKTYISDMTDYKGITKRQHEAVLDCVEEMGDTVDRLSKSLKELKNLEEGESKEDFWFCLSNVRTWTSAALTDETTCLDGFGGKGMDGELKSLVRAHIVRVAQDTSNALALINVYASKH

SEQ ID NO: 39626 - protein, 179 aa, Zea mays subsp. mays
MARNLGEESSDDTEFIKSSCETATYPELCFQSLSSYASEIKKRPLQLAETALAVSMAQAKSAKTYISDMTDYKGITKRQHEAVLDCVEEMGDTVDRLSKSLKELKNLEEGESKEDFWFCLSNVRTWTSAALTDETTCLDGFGGKGMDGELKSLVRAHIVRVAQDTSNALALINVYASKH

SEQ ID NO: 39627 - protein, 124 aa, Zea mays subsp. mays
MAQAKSAKTYISDMTDYKGITKRQHEAVLDCVEEMGDTVDRLSKSLKELKNLEEGESKEDFWFCLSNVRTWTSAALTDETTCLDGFGGKGMDGELKSLVRAHIVRVAQDTSNALALINVYASKH

SEQ ID NO: 39628 - DNA, 790 bp, Zea mays subsp. mays
taaaaaaaaaagaagagatttttctcaaatggcgtcactgtgcttatctatccaccaaaccctaaaaccctcggcggctcctagagcaagaccactctccctctccttccctacatccaccatctcactccgcccctcaaccagacgcctctccacctcaaccacgcgcgcatcctacaccccaacaccagcaaccgagcgcgtgatctcaatcgcatcctacgccttgccgttcttcaactcgctccaatacgggcgcttcctcttcgcgcagtacccgagggctaggcctcctcgtggagcccatcttcccgctactcaacctctacaggtcggtccccgggcgcgagcttcgtggccttctttgggctgtacttgggtgtggtgaggaacacgagtttcagcaggtacgttaggttcaacgcgatgcaggcggtgacgctcgatgtgctgttggcggttccggtgttgctgacgaggatactggatccgggtcatggaggaggtgggtttgggatgaaggcgatgatgtggggacacacggttgtgtttgtgtttagcttcatgtgttttgtctatggagttgtgagctgtttggtcgggaagactccttatatccctcttgtcgctgatgctgctgggagacaactctagaaagcttatcacttatgtttcgaaaactgttctttttatttgtgtttgcgatcataaaggtttcagctttgagcaattgttactgtgtgggtatggtatgtagttcgaaagaatcagtaagctgttgtttgcgttg

SEQ ID NO: 39629 - protein, 128 aa, Zea mays subsp. mays
KKKRRDFSQMASLCLSIHQTLKPSAAPRARPLSLSFPTSTISLRPSTRRLSTSTTRASYTPTPATERVISIASYALPFFNSLQYGRFLFAQYPRARPPRGAHLPATQPLQVGPRARASWPSLGCTWVW

SEQ ID NO: 39630 - protein, 119 aa, Zea mays subsp. mays
MASLCLSIHQTLKPSAAPRARPLSLSFPTSTISLRPSTRRLSTSTTRASYTPTPATERVISIASYALPFFNSLQYGRFLFAQYPRARPPRGAHLPATQPLQVGPRARASWPSLGCTWVW

SEQ ID NO: 39631 - protein, 75 aa, Zea mays subsp. mays
MQAVTLDVLLAVPVLLTRILDPGHGGGGFGMKAMMWGHTVVFVFSFMCFVYGVVSCLVGKTPYIPLVADAAGRQL

SEQ ID NO: 39632 - DNA, 908 bp, Zea mays subsp. mays
aatcttttttgatatactgttcacttcccagattatcaagctgatattcgagaagggttttttaagttcttgaaatcttctcgatcgaaggattccaaatgggttcggtttcgggtcaaacccgaattgctacgatgaacctctccctctcctcatcagagaagagctctaataatcgctcctcctcgcttctcaatcctaagaacgcagtttcagatagttacggggtctcttccaaatgcagcacattcctcaggggccagttccaaagaatacaactctcttatactcgccacactcgacctttgccaaaacgtgcaggccacgttgtgtctccgagctgcgtcatgccgttgacggaagagaatgtggagagagtgctcgacgaagtacgccccgcgttgatggcagacggaggaaacgtggcgctgcatgagatcgacggactcgtggtggttcttaagctacaaggagcttgtggttcgtgtcccagctcgtcgatgacgttaaagatgggaatcgagagtcgtctccgcgacaagattccggagatcatgtccgtcgagcagtttcttgaagcggagactggagggttggagctcaacgaggaaaacatcgaaaaggttctcgctgagctacggccttacctatcgggaacaggaggtggagggcttgagcttgttgagatcgatggttatatagttaagattcggctcactggaccagctgctggagtcatgacggttcgtgtcgcgttgactcagaaactgagggaaaacattccttcaataggtgcagtccagcttctagagtgaccactttttgtattgttcatctacgagagcctatatttcgattatatgtacatcattttcaaatctaacatccataccattcagttcctggtg

SEQ ID NO: 39633 - protein, 238 aa, Zea mays subsp. mays
MGSVSGQTRIATMNLSLSSSEKSSNNRSSSLLNPKNAVSDSYGVSSKCSTFLRGQFQRIQLSYTRHTRPLPKRAGHVVSPSCVMPLTEENVERVLDEVRPALMADGGNVALHEIDGLVVVLKLQGACGSCPSSSMTLKMGIESRLRDKIPEIMSVEQFLEAETGGLELNEENIEKVLAELRPYLSGTGGGGLELVEIDGYIVKIRLTGPAAGVMTVRVALTQKLRENIPSIGAVQLLE

SEQ ID NO: 39634 - protein, 226 aa, Zea mays subsp. mays
MNLSLSSSEKSSNNRSSSLLNPKNAVSDSYGVSSKCSTFLRGQFQRIQLSYTRHTRPLPKRAGHVVSPSCVMPLTEENVERVLDEVRPALMADGGNVALHEIDGLVVVLKLQGACGSCPSSSMTLKMGIESRLRDKIPEIMSVEQFLEAETGGLELNEENIEKVLAELRPYLSGTGGGGLELVEIDGYIVKIRLTGPAAGVMTVRVALTQKLRENIPSIGAVQLLE

SEQ ID NO: 39635 - protein, 155 aa, Zea mays subsp. mays
MPLTEENVERVLDEVRPALMADGGNVALHEIDGLVVVLKLQGACGSCPSSSMTLKMGIESRLRDKIPEIMSVEQFLEAETGGLELNEENIEKVLAELRPYLSGTGGGGLELVEIDGYIVKIRLTGPAAGVMTVRVALTQKLRENIPSIGAVQLLE

SEQ ID NO: 39636 - DNA, 837 bp, Zea mays subsp. mays
aataatttctgtaagatcatcaaaagttgatacaccaagctgatttataaacctctacacactcaatttctagcatacaaaaataaaagaaatgggaacagagatggtaatgattcacgaggttccttttcctccacagatcatcacttccaagcccttctctcttcttggccaaggcatcactgacatcgagatccatttccttcaagtgaagttcacggccataggagtttacttagatccttcagatgttaaaacccatcttgacaaatggaaaggcaagaccggaaaggatcttgccggtgatgacgacttcttcgacgccctggcctccggggagattgaaaaggttataagagtggtggtgataaaggaaataaaaggagctcagtacggtgtgcagctagagaattcggtgagagatcgtttggctgctgaggataagtacgaggaagaagaagaaaacgagctcgagaaagttgtaggattttttcagtctaagtacttcaagactcattccatcatcacttaccgtttctcagccaaagatggtatctgcgagattggatttgagacggaaggtaaagaagaggacaaattgaaagtagagaatgcgaatgtggtagggatgatgcagaaatggtacttgtctggaagtcgaggagtttcaccgtccaccatcgtctccctcgccgattctctgtccgcagttttaacctaaaactccttatataagcctatatcatctatgtgtgtgttttatgttgttgtattatgtcgttcttaagtgagacatcgtgtttggttatctttataaaatgttgaatggttgtcttt

SEQ ID NO: 39637 - protein, 209 aa, Zea mays subsp. mays
MGTEMVMIHEVPFPPQIITSKPFSLLGQGITDIEIHFLQVKFTAIGVYLDPSDVKTHLDKWKGKTGKDLAGDDDFFDALASGEIEKVIRVVVIKEIKGAQYGVQLENSVRDRLAAEDKYEEEEENELEKVVGFFQSKYFKTHSIITYRFSAKDGICEIGFETEGKEEDKLKVENANVVGMMQKWYLSGSRGVSPSTIVSLADSLSAVLT

SEQ ID NO: 39638 - protein, 205 aa, Zea mays subsp. mays
MVMIHEVPFPPQIITSKPFSLLGQGITDIEIHFLQVKFTAIGVYLDPSDVKTHLDKWKGKTGKDLAGDDDFFDALASGEIEKVIRVVVIKEIKGAQYGVQLENSVRDRLAAEDKYEEEEENELEKVVGFFQSKYFKTHSIITYRFSAKDGICEIGFETEGKEEDKLKVENANVVGMMQKWYLSGSRGVSPSTIVSLADSLSAVLT

SEQ ID NO: 39639 - protein, 203 aa, Zea mays subsp. mays
MIHEVPFPPQIITSKPFSLLGQGITDIEIHFLQVKFTAIGVYLDPSDVKTHLDKWKGKTGKDLAGDDDFFDALASGEIEKVIRVVVIKEIKGAQYGVQLENSVRDRLAAEDKYEEEEENELEKVVGFFQSKYFKTHSIITYRFSAKDGICEIGFETEGKEEDKLKVENANVVGMMQKWYLSGSRGVSPSTIVSLADSLSAVLT

SEQ ID NO: 39640 - DNA, 1177 bp, Zea mays subsp. mays
aggacaaaaaaaaagatagtggagggatcctctcgggaaccgggaccgtgattggtctcgtcgaggccgagagtgagaggatgatgatgatgatgcgaagaatcatctccgagagagctacttgtgtctctaagaactttattctcagatcctctgcttcgcggtttcacggcgagtctctcgattcctccgtctcacccgttctcattcccggcgtccatgtcttccactgccaggacgcagttggaatcgtagcaaagctatcagattgtattgcagctaaaggcggaaacattctcggctacgatgtctttgttcctgagaacaacaacgtcttctactctcgcagtgagtttatatttgatccggtgaaatggccgagagagcaaatgagtgaagactttcaagctattgcgcaaagattcggtgccatgaactctgttgttcgtgttccttctatagatcccaagtataagattgctcttctactttctaaacaggatcattgtctggtggaaatgttgcatagatggcaagacggaaaactccctgtggatataacatgtgtgataagcaatcatgagagagcttcaaacactcatgttatgcggtttcttgagaggcatggcattccgtatcattatgtagccacaactaaagataataaacgagaagatgagattttggatttggttaaagacactgacttcttagttctcgctagatacatgcagattctatcgggtaagttcttgaaaggttatggaaaggatgtaatcaatattcaccatggtctcttgccatcattcaagggcggatatccagccaaacaggcgtttgatgcaggtgtgaagctgattggagcaacaagtcactttgttactgaggaacttgatgcagggcctatcattgaacaaatggttgagagtgtttcccaccgggacaatctaaggagctttgtccagaaatctgaggacctcgagaaaaaatgcctaacaaaagctataaagtcatactgcgaactacgtgtgttaccttatggagcaaacaagactgttgtattctaatagaacaagcaaagactatttgttgtatgaataactcaaaagaaagttataacaattctcttgaagatttctgattcacttgcagttaatgtgaacaagttatttacagg

SEQ ID NO: 39641 - protein, 354 aa, Zea mays subsp. mays
DKKKDSGGILSGTGTVIGLVEAESERMMMMMRRIISERATCVSKNFILRSSASRFHGESLDSSVSPVLIPGVHVFHCQDAVGIVAKLSDCIAAKGGNILGYDVFVPENNNVFYSRSEFIFDPVKWPREQMSEDFQAIAQRFGAMNSVVRVPSIDPKYKIALLLSKQDHCLVEMLHRWQDGKLPVDITCVISNHERASNTHVMRFLERHGIPYHYVATTKDNKREDEILDLVKDTDFLVLARYMQILSGKFLKGYGKDVINIHHGLLPSFKGGYPAKQAFDAGVKLIGATSHFVTEELDAGPIIEQMVESVSHRDNLRSFVQKSEDLEKKCLTKAIKSYCELRVLPYGANKTVVF

SEQ ID NO: 39642 - protein, 328 aa, Zea mays subsp. mays
MMMMMRRIISERATCVSKNFILRSSASRFHGESLDSSVSPVLIPGVHVFHCQDAVGIVAKLSDCIAAKGGNILGYDVFVPENNNVFYSRSEFIFDPVKWPREQMSEDFQAIAQRFGAMNSVVRVPSIDPKYKIALLLSKQDHCLVEMLHRWQDGKLPVDITCVISNHERASNTHVMRFLERHGIPYHYVATTKDNKREDEILDLVKDTDFLVLARYMQILSGKFLKGYGKDVINIHHGLLPSFKGGYPAKQAFDAGVKLIGATSHFVTEELDAGPIIEQMVESVSHRDNLRSFVQKSEDLEKKCLTKAIKSYCELRVLPYGANKTVVF

SEQ ID NO: 39643 - protein, 327 aa, Zea mays subsp. mays
MMMMRRIISERATCVSKNFILRSSASRFHGESLDSSVSPVLIPGVHVFHCQDAVGIVAKLSDCIAAKGGNILGYDVFVPENNNVFYSRSEFIFDPVKWPREQMSEDFQAIAQRFGAMNSVVRVPSIDPKYKIALLLSKQDHCLVEMLHRWQDGKLPVDITCVISNHERASNTHVMRFLERHGIPYHYVATTKDNKREDEILDLVKDTDFLVLARYMQILSGKFLKGYGKDVINIHHGLLPSFKGGYPAKQAFDAGVKLIGATSHFVTEELDAGPIIEQMVESVSHRDNLRSFVQKSEDLEKKCLTKAIKSYCELRVLPYGANKTVVF

SEQ ID NO: 39644 - DNA, 692 bp, Zea mays subsp. mays
aaaatatatataatcttgtcatacttctctcaaacccggttcttgtctgaagaaagcagaatcaatccatgtctttcagaggacttcgcaagccaaatgcaacatccggaatgggtgttgcggaccagagcaagaccacataccacgagctccagaggaagaagactcatcgctacgtcgtcttcaagatcgacgaactcaaaaaccaagtggtggttgagaagacaggaaacccagcggagagctacgatgacttcttagcttctctccccgacaatgattgcagatacgccgtttacgactttgatttcgtcaccgctgagaattgccagaaaagcaaaatcttcttcgtcgcttggtctccagacacttcaagagtcagggcgaagatggtttacgcgacttcgaaagagaggtttaggagggagcttcaagggattcactatgagattcaagctactgatcctactgaggttgatcttgatgtcctacgcgaacgagccgactgaggattatttgttctctattaagacgattacttatggtaatgtaatgaaaataatcattcaggatttctcgtattctcgtctcgtgggtggatttgtgtaaccacagtttcatgttctatggacaagtgtactaaactcagttgatgtttcagattgctcatctataaaacctctttgtaactc

SEQ ID NO: 39645 - protein, 146 aa, Zea mays subsp. mays
MSFRGLRKPNATSGMGVADQSKTTYHELQRKKTHRYVVFKIDELKNQVVVEKTGNPAESYDDFLASLPDNDCRYAVYDFDFVTAENCQKSKIFFVAWSPDTSRVRAKMVYATSKERFRRELQGIHYEIQATDPTEVDLDVLRERAD

SEQ ID NO: 39646 - protein, 132 aa, Zea mays subsp. mays
MGVADQSKTTYHELQRKKTHRYVVFKIDELKNQVVVEKTGNPAESYDDFLASLPDNDCRYAVYDFDFVTAENCQKSKIFFVAWSPDTSRVRAKMVYATSKERFRRELQGIHYEIQATDPTEVDLDVLRERAD

SEQ ID NO: 39647 - protein, 110 aa, Zea mays subsp. mays
MIADTPFTTLISSPLRIARKAKSSSSLGLQTLQESGRRWFTRLRKRGLGGSFKGFTMRFKLLILLRLILMSYANEPTEDYLFSIKTITYGNVMKIIIQDFSYSRLVGGFV

SEQ ID NO: 39648 - DNA, 793 bp, Zea mays subsp. mays
ataaaccatggcgtctcactcttctcttcttctcatcctaaccgttgctctcttcgtctctatcatctcaccggcgacttcacaaacatgctcaacacagaacgtgctctccgccgagaaaactccgttccagacatgcctagacctccccgaactcgaatcatacctccactacacttacaacgccaccaactcttctctctccgtcgccttcgtcgccgcaccatctcgctccgacgggtggatcgcttgggctatcaacccgacggcgaccacgatgagcggctctcaggcgttcctcgcctacggatccggagccggcgcgcctcccgtcgtgaagacgtacaacatcactggccacaatctcaccgaggggagacttgccttcgacttttggaacctacgcgccgaatctttaaacggcggtaggatcgcgattttcacgacggtgaaggttccggcgggagctgggagcgtgaatcaggtgtggcagatcggtgggaatgtgaaaaacggtcgtgttggagtgcatcctttcagtccgccgaatttgaactctagagccgtgctgaatttaaccggtacgacgagtactggtggtggtggctcaaaaactccggggaacgcggggtggatgatgacaaacgtacatttaggggtgaatttgggatttttggttttgttggggactataattattttctgaaaatcttttttctagtaataatgcaagccaccatataatgtactgtttaccttcttagacttagaggcatttacttttttttcacct

SEQ ID NO: 39649 - protein, 232 aa, Zea mays subsp. mays
MASHSSLLLILTVALFVSIISPATSQTCSTQNVLSAEKTPFQTCLDLPELESYLHYTYNATNSSLSVAFVAAPSRSDGWIAWAINPTATTMSGSQAFLAYGSGAGAPPVVKTYNITGHNLTEGRLAFDFWNLRAESLNGGRIAIFTTVKVPAGAGSVNQVWQIGGNVKNGRVGVHPFSPPNLNSRAVLNLTGTTSTGGGGSKTPGNAGWMMTNVHLGVNLGFLVLLGTIIIF

SEQ ID NO: 39650 - protein, 142 aa, Zea mays subsp. mays
MSGSQAFLAYGSGAGAPPVVKTYNITGHNLTEGRLAFDFWNLRAESLNGGRIAIFTTVKVPAGAGSVNQVWQIGGNVKNGRVGVHPFSPPNLNSRAVLNLTGTTSTGGGGSKTPGNAGWMMTNVHLGVNLGFLVLLGTIIIF

SEQ ID NO: 39651 - protein, 142 aa, Zea mays subsp. mays
INHGVSLFSSSHPNRCSLRLYHLTGDFTNMLNTERALRRENSVPDMPRPPRTRIIPPLHLQRHQLFSLRRLRRRTISLRRVDRLGYQPDGDHDERLSGVPRLRIRSRRASRREDVQHHWPQSHRGETCLRLLEPTRRIFKRR

SEQ ID NO: 39652 - DNA, 1172 bp, Zea mays subsp. mays
ctctctgttgcatttcccgtcctgtccttccacccggcggcttaaaccctagttctcactcccatcgccgcttcagctccgccgctgcagatggagttctggggtctcgaggtcaagcctggttccactgttaagtgtgagcctggatatggctttgtgctgcacctttcccaggctgctcttggggaatcgaagaagagtgataatgccttgatgtatgtcaaaattgatgatcagaaacttgccattggaaccctctctgttgacaagaacccacacatacaatttgatctgattttcgataaagagtttgagctgtcgcacacatcaaaaactaccagcgttttcttcactggctacaaggttgagcagccattcgaggaagatgaaatggatcttgattctgaagatgaagacgaggagctgaatgttccagtagtcaaggaaaatggcaaagctgatgagaagaaacagaaaagtcaagaaaaggcagttgctgcaccttcaaaatcaagtccggattccaagaagagcaaggatgacgacgattctgatgaggacgagactgatgattctgatgaggatgagacggacgattctgatgagggtttgtctcctgaagaaggcgatgatgattcaagtgatgaagatgataccagtgacgatgaggaggaagacactccaactcctaagaagcctgaggtaggcaagaagagagctgctgaaagttccgtgctgaaaactcctctatctgataagaaagcaaaggttgccacaccgtcatctcagaagacaggtggcaagaagggcgccgccgtccatgtggcaactccacacccagcaaaaggcaagaccattgtaaacaatgacaaatcggtcaagtctccaaaatctgcgccaaaatctggtgtcccttgcaaatcgtgcagcaagtcattcatcagtgagacggcacttcaggctcactcgaaggcgaagcatgggggcaagtgagtcgcaggtccaatagagtcaacaacaaatgcgaaacatgggagaggagggtaagcgagagtctcgaaagagtgtcggtggaagtaggcctaaccttattttgtttagagacgggctatgcgttcgatgtagcaaaacaaggctgtggtttgtgtacttcaatatttgggttgtgtgtt

SEQ ID NO: 39653 - protein, 300 aa, Zea mays subsp. mays
MEFWGLEVKPGSTVKCEPGYGFVLHLSQAALGESKKSDNALMYVKIDDQKLAIGTLSVDKNPHIQFDLIFDKEFELSHTSKTTSVFFTGYKVEQPFEEDEMDLDSEDEDEELNVPVVKENGKADEKKQKSQEKAVAAPSKSSPDSKKSKDDDDSDEDETDDSDEDETDDSDEGLSPEEGDDDSSDEDDTSDDEEEDTPTPKKPEVGKKRAAESSVLKTPLSDKKAKVATPSSQKTGGKKGAAVHVATPHPAKGKTIVNNDKSVKSPKSAPKSGVPCKSCSKSFISETALQAHSKAKHGGK

SEQ ID NO: 39654 - protein, 259 aa, Zea mays subsp. mays
MYVKIDDQKLAIGTLSVDKNPHIQFDLIFDKEFELSHTSKTTSVFFTGYKVEQPFEEDEMDLDSEDEDEELNVPVVKENGKADEKKQKSQEKAVAAPSKSSPDSKKSKDDDDSDEDETDDSDEDETDDSDEGLSPEEGDDDSSDEDDTSDDEEEDTPTPKKPEVGKKRAAESSVLKTPLSDKKAKVATPSSQKTGGKKGAAVHVATPHPAKGKTIVNNDKSVKSPKSAPKSGVPCKSCSKSFISETALQAHSKAKHGGK

SEQ ID NO: 39655 - protein, 200 aa, Zea mays subsp. mays
MDLDSEDEDEELNVPVVKENGKADEKKQKSQEKAVAAPSKSSPDSKKSKDDDDSDEDETDDSDEDETDDSDEGLSPEEGDDDSSDEDDTSDDEEEDTPTPKKPEVGKKRAAESSVLKTPLSDKKAKVATPSSQKTGGKKGAAVHVATPHPAKGKTIVNNDKSVKSPKSAPKSGVPCKSCSKSFISETALQAHSKAKHGGK

SEQ ID NO: 39656 - DNA, 898 bp, Zea mays subsp. mays
aaattggacaaccctgtcgccctctcggtctccctcgagcttttcttgtgcgcagccgcagccgctgcttttcgttcgtcttcatcctacgcgagggcgaaacccagaaaccctctccctcctgtactccggccgacacatccaggggcgatgacgctgggtagctccggcgccggatcgagcgtcgtcgttcctcgaaacttcaggctattagaggagctcgagcgtggagagaagggcattggtgatgggacagtgagctatggaatggatgatgctgatgacatctacatgcggtcatggactggtaccatcattggccctcacaatactgtacatgagggtcgcatctaccagctgaagttgttttgtgacaaggactatccggagaagccaccatctgtcagattccactcaagaatcaacatgacatgcgttaatcacgagacaggaatggttgatccaaggaagtttggtttgctagcgaactggcagcgggactacacgatggagaacatcctcacccagctcaagaaagagatggctgcctcgcagaatcgaaagttagtgcagcctccagaagggacattcttctaacgaagtgttcacttggcccgtcatgggatccaacagtaattgaaagttttatgggctaaaaaacagcgtctacatctggtgcccctgcctgtctttgtgattttttatgacttttatgttcttgtatcgtgaaccgcagtgaacaacggttgttgcaagttccagggatatctttggaagtggtaaacaaatgcgtcttatttctatgtaatattagaccccgtgcgtgtgtggtttcgaggtacagctccctatcaactgttgccgtgcattccgtcgatttgcttgacgtctttcgtcc

SEQ ID NO: 39657 - protein, 198 aa, Zea mays subsp. mays
KLDNPVALSVSLELFLCAAAAAAFRSSSSYARAKPRNPLPPVLRPTHPGAMTLGSSGAGSSVVVPRNFRLLEELERGEKGIGDGTVSYGMDDADDIYMRSWTGTIIGPHNTVHEGRIYQLKLFCDKDYPEKPPSVRFHSRINMTCVNHETGMVDPRKFGLLANWQRDYTMENILTQLKKEMAASQNRKLVQPPEGTFF

SEQ ID NO: 39658 - protein, 148 aa, Zea mays subsp. mays
MTLGSSGAGSSVVVPRNFRLLEELERGEKGIGDGTVSYGMDDADDIYMRSWTGTIIGPHNTVHEGRIYQLKLFCDKDYPEKPPSVRFHSRINMTCVNHETGMVDPRKFGLLANWQRDYTMENILTQLKKEMAASQNRKLVQPPEGTFF

SEQ ID NO: 39659 - protein, 109 aa, Zea mays subsp. mays
MDDADDIYMRSWTGTIIGPHNTVHEGRIYQLKLFCDKDYPEKPPSVRFHSRINMTCVNHETGMVDPRKFGLLANWQRDYTMENILTQLKKEMAASQNRKLVQPPEGTFF

SEQ ID NO: 39660 - DNA, 1119 bp, Zea mays subsp. mays
aaccaaaaactcaaaacaaaacaaaaacacttcagaaacaaaacacacgatggagatgagtttgaatctcgtatcgtcttcatcctcgaaccctgttttccttttcaatccaattctatcagggaaacaagtgagtctcccaggccgacatcagagaatcccgaaaagagcgaaacccttttgcgttaggtcctcgatgaacttgtctggacccagacccagacaaaccctgtctagtaactgggatgtgtctaaattctccgttgattccgttgctcaatctccttctcggctccccagcttcgaggaactcgacaccacaaacatgcttctccgtcaaagaatcgtcttcctcggttctcaggtcgatgatatgacagcagatttggtgataagtcagctcttgttactagatgctcaggactctgagagagacataacgctctttatcaattcacctggtggttctatcactgctgggatgggaatatatgatgcaatgaagcaatgcaaggccgacgtatccactgtctgcttaggactagctgcatcaatgggtgcgtttctccttgcttctggttccaaagggaaacgctactgcatgcctaactctaaagttatgatccatcagccacttggttccgccggaggcaaagcaacggaaatgagcattcgcgttagagaaatgatgtaccacaagattaaactcaacaaaatcttctctcgaatcaccgggaagcccgaatcagagattgaaggcgacacagaccgtgattacttcttgaatccatgggaggcgaaagagtatggtttggtagacgctgtaatcgatgatggcaaaccgggattagtcgcaccaattggagatggtactcctccacctaacaccaaagtttgggatttttggaaagttgaaggaaccaagaacgataataaggatttaccgaccgagcagtcgagagtacagaatggttacgccactcctgaatagtgaatgttgttacggcctttactgtttcctttgatctctttatgttttaatgtgctagctgcaaccataacaagacatttcgtgtgtttgtaccatttctcggatagatttttggagttattgaagac

SEQ ID NO: 39661 - protein, 329 aa, Zea mays subsp. mays
TKNSKQNKNTSETKHTMEMSLNLVSSSSSNPVFLFNPILSGKQVSLPGRHQRIPKRAKPFCVRSSMNLSGPRPRQTLSSNWDVSKFSVDSVAQSPSRLPSFEELDTTNMLLRQRIVFLGSQVDDMTADLVISQLLLLDAQDSERDITLFINSPGGSITAGMGIYDAMKQCKADVSTVCLGLAASMGAFLLASGSKGKRYCMPNSKVMIHQPLGSAGGKATEMSIRVREMMYHKIKLNKIFSRITGKPESEIEGDTDRDYFLNPWEAKEYGLVDAVIDDGKPGLVAPIGDGTPPPNTKVWDFWKVEGTKNDNKDLPTEQSRVQNGYATPE

SEQ ID NO: 39662 - protein, 313 aa, Zea mays subsp. mays
MEMSLNLVSSSSSNPVFLFNPILSGKQVSLPGRHQRIPKRAKPFCVRSSMNLSGPRPRQTLSSNWDVSKFSVDSVAQSPSRLPSFEELDTTNMLLRQRIVFLGSQVDDMTADLVISQLLLLDAQDSERDITLFINSPGGSITAGMGIYDAMKQCKADVSTVCLGLAASMGAFLLASGSKGKRYCMPNSKVMIHQPLGSAGGKATEMSIRVREMMYHKIKLNKIFSRITGKPESEIEGDTDRDYFLNPWEAKEYGLVDAVIDDGKPGLVAPIGDGTPPPNTKVWDFWKVEGTKNDNKDLPTEQSRVQNGYATPE

SEQ ID NO: 39663 - protein, 311 aa, Zea mays subsp. mays
MSLNLVSSSSSNPVFLFNPILSGKQVSLPGRHQRIPKRAKPFCVRSSMNLSGPRPRQTLSSNWDVSKFSVDSVAQSPSRLPSFEELDTTNMLLRQRIVFLGSQVDDMTADLVISQLLLLDAQDSERDITLFINSPGGSITAGMGIYDAMKQCKADVSTVCLGLAASMGAFLLASGSKGKRYCMPNSKVMIHQPLGSAGGKATEMSIRVREMMYHKIKLNKIFSRITGKPESEIEGDTDRDYFLNPWEAKEYGLVDAVIDDGKPGLVAPIGDGTPPPNTKVWDFWKVEGTKNDNKDLPTEQSRVQNGYATPE

SEQ ID NO: 39664 - DNA, 1103 bp, Zea mays subsp. mays
gcttcattctctcaatctcgctcgctctcctttggcagatctgagagttttggacaaagaataaaaacttgggaaacatgcctccgcagaagatcgagacaggtcacagcgacattgtccatgatgtcgtcatggattactacggaaagcgaatagcaactgcctcatcagacggcaccatcaagataaccggagtgagcaacagcggcggatctcagcagctagctaccttaaccggccaccgaggtcccgtctggcaagtcgcctgggcccacccgaagtacgattcgctcctcgcttcgtgctcctacgatgggcaaatcataatatggaaagaaggaaaccaaaacgagtggacgcagtctcacgtcttcacagaccacaaagtatcagtcaactccatcgcttgggctcctcacgagctcggtctctccttagcttgcggagcatccgacggaaacatctctgtcttctcggccagagccgatggcggttgggacacaacgaggatagaccaagctcacccggtcggagtcacttcggtgtcgtgggcaccagcgacggagccaggggcgctcgttagctccggtatgcacgagccggtttacaagttagcgtcgggagggtgtgatagtacggtgaaggtgtggaaattcgcaaacgggtcgtggaagatggactgtttcccggcgctacacaagcacaaggactgggtgagggacgtggcgtgggcaccgaacttgggtctgccgaagtcgacgatagcgagtgggtcggaggatgggagtgtgatcatatggacggtggggaaagaaggagagcagtgggaagggaaggtattgaaagatttcaagacgccggtgtggagggtgacgtggtcgatgacgggtaacttgctggcggtgtcggatgggaacaataacgtaacggtgtggaaagaggctgtggatggagagtgggaacaagtgactgtcgttgagccttagattgtgttgttcctgtttgtttgattgtgatttattttgttgtagtaagtatcaaatgtggttgctttatacatttttttgtttcttaccatcctctagatacttgctttctctgct

SEQ ID NO: 39665 - protein, 302 aa, Zea mays subsp. mays
MPPQKIETGHSDIVHDVVMDYYGKRIATASSDGTIKITGVSNSGGSQQLATLTGHRGPVWQVAWAHPKYDSLLASCSYDGQIIIWKEGNQNEWTQSHVFTDHKVSVNSIAWAPHELGLSLACGASDGNISVFSARADGGWDTTRIDQAHPVGVTSVSWAPATEPGALVSSGMHEPVYKLASGGCDSTVKVWKFANGSWKMDCFPALHKHKDWVRDVAWAPNLGLPKSTIASGSEDGSVIIWTVGKEGEQWEGKVLKDFKTPVWRVTWSMTGNLLAVSDGNNNVTVWKEAVDGEWEQVTVVEP

SEQ ID NO: 39666 - protein, 284 aa, Zea mays subsp. mays
MDYYGKRIATASSDGTIKITGVSNSGGSQQLATLTGHRGPVWQVAWAHPKYDSLLASCSYDGQIIIWKEGNQNEWTQSHVFTDHKVSVNSIAWAPHELGLSLACGASDGNISVFSARADGGWDTTRIDQAHPVGVTSVSWAPATEPGALVSSGMHEPVYKLASGGCDSTVKVWKFANGSWKMDCFPALHKHKDWVRDVAWAPNLGLPKSTIASGSEDGSVIIWTVGKEGEQWEGKVLKDFKTPVWRVTWSMTGNLLAVSDGNNNVTVWKEAVDGEWEQVTVVEP

SEQ ID NO: 39667 - DNA, 613 bp, Zea mays subsp. mays
caaaactcaaaacacacatattatcttcattgagttctctcatatcataatcatctccttcgagaaatatggcgatttcaaaagcccttattgcttctcttctcatatctcttcttgttctccaactcgtccaggccgatgtggaaaactcaaacaaaaagaggggttaccgcaaaaaaattgattgtggaagtgcttgtgtagcaaggtgcaggctctcaagtagacctaacctttgccacagagcgtgcgggacttgttgcgcaagatgcaactgtgtgccacctggtacgtacggaaactacgacaagtgccagtgctacgctaccctcaccacccacggtggtcgccgcaagtgcccttaagtaaacttaaaactctcaaattgcttcggatgttggatttcaatactacatatgtcgttttgtgtgttagtatttgtttgcatatatatttatgtgggtcgaataagtcatgagagccgtacggcgtatttgtgtatggtgctgtattattaattggtctatttgttgcgagttttttggtttttcattcgttgcgtggaataatccccttgtattatttcattttctaaataaagttatgttgcttt

SEQ ID NO: 39668 - protein, 98 aa, Zea mays subsp. mays
MAISKALIASLLISLLVLQLVQADVENSNKKRGYRKKIDCGSACVARCRLSSRPNLCHRACGTCCARCNCVPPGTYGNYDKCQCYATLTTHGGRRKCP

SEQ ID NO: 39669 - protein, 69 aa, Zea mays subsp. mays
MQLCATWYVRKLRQVPVLRYPHHPRWSPQVPLSKLKTLKLLRMLDFNTTYVVLCVSICLHIYLCGSNKS

SEQ ID NO: 39670 - protein, 60 aa, Zea mays subsp. mays
KTQNTHIIFIEFSHIIIISFEKYGDFKSPYCFSSHISSCSPTRPGRCGKLKQKEGLPQKN

SEQ ID NO: 39671 - DNA, 970 bp, Zea mays subsp. mays
tctcattattgaacattttgagctctcgtctcgtctcgtctttcctccacaccaaaccatggcggcttcttctctgcaatccctaaaccctacattctcccaaaccctagcttctcccaacacctctcctcccttccgatccccctttctcagattcaattcctccttcaatctcaaacccctctcgactcgctcctcctccttcatcgcacgctccgccgccgagccgcaggagagaaagaccttccacggcctctgctacgtcgtcggcgacaacatcgacacggaccagatcatcccggcggagttcctcaccctcgtcccgtcgaaccccgacgagtacgagaagctcggctcctacgcgctgatcgggctcccggcctcgtacaaggaccgattcgtgcagccaggggagatgaagacgaagtactcgatcatcatcggcggggagaatttcgggtgcgggtcgtctcgggagcacgcgccggtgtgtctgggagcggcgggggcgaaggcggtggtggcgcagtcgtacgcgaggatatttttcaggaactcggtggcgacgggggaggtttatccgctggattcggaggttagggtttgcgatgagtgtaagacgggggatgtggcgacggtggagctgagggaaggggatagtgttttgattaatcatacgaccgggaaagagtataagctgaagcccattggtgacgctgggcccgtgattgacgctggtgggatctttgcttatgctaggaaagctgggatgattccttctgctgctgctgcttgatttgatttctccaactcaggggtaaatgcatatgtcgatgagagttgatcttcaagggtaagtaattttctgcttttgtttccaataaaaaaaagaacaataagaacatgtatgtttcaagaatttgtgaacctagtctatgcttttatggatatatgttatgcttttcggttt

SEQ ID NO: 39672 - protein, 264 aa, Zea mays subsp. mays
LIIEHFELSSRLVFPPHQTMAASSLQSLNPTFSQTLASPNTSPPFRSPFLRFNSSFNLKPLSTRSSSFIARSAAEPQERKTFHGLCYVVGDNIDTDQIIPAEFLTLVPSNPDEYEKLGSYALIGLPASYKDRFVQPGEMKTKYSIIIGGENFGCGSSREHAPVCLGAAGAKAVVAQSYARIFFRNSVATGEVYPLDSEVRVCDECKTGDVATVELREGDSVLINHTTGKEYKLKPIGDAGPVIDAGGIFAYARKAGMIPSAAAA

SEQ ID NO: 39673 - protein, 245 aa, Zea mays subsp. mays
MAASSLQSLNPTFSQTLASPNTSPPFRSPFLRFNSSFNLKPLSTRSSSFIARSAAEPQERKTFHGLCYVVGDNIDTDQIIPAEFLTLVPSNPDEYEKLGSYALIGLPASYKDRFVQPGEMKTKYSIIIGGENFGCGSSREHAPVCLGAAGAKAVVAQSYARIFFRNSVATGEVYPLDSEVRVCDECKTGDVATVELREGDSVLINHTTGKEYKLKPIGDAGPVIDAGGIFAYARKAGMIPSAAAA

SEQ ID NO: 39674 - DNA, 923 bp, Zea mays subsp. mays
atctcactcactctcgtctcttctctatctctctgcgtgggtgaaatttagatggctggagttgtgcgattatcaacgacgtcggttcagacccttggcgtctcttctccgcccttcacctcctttgcagccactctcagttctcctcccttacctcctcctactccgaatctgaattccgacaagagattgcgtccgctctcatcttctccctcgtgctcgtctcctcattacccagcttctggtctcgcaagccatagcctccttagacgtcccaacagcaaagtggttcgcgtcaaggtagatgagagtgtggccgagacagagccacctaaatggtgggagaggaatgctccaaacatggtagacattcattccaccgaagagttcttgaaggctctgagcgaagcgggtgaaagactagtgattgtagagttctatggaacttggtgcgcttcttgtagagcattgttccctaagctttgcaaaacggcggtggagaatcccaatatattgttcctcaaagtaaactttgatgagaataaaccaatgtgcaagagtttgaacgtgaaagtgcttccttatttccacttctaccgtggtgctgatggccagctcgagtccttctcatgttctcttgctaagtttcagaagataaaagatgccatcagactacacaacactgatcgttgcagcatcggtccagccaagggacctgaagggtttacgttggattctttatccgtccagacgaatgcagccaaaccagctggatcaagttgaaatgccagatactgagctcaatattctgtacatccgagatcttctgctactgtaacaatctttggttgctgaagcaaatactgagcttaatattctgtatatcagtaatttttttggtataaatggataactcctgaagc

SEQ ID NO: 39675 - protein, 243 aa, Zea mays subsp. mays
MAGVVRLSTTSVQTLGVSSPPFTSFAATLSSPPLPPPTPNLNSDKRLRPLSSSPSCSSPHYPASGLASHSLLRRPNSKVVRVKVDESVAETEPPKWWERNAPNMVDIHSTEEFLKALSEAGERLVIVEFYGTWCASCRALFPKLCKTAVENPNILFLKVNFDENKPMCKSLNVKVLPYFHFYRGADGQLESFSCSLAKFQKIKDAIRLHNTDRCSIGPAKGPEGFTLDSLSVQTNAAKPAGSS

SEQ ID NO: 39676 - protein, 140 aa, Zea mays subsp. mays
MVDIHSTEEFLKALSEAGERLVIVEFYGTWCASCRALFPKLCKTAVENPNILFLKVNFDENKPMCKSLNVKVLPYFHFYRGADGQLESFSCSLAKFQKIKDAIRLHNTDRCSIGPAKGPEGFTLDSLSVQTNAAKPAGSS

SEQ ID NO: 39677 - DNA, 863 bp, Zea mays subsp. mays
aaaaacctaacaagaaagcttgtgttaaacttgtttccttactaacttgtccgattttctcattaggccatggctccttccgctgcctcttcaaacactaaagaaggagaatctggtgaggaaggatatactgcattggagaaacatgtagccttcttcgacaggaacggagacggcgtcatttatccttgggaaacctaccaaggatttagagcgataggggtagggcgtctcccgtcagctattgctggtctctttatcaacatgggacttagccagaaaactcgcccggggaagggattctcgctgttgtttccaatagaagtgaagaatagtcacttttgcatccatggtagtgtcactgaagtatacgacaagaacggaagatttgtggaatcgaaattcgaggagatattcaagaagcatgctcgctcacatcgaaatgctctcacttacaaggaacttcttcaattgcttaagtctaacagagaccctggagactttggaggatggattgcagcatacggagaatggaaattattatatgaattatgcaaagatgaagatggtttattgacgagagaggcagtaaaaggcgccttcgatggcagcattttcagaaaattggagaaagaacgattatcttcttctcataagaagaaagaaaaaagaagacgttaaatattcccaaagcccattcatccatcatcttcaacgttacaaattaatagatacacttatgtgactagtgtgtatcttatatgaaaatggtttgttgttgtgatgcattctttacataaacatatatgatatttttgtgtaatattccgataataccattagaaaatatagttatgacatgc

SEQ ID NO: 39678 - protein, 203 aa, Zea mays subsp. mays
MAPSAASSNTKEGESGEEGYTALEKHVAFFDRNGDGVIYPWETYQGFRAIGVGRLPSAIAGLFINMGLSQKTRPGKGFSLLFPIEVKNSHFCIHGSVTEVYDKNGRFVESKFEEIFKKHARSHRNALTYKELLQLLKSNRDPGDFGGWIAAYGEWKLLYELCKDEDGLLTREAVKGAFDGSIFRKLEKERLSSSHKKKEKRRR

SEQ ID NO: 39679 - protein, 138 aa, Zea mays subsp. mays
MGLSQKTRPGKGFSLLFPIEVKNSHFCIHGSVTEVYDKNGRFVESKFEEIFKKHARSHRNALTYKELLQLLKSNRDPGDFGGWIAAYGEWKLLYELCKDEDGLLTREAVKGAFDGSIFRKLEKERLSSSHKKKEKRRR

SEQ ID NO: 39680 - DNA, 846 bp, Zea mays subsp. mays
atattgttctcgagctctcctctgttctaactaatcttcgtgtctagataaagatgagtttatgttcagagatctctctacattctgttcctctttggagtagagcatgttctgtttataatggggacgatcaagactcttttctactctaccctgagcttctttcctctccattgaacaagtctcttgtgatcaaaacctttgattcgtctggcgttgtctctgtcggagaatacaaagtcaaagctaggctttcctccactcttcagagtattttcgacaagtatggtgacattgcatcagattccaagatccagtctctctccacacggacgtaccatctcgagactctagccgaggttgttcttgaactccagtcaacgcctctgcatcggctgactgaatcacgagctagtgagattctagcgattgttaaggacatagaaaccgcgaagatccgagtaagttggttccgttctgttcttgaggaggttgttgaggcaaccaggtttataaaaagacatgatacggtagctagagagaaagaggtgtgcgagcaaggattggttcttgccaagcaagaaatggagttgagtttgaagaagcttgcagaaaaggaaaaagagatgagggagttccgagagagattgatgaagacaacagggaaactggggtctctggagatgaagaggtcgtgtcttgacaagagattcgagtttctgagatctaaggtcgagaagtttcagggtcaatctgtttttacggacattttgtgaagcatctaatgtcaagaacttctatgattacatatagatcacatgattagaaatttgaacaaatattcac

SEQ ID NO: 39681 - protein, 240 aa, Zea mays subsp. mays
MSLCSEISLHSVPLWSRACSVYNGDDQDSFLLYPELLSSPLNKSLVIKTFDSSGVVSVGEYKVKARLSSTLQSIFDKYGDIASDSKIQSLSTRTYHLETLAEVVLELQSTPLHRLTESRASEILAIVKDIETAKIRVSWFRSVLEEVVEATRFIKRHDTVAREKEVCEQGLVLAKQEMELSLKKLAEKEKEMREFRERLMKTTGKLGSLEMKRSCLDKRFEFLRSKVEKFQGQSVFTDIL

SEQ ID NO: 39682 - DNA, 825 bp, Zea mays subsp. mays
aattaattaaaaatgattccacagtagatgcgaaaaagcagtcgtctcctctcaccggcattaaaccaaaccaaaccagaaatctagagactccttcctttctccttgttcctccgagagagagtattgtgtgaatctgggttttcgaatcgtgatattgttgtggaatagatcggatcgatggcgaatctgtacgtgaaagcggctccaccgccggatatgaacaggaacacggagtggttcatgtacccaggggtgtggaccacttatatactcatcctcttcttcggatggctcgttgttctctccctctctggctgttcccctgggatggcttggactgttgttaatctcgctcacttcgttgtaacgtatcactcctttcactggatgaaaggaacgccttttgcagacgaccagggagtctacaatggtctcacctggtgggaacagatggacaacggtcagcaacttacccgcaaccgcaagttccttaccgttgttcctgttgtcctgtacttgatagcatcacatacaacagattacaggcatccatggctattcctcaacacactcgctgtgatggttctagttgtggccaagttccctaacatgcacaaggtgcgcatcttcgggatcaacggtgataagtaacgttctttagcaaaactcagatccatttcttttctggcaagagaaaagtggatataaccaaacacatgtatgtataaaatgttgatatgagttggtttggagttgtcggatattttgtaagtaactttgaagctttgaatttcttcttttttatgttttcttttttaatat

SEQ ID NO: 39683 - protein, 157 aa, Zea mays subsp. mays
MANLYVKAAPPPDMNRNTEWFMYPGVWTTYILILFFGWLVVLSLSGCSPGMAWTVVNLAHFVVTYHSFHWMKGTPFADDQGVYNGLTWWEQMDNGQQLTRNRKFLTVVPVVLYLIASHTTDYRHPWLFLNTLAVMVLVVAKFPNMHKVRIFGINGDK

SEQ ID NO: 39684 - protein, 144 aa, Zea mays subsp. mays
MNRNTEWFMYPGVWTTYILILFFGWLVVLSLSGCSPGMAWTVVNLAHFVVTYHSFHWMKGTPFADDQGVYNGLTWWEQMDNGQQLTRNRKFLTVVPVVLYLIASHTTDYRHPWLFLNTLAVMVLVVAKFPNMHKVRIFGINGDK

SEQ ID NO: 39685 - protein, 136 aa, Zea mays subsp. mays
MYPGVWTTYILILFFGWLVVLSLSGCSPGMAWTVVNLAHFVVTYHSFHWMKGTPFADDQGVYNGLTWWEQMDNGQQLTRNRKFLTVVPVVLYLIASHTTDYRHPWLFLNTLAVMVLVVAKFPNMHKVRIFGINGDK

SEQ ID NO: 39686 - DNA, 568 bp, Zea mays subsp. mays
agggatttgtctgtgtaaaaatggacatgggggaagagaaggaagtagtttctctgggaactctgagtaagaagatggatgattttgcaaaggctagagattgggagaagtatcacagcccaaggaacctccttttagccatggtgggtgaagtgggagagttatcagagatattccaatggagaggggaagtggaaagaggacttccggattggaaagaagaagacaaagttcatcttggtgaagaattatcagatgtgttgttgtatctggtgaggctttctgatgtttgtggtgtcgatttgggcaaggccgctctgcggaaactcgagctcaatgccattaagtacccagcacccaaacagactgatcattgtgttggtgaacattcaagcgacaatactaagttgaccgaagataattaatctctgttttttctcaaaaaaaaaaaaaaaaatcctaatgtgagttgttgactcttgctttgtacaacttttccattggtctctgtattgttgctttccctgtcttgcactgaatctttttacattagagttaacctttttac

SEQ ID NO: 39687 - protein, 140 aa, Zea mays subsp. mays
GFVCVKMDMGEEKEVVSLGTLSKKMDDFAKARDWEKYHSPRNLLLAMVGEVGELSEIFQWRGEVERGLPDWKEEDKVHLGEELSDVLLYLVRLSDVCGVDLGKAALRKLELNAIKYPAPKQTDHCVGEHSSDNTKLTEDN

SEQ ID NO: 39688 - protein, 134 aa, Zea mays subsp. mays
MDMGEEKEVVSLGTLSKKMDDFAKARDWEKYHSPRNLLLAMVGEVGELSEIFQWRGEVERGLPDWKEEDKVHLGEELSDVLLYLVRLSDVCGVDLGKAALRKLELNAIKYPAPKQTDHCVGEHSSDNTKLTEDN

SEQ ID NO: 39689 - protein, 132 aa, Zea mays subsp. mays
MGEEKEVVSLGTLSKKMDDFAKARDWEKYHSPRNLLLAMVGEVGELSEIFQWRGEVERGLPDWKEEDKVHLGEELSDVLLYLVRLSDVCGVDLGKAALRKLELNAIKYPAPKQTDHCVGEHSSDNTKLTEDN

SEQ ID NO: 39690 - DNA, 960 bp, Zea mays subsp. mays
acttttttcttcttctttctattgttggtatctcagtgtgatctctcatcataagttggttttttttctttgatctagatggagacggagaagaaaaatagcaaggagctaggtctgaaacacctagggttcgtgagagttgcggcgatccatgttcttgttagcctctcgagcctctatgactacgcaaaacaaaactccggtcctcttaaaccagcggtggggaaggtggaaggagccgtcaccaccgtcgtcacccctgtctacaataaactcaaggattttccagatactctcctcctctttctagatcacaaaggtcggtgaagtttcgtacaagtttgataagcatgctccaccagtggctaagaaagtagtaagtcaagctagtgtattgatccagaagactacagagaaggctcaacgctttgtgaaagaggctcgtactggtggtcctaaagctgcttttaactatgctgcagccgagtacaagtgtttccttgtgactaactcggttagagtctgggccaaactcaaccggtttaaaccgattcatgcagtggggaacaaagcttttcccgtggctgcacacttgtctggtatttacaacgatctggtgacggacatgactcagatgggttaccctgtggttggttatcttccgttggttcctgttgatgacattgtcaaggcttatgaaaaggaggaaggtggagcgccaaagaacggagatgctactgatggaaacaagtcgtcgtctgattcggacactgattgataatatgcttgtgtgatgattgaagacgtttggttggttgggtttggctacttatgtaaatgatcttattaggccctctcttgtttttttttagctagtgtttaatttcttggtggtgtgacaatgtgatgcgtttgtttctgtcttttttcaaccaggagaaatataatattgagcaacat

SEQ ID NO: 39691 - protein, 82 aa, Zea mays subsp. mays
METEKKNSKELGLKHLGFVRVAAIHVLVSLSSLYDYAKQNSGPLKPAVGKVEGAVTTVVTPVYNKLKDFPDTLLLFLDHKGR

SEQ ID NO: 39692 - protein, 52 aa, Zea mays subsp. mays
MFLLASRASMTTQNKTPVLLNQRWGRWKEPSPPSSPLSTINSRIFQILSSSF

SEQ ID NO: 39693 - protein, 50 aa, Zea mays subsp. mays
MTQMGYPVVGYLPLVPVDDIVKAYEKEEGGAPKNGDATDGNKSSSDSDTD

SEQ ID NO: 39694 - DNA, 940 bp, Zea mays subsp. mays
aattaaagttttcccgaagaagaagtcctttttccttcattttatctttctctctctctcttttgtttttttttttgtaatgaaatgggagagatggagatggaagaaatcgaagcagttctcgagaaaatctgcgatctgcacgacaagctcagcgacgagattcacttgatttcgcgctctcacttcctcaaatcggttaaaccagctaccagatcggagaagaggaagagccacggcttaaactccgccgaagagaagccacagggatacgtcttcatcaagggcttccccgttaacgataacgacgcagcgattcaagaggccaagagtcttaacgcgattcgaaccgcgcttgagcacctcgaagaccagctcgagttcttccatacgatacatacacagcaacgaacagagagggatgtagcagttgctcggcttgaacaaagcaggatgttactagcgaagagattggctgaacaccacggcaagagctacggagttctagatgaaactcttgccttcgttgggagcattaaaacctccacaaattttgtttacaactcctctccaaacacagccggggcatactctactcctcctgatggaccaaagtcgaactttgtaatcaacgcctttgcgtggactttcgggttggccaaaagagcacttggattcaaccatgtgagaggcgtactaggaaacgccgctatattcgctataagcatggtcgctatgctacatcttcagcaagttgcttctactgaacatcatcgtctagggaagaaacagaggaaaacatacagaagagagatgtcttcatctgacataagcttggaccacttggacgtcatgatggctcgtggttaaagattaaagaccagatatcgaacttgtctacacgtgatactctgacttgcagccatgggaatataatacc

SEQ ID NO: 39695 - protein, 261 aa, Zea mays subsp. mays
MGEMEMEEIEAVLEKICDLHDKLSDEIHLISRSHFLKSVKPATRSEKRKSHGLNSAEEKPQGYVFIKGFPVNDNDAAIQEAKSLNAIRTALEHLEDQLEFFHTIHTQQRTERDVAVARLEQSRMLLAKRLAEHHGKSYGVLDETLAFVGSIKTSTNFVYNSSPNTAGAYSTPPDGPKSNFVINAFAWTFGLAKRALGFNHVRGVLGNAAIFAISMVAMLHLQQVASTEHHRLGKKQRKTYRREMSSSDISLDHLDVMMARG

SEQ ID NO: 39696 - protein, 258 aa, Zea mays subsp. mays
MEMEEIEAVLEKICDLHDKLSDEIHLISRSHFLKSVKPATRSEKRKSHGLNSAEEKPQGYVFIKGFPVNDNDAAIQEAKSLNAIRTALEHLEDQLEFFHTIHTQQRTERDVAVARLEQSRMLLAKRLAEHHGKSYGVLDETLAFVGSIKTSTNFVYNSSPNTAGAYSTPPDGPKSNFVINAFAWTFGLAKRALGFNHVRGVLGNAAIFAISMVAMLHLQQVASTEHHRLGKKQRKTYRREMSSSDISLDHLDVMMARG

SEQ ID NO: 39697 - protein, 256 aa, Zea mays subsp. mays
MEEIEAVLEKICDLHDKLSDEIHLISRSHFLKSVKPATRSEKRKSHGLNSAEEKPQGYVFIKGFPVNDNDAAIQEAKSLNAIRTALEHLEDQLEFFHTIHTQQRTERDVAVARLEQSRMLLAKRLAEHHGKSYGVLDETLAFVGSIKTSTNFVYNSSPNTAGAYSTPPDGPKSNFVINAFAWTFGLAKRALGFNHVRGVLGNAAIFAISMVAMLHLQQVASTEHHRLGKKQRKTYRREMSSSDISLDHLDVMMARG

SEQ ID NO: 39698 - DNA, 627 bp, Zea mays subsp. mays
accaagcaaacccaaatcaattccacttactagttactactactacatcgatctcagtttagcacctctagaaaaatcaatggcgcccaaggcagcagagaagaagcccgcggagaagaagccggccgagaaagcaccggcggagaagaagccaaaggccgggaagaagctcccgaaggatccctccgccgtcgccggagacaagaagaagaagcggtccaagaagagcgtcgagacatacaagatctacatcttcaaggtgctgaagcaggtccaccccgacatcgggatctcgagcaaagccatggggatcatgaacagtttcatcaacgacatcttcgagaagcttgccggcgagtcttccaagctcgcgaggtacaacaagaagccgaccatcacttccagggagattcagacggcggtgagactcgtcttgcctggagagctggcgaaacacgctgtttccgaagggaccaaggcggtgactaagttcacgagctcctgaactgtctggaatgtctgaattagagtttctttgtagaatgtcctttctcttgtgttttgcaatctcgtgttttgtaaagtactgcgaattggtatgtttggaatctaatgtcttgtctttgt

SEQ ID NO: 39699 - protein, 167 aa, Zea mays subsp. mays
PSKPKSIPLTSYYYYIDLSLAPLEKSMAPKAAEKKPAEKKPAEKAPAEKKPKAGKKLPKDPSAVAGDKKKKRSKKSVETYKIYIFKVLKQVHPDIGISSKAMGIMNSFINDIFEKLAGESSKLARYNKKPTITSREIQTAVRLVLPGELAKHAVSEGTKAVTKFTSS

SEQ ID NO: 39700 - protein, 141 aa, Zea mays subsp. mays
MAPKAAEKKPAEKKPAEKAPAEKKPKAGKKLPKDPSAVAGDKKKKRSKKSVETYKIYIFKVLKQVHPDIGISSKAMGIMNSFINDIFEKLAGESSKLARYNKKPTITSREIQTAVRLVLPGELAKHAVSEGTKAVTKFTSS

SEQ ID NO: 39701 - DNA, 762 bp, Zea mays subsp. mays
ggagaaaaattagggtttttatttcctttctcgcatagtctctgtctcgattgttgccgatcgagcgatggaaagatccgatcctccttcaccgaagcgtcagaagacggaggaggaaacgacctgctataacggccgtccggaggatttcgattccgacgagtgctccgacgaggagatgcacctgttcgaccaagagttggataggatcggcgggggttatgaaatcgacttcaagaaatttcgctactgttttgggtggaaaccactggatctggacgatagtacaatggtcgatgagcctgaaaccaacagagatttcatcgcttcgttggcgaaactggctcttaccaagcataacgcagacagaggaacaagcttggaactgggaaaggttttgattgccaactttcatctatcttgtggattgactttctacatctcattccaagtcaatgatccttcagatggtaatcagacgaaaccctaccgagctgtggttcgctactttcctggagacattgaagttgtctcttgcaatcccaaagattgatggattctctgagagagagagagcgtttgtagcaatccacctgcttgtttctgatatcatcacacatctaccctacctatgtatcatctatctatctacggtcttatctaagaaactgctagctcttttcttgtttatgttttcaacttgtttgctttgtgttgatgtttaagtggatttgatgattaatataatattggtactgtagt

SEQ ID NO: 39702 - protein, 161 aa, Zea mays subsp. mays
MERSDPPSPKRQKTEEETTCYNGRPEDFDSDECSDEEMHLFDQELDRIGGGYEIDFKKFRYCFGWKPLDLDDSTMVDEPETNRDFIASLAKLALTKHNADRGTSLELGKVLIANFHLSCGLTFYISFQVNDPSDGNQTKPYRAVVRYFPGDIEVVSCNPKD

SEQ ID NO: 39703 - protein, 124 aa, Zea mays subsp. mays
MHLFDQELDRIGGGYEIDFKKFRYCFGWKPLDLDDSTMVDEPETNRDFIASLAKLALTKHNADRGTSLELGKVLIANFHLSCGLTFYISFQVNDPSDGNQTKPYRAVVRYFPGDIEVVSCNPKD

SEQ ID NO: 39704 - protein, 89 aa, Zea mays subsp. mays
MILQMVIRRNPTELWFATFLETLKLSLAIPKIDGFSERERAFVAIHLLVSDIITHLPYLCIIYLSTVLSKKLLALFLFMFSTCLLCVDV

SEQ ID NO: 39705 - DNA, 830 bp, Zea mays subsp. mays
ctgttctgtcttaaatcagagtttttgctcctttctccactcatctcttcgctagaaacaaaaaaaatggctttgcaaatgcagacctccactacgatcttcaaaaaccccacaccatctactgccgccgatgcgctcactggaagattcttcccagcaactgtcgcggttcgccgggaaacgttaacggcgtggcgtgaagtcatatgcagcagcggtggagttggagacgccgggaagaaaaaagcggtacctaactcgaactacgtagtgcctttggacaagttctcgtcctcttcctccatcactcggcctttgattgagatacttcgcgatctcaacaagaagatccctgataacatcgtcaagagccacgatcctggatccagtgctgcttcttctggctttatcccttggttccatgctaatcgtatgctcagcttctacgcacctggttggtgtggggaggttcgtgacgtcattttctcagagaatggtaatgtcactgttgtttatcgtcttaccattcgtggctctgatggtgaggcacaccgcgaatcgacagggacagtaacgatcactgatgatcacatcgaggatccagttgctgcagctgaggaaatggcattttgcagagcatgtgctcgatttggtctcggcttgtatctctatcacgaagagtaggcccgtgtacacttcaagtgtgcttaccgtttttggttgaacaagtctctatcaacttgttgagagacccttatgcgttctagaatgctaaaatatatgtaatgatgtctacaaacaaagttataataacattataagcatatgat

SEQ ID NO: 39706 - protein, 227 aa, Zea mays subsp. mays
LFCLKSEFLLLSPLISSLETKKMALQMQTSTTIFKNPTPSTAADALTGRFFPATVAVRRETLTAWREVICSSGGVGDAGKKKAVPNSNYVVPLDKFSSSSSITRPLIEILRDLNKKIPDNIVKSHDPGSSAASSGFIPWFHANRMLSFYAPGWCGEVRDVIFSENGNVTVVYRLTIRGSDGEAHRESTGTVTITDDHIEDPVAAAEEMAFCRACARFGLGLYLYHEE

SEQ ID NO: 39707 - protein, 205 aa, Zea mays subsp. mays
MALQMQTSTTIFKNPTPSTAADALTGRFFPATVAVRRETLTAWREVICSSGGVGDAGKKKAVPNSNYVVPLDKFSSSSSITRPLIEILRDLNKKIPDNIVKSHDPGSSAASSGFIPWFHANRMLSFYAPGWCGEVRDVIFSENGNVTVVYRLTIRGSDGEAHRESTGTVTITDDHIEDPVAAAEEMAFCRACARFGLGLYLYHEE

SEQ ID NO: 39708 - protein, 201 aa, Zea mays subsp. mays
MQTSTTIFKNPTPSTAADALTGRFFPATVAVRRETLTAWREVICSSGGVGDAGKKKAVPNSNYVVPLDKFSSSSSITRPLIEILRDLNKKIPDNIVKSHDPGSSAASSGFIPWFHANRMLSFYAPGWCGEVRDVIFSENGNVTVVYRLTIRGSDGEAHRESTGTVTITDDHIEDPVAAAEEMAFCRACARFGLGLYLYHEE

SEQ ID NO: 39709 - DNA, 889 bp, Zea mays subsp. mays
ttttaggctcgtgaaaaaaaccctactctcctctcctcttttaccccttccaaaaattacgccggcggcgaagccaaaactcttttaaggctagcagagaggatcgtgagcatggcggaaggagctaacaacgggacgaggcgcccaaggccgaacctactaatcacggggactcccggtaccggtaaatcgacgacggcttctgctctggcggaagccacgaacttccgttacatctgcgtcggagatctggtcaaagagaagaacttgcacgatggttgggacgatcagttcgagtgccacgtcattaacgaagacctggtgtgtgatgagcttgaagatgtaatagaaggaggaggtgtcattgtagattaccacggctgtgacttctttcccgagcgttggtttgatcgtgttgtcgtccttcaaactgagaactctgtcttgtatgatcgtttaaccaagaggggttattcgggaaccaagcttactaacaacatcgagtgcgagatcttccaagtcctgctcgaagaagctagagatagttaccaagaggagattgtcatcgcgctgcaaagtgacacaatcgaagatatctctgacaatgtcgcaagtttgacggaatggattaccacatggcatggcactggcagccctgagaaatgttgatgacaatgcatcttgcaatttactagtttcttttgatgggttctgtgtcggccacgcttgcaatttgtatactaatattctgaaagacaatgcagctgttgcactcagcttatgtatgttccctttgatacttattaaaagaaagcttgtcttatcttccctcatcatgttgtaatgttcagagtgacatatgttgtatgttattaccgtattagtcact

SEQ ID NO: 39710 - protein, 185 aa, Zea mays subsp. mays
MAEGANNGTRRPRPNLLITGTPGTGKSTTASALAEATNFRYICVGDLVKEKNLHDGWDDQFECHVINEDLVCDELEDVIEGGGVIVDYHGCDFFPERWFDRVVVLQTENSVLYDRLTKRGYSGTKLTNNIECEIFQVLLEEARDSYQEEIVIALQSDTIEDISDNVASLTEWITTWHGTGSPEKC

SEQ ID NO: 39711 - DNA, 719 bp, Zea mays subsp. mays
aagagataaagaaaataaaacttcacaagacagaacacagagagagagagatgagccgttgctgctctcttgggctctgtgccccgaatgcgttgtctctttcttcaacccctcgcagtgtcaaagctcctctctctattacatctcacaccaaacccatctctaacaccgattctcttcttcataatattgccaagatgagagcaaaggctggtgacttctttggagcaaagaagacaatctttgcagctcaactcgggacagttcttgccacgattgatcacccggccttggcaataactggagtcaaccacgagcaggaactgagcagcgtcgtgctcgatatcagtatcatatcggtctggtacttcctagtaatgccaccaattatcatgaactggctgagagtaagatggtacagaaggaagttcttcgagatgtatctacagttcatgtgcgtcttcatgttcttccccgggctacttctatgggcaccatttctcaatttcagaaagttcccaagagatccgtctatgaagtatccttgggacaaaccaaaagacccttccactatcaagaacggttaccttaagtacccatttgctcagccagaagattatgactactaaaatcttgatttacagaaagtttgttatatatatcttgtgactgtatatactcttcttgcctactcaggcttaaggctctatattcaatat

SEQ ID NO: 39712 - protein, 208 aa, Zea mays subsp. mays
EIKKIKLHKTEHREREMSRCCSLGLCAPNALSLSSTPRSVKAPLSITSHTKPISNTDSLLHNIAKMRAKAGDFFGAKKTIFAAQLGTVLATIDHPALAITGVNHEQELSSVVLDISIISVWYFLVMPPIIMNWLRVRWYRRKFFEMYLQFMCVFMFFPGLLLWAPFLNFRKFPRDPSMKYPWDKPKDPSTIKNGYLKYPFAQPEDYDY

SEQ ID NO: 39713 - protein, 192 aa, Zea mays subsp. mays
MSRCCSLGLCAPNALSLSSTPRSVKAPLSITSHTKPISNTDSLLHNIAKMRAKAGDFFGAKKTIFAAQLGTVLATIDHPALAITGVNHEQELSSVVLDISIISVWYFLVMPPIIMNWLRVRWYRRKFFEMYLQFMCVFMFFPGLLLWAPFLNFRKFPRDPSMKYPWDKPKDPSTIKNGYLKYPFAQPEDYDY

SEQ ID NO: 39714 - protein, 143 aa, Zea mays subsp. mays
MRAKAGDFFGAKKTIFAAQLGTVLATIDHPALAITGVNHEQELSSVVLDISIISVWYFLVMPPIIMNWLRVRWYRRKFFEMYLQFMCVFMFFPGLLLWAPFLNFRKFPRDPSMKYPWDKPKDPSTIKNGYLKYPFAQPEDYDY

SEQ ID NO: 39715 - DNA, 493 bp, Zea mays subsp. mays
atattatattaaacacagtaaaaattcaaacaacttaacatatacaaataattaactagacatgaagatcatggtcttgacactcatggttttcgtcatacttctgacattgtttccggctccaaacgaagcggcagacacaaatgtggaagcagcatgtgacccaaagcagcttcagccttgcctggccgcgattactggaggaggacagccctcgggtgactgttgtgcaaagctgaaggagcaacaaccatgcttgtgtgggttttctaagaaccctgcttttgctcagtacattagctctcccaactctcgcaaagtcctaaccgcttgtggtattccttacccaagttgttaaaactcttaagagtttttacaaataaataaataacgagtaaggaagatgaataaattatatctagctgttttttatgaaataaaataaccgttagtatgtaatgtttatatggttaaataaagtttaccttctcat

SEQ ID NO: 39716 - protein, 98 aa, Zea mays subsp. mays
MKIMVLTLMVFVILLTLFPAPNEAADTNVEAACDPKQLQPCLAAITGGGQPSGDCCAKLKEQQPCLCGFSKNPAFAQYISSPNSRKVLTACGIPYPSC

SEQ ID NO: 39717 - protein, 95 aa, Zea mays subsp. mays
MVLTLMVFVILLTLFPAPNEAADTNVEAACDPKQLQPCLAAITGGGQPSGDCCAKLKEQQPCLCGFSKNPAFAQYISSPNSRKVLTACGIPYPSC

SEQ ID NO: 39718 - protein, 90 aa, Zea mays subsp. mays
MVFVILLTLFPAPNEAADTNVEAACDPKQLQPCLAAITGGGQPSGDCCAKLKEQQPCLCGFSKNPAFAQYISSPNSRKVLTACGIPYPSC

SEQ ID NO: 39719 - DNA, 1099 bp, Zea mays subsp. mays
acaactaaatctaattaagaaaaaaacagagtctgtctttgactttccaaaaacagagcctttttttttgccttaacacacatcaatggcgattcctgtgattgatttctccaagatcaatggcgaagaaagggagaaaacactctctgaaatcgctaaagcttgcgaagaatgggggtttttccagctggtgaaccatgggatcccattggagcttcttaacaaggtgaagaagctggcctcagattgctacaaaacagagagagaagaagcgttcaagacctcaactcccgtgaagctactcaacgagttgcttgagaaaaactctggagagaagctcgagaacgttgactgggaagatgtcttcactctattagaccacaaccaaaacgaatggccatccaacacttctggcctcaaagagacgatggtagaatacagagaagaagtgaggaaactagcgagcaagatgatggaagtgatggacgagaacttgggtttgcctaaaggttacataaagaaagcttttaacgaaggcatggaagacggagaagagacggctttctttggaaccaaagttagccattacccaccttgtcctcatccagagcttgtcaatggccttaggtctcataccgatgcaggaggtgtcgttttgttgttccaagacgatgagtacgatggccttcaagtgttgaaagatggagagtggatcgatgttcagccgatgcctaatgctattgttatcaacactggtgatcagattgaagttcttagcaacggaaggtacaagagtgcatggcacagggtgttggcgagggaggaaggaaacaggaggtccattgcttccttctacaatccgtcgtacaaggcggccattgggccagcggcggaggaaggaagtgagaagaagtatccaaagtttgtgtttggagattatatggatgtctatgcaaaccagaagttcatgcctaaggagcctcgttttcttgctgtgaagactctctaaatgttgttaattgaatcactcttttattcaacgtcatgatgtattttcacttttaagttattaaatgccaagtttaataattgataaaat

SEQ ID NO: 39720 - protein, 307 aa, Zea mays subsp. mays
MAIPVIDFSKINGEEREKTLSEIAKACEEWGFFQLVNHGIPLELLNKVKKLASDCYKTEREEAFKTSTPVKLLNELLEKNSGEKLENVDWEDVFTLLDHNQNEWPSNTSGLKETMVEYREEVRKLASKMMEVMDENLGLPKGYIKKAFNEGMEDGEETAFFGTKVSHYPPCPHPELVNGLRSHTDAGGVVLLFQDDEYDGLQVLKDGEWIDVQPMPNAIVINTGDQIEVLSNGRYKSAWHRVLAREEGNRRSIASFYNPSYKAAIGPAAEEGSEKKYPKFVFGDYMDVYANQKFMPKEPRFLAVKTL

SEQ ID NO: 39721 - protein, 193 aa, Zea mays subsp. mays
MVEYREEVRKLASKMMEVMDENLGLPKGYIKKAFNEGMEDGEETAFFGTKVSHYPPCPHPELVNGLRSHTDAGGVVLLFQDDEYDGLQVLKDGEWIDVQPMPNAIVINTGDQIEVLSNGRYKSAWHRVLAREEGNRRSIASFYNPSYKAAIGPAAEEGSEKKYPKFVFGDYMDVYANQKFMPKEPRFLAVKTL

SEQ ID NO: 39722 - protein, 179 aa, Zea mays subsp. mays
MMEVMDENLGLPKGYIKKAFNEGMEDGEETAFFGTKVSHYPPCPHPELVNGLRSHTDAGGVVLLFQDDEYDGLQVLKDGEWIDVQPMPNAIVINTGDQIEVLSNGRYKSAWHRVLAREEGNRRSIASFYNPSYKAAIGPAAEEGSEKKYPKFVFGDYMDVYANQKFMPKEPRFLAVKTL

SEQ ID NO: 39723 - DNA, 736 bp, Zea mays subsp. mays
aaaaatctcagaagaagctacgaggcagccatggcttccatttcatcatgcacagctccttgtgcgagcttattctcctctaccaccaaacctatcaacagttcttcttcttcttcttcctcctcagtaaggctctcctctcggtttcttggaactcgggttgtgaagctcagtatccgactcggaccctccaatgggtctagagccacttgctggttcaagttcggaaagaacggcgtcgatgctgagaatgctggaatctatggcagccaatcacgtgatgatttcgatagagacgatgtcgaacagtatttcaactacatggggatgcttgcggttgaaggtacctatgataagatggaggctcttctaaaccaaaacattcatcctgtagatattcttctgatgttagcagcctcagaaggagacaagcctaagatagaggagctcctcagagccggcgctgactacactgttaaggacgctgatggaagaaccgctcttgacagagccagcagtgaggagatccgtgatttgatccttggatctctcactcaaaaggcttgacaagatctcctctagcttcttcttacagagaaggtgatgtctgttttttggtaccttggaatcttagtcgtttcaatgttctcttacttttacgtaattggtccgaaccctaagtgtgcttcaactttaaagtaaagattgaatctattaccagaagctttacaaaacc

SEQ ID NO: 39724 - protein, 188 aa, Zea mays subsp. mays
KNLRRSYEAAMASISSCTAPCASLFSSTTKPINSSSSSSSSSVRLSSRFLGTRVVKLSIRLGPSNGSRATCWFKFGKNGVDAENAGIYGSQSRDDFDRDDVEQYFNYMGMLAVEGTYDKMEALLNQNIHPVDILLMLAASEGDKPKIEELLRAGADYTVKDADGRTALDRASSEEIRDLILGSLTQKA

SEQ ID NO: 39725 - protein, 178 aa, Zea mays subsp. mays
MASISSCTAPCASLFSSTTKPINSSSSSSSSSVRLSSRFLGTRVVKLSIRLGPSNGSRATCWFKFGKNGVDAENAGIYGSQSRDDFDRDDVEQYFNYMGMLAVEGTYDKMEALLNQNIHPVDILLMLAASEGDKPKIEELLRAGADYTVKDADGRTALDRASSEEIRDLILGSLTQKA

SEQ ID NO: 39726 - DNA, 668 bp, Zea mays subsp. mays
aaaccctagccgccgccagaccattcgtttctcgcgaggccatcgcttcggcatccggaagaaatggccaagtcgaagaaccacacggcgcacaaccagtcgttcaaggcgcacaagaacggcattaagaaacccaagcgccaccgccagacctccaccaaggggatggaccccaagttcctgaggaacctgaggtccatcccattgctcaaggtatggcgtttggcacgggtagtgccatggcacacagggctgttgactctgtattaggtccccggaccatccagcatgagactcttgccacagaagctcctgctgctgcccctgctgctccagcgatgaatgctgatgcttgcagcttccattctaaggctttccaagattgtctcaacaactatggcagcgagatcagcaagtgccagttctacctagacatgctgaacgagtgccgccgtggtggtgtgtctgtctaagctgcctctgggattattcatggattttctttccggatgggggtatctcattaataaggcaccgtgaaacttcgaccatctccacagcttgaaaccaaacttcctgggattaatttattttgttatcctatggtgttggaacagactttttgtctcttgatcataaatatttaaacgaacctgttatgttggagt

SEQ ID NO: 39727 - protein, 85 aa, Zea mays subsp. mays
MAFGTGSAMAHRAVDSVLGPRTIQHETLATEAPAAAPAAPAMNADACSFHSKAFQDCLNNYGSEISKCQFYLDMLNECRRGGVSV

SEQ ID NO: 39728 - protein, 77 aa, Zea mays subsp. mays
MAHRAVDSVLGPRTIQHETLATEAPAAAPAAPAMNADACSFHSKAFQDCLNNYGSEISKCQFYLDMLNECRRGGVSV

SEQ ID NO: 39729 - protein, 68 aa, Zea mays subsp. mays
MAKSKNHTAHNQSFKAHKNGIKKPKRHRQTSTKGMDPKFLRNLRSIPLLKVWRLARVVPWHTGLLTLY

SEQ ID NO: 39730 - DNA, 1025 bp, Zea mays subsp. mays
atcaacggataaaaaaaaaaaaaacgaaaccaacacaagaacagaagaagctctcatccttaaagggcaaagcttcctctgtaactacaatcaatggctcacttcatagaccttaacacttttaccaacactttactctcgacatctaaactacgtgagactcggaagatcgtaaaatcgagcgggtttgtttgtaggaaaaccaccactgatgactcggtacagcttccaagacggatgatgacacttggatttgctgtctccatagctctcactggaactttcagcggtaatgatgtttcgttggcacaagacaacaatgggttttggatagatggtcctcttccaactcctcctatttacaacaatatcgtgaacgagcagacaggaacgagatctttcttgaagaaaggagtgtatgtagctgacatcgggaccaaaggaagaacgtatagagttaaaaagtatgctttcgatctcttagctatggaggatttgatcggaccagacactttaaactatgttaaaaagtacttgaggcttaaatccaccttcttgttctacgatttcgacaatctcatctctgctgctgcctcccaagacaagctgcctctcactgatttggccaatagattgttcgacaactttgaaaagcttgaagatgcagctaaaacgaagaacttagccgagacagaatcgtgttacaaagatacaaagtttcttctccaagaagttatgaccagaatggcctgaagccagttcagttttcactggtttacttgctgctgaagatcactcattcacggtggataacactctgtgatcatgaaatgtaatcttgcataccaacacaaaaaaaaaaaaccttaaaagctaataagaaaaatgtaatattgggagaatgataatctagccaattctcttgtatgtataaatgcttgttttaagctgcttggaccagtttatctcccaacccttatatatagtttctacacattaatgaatgagagtatacacattgacat

SEQ ID NO: 39731 - protein, 219 aa, Zea mays subsp. mays
MAHFIDLNTFTNTLLSTSKLRETRKIVKSSGFVCRKTTTDDSVQLPRRMMTLGFAVSIALTGTFSGNDVSLAQDNNGFWIDGPLPTPPIYNNIVNEQTGTRSFLKKGVYVADIGTKGRTYRVKKYAFDLLAMEDLIGPDTLNYVKKYLRLKSTFLFYDFDNLISAAASQDKLPLTDLANRLFDNFEKLEDAAKTKNLAETESCYKDTKFLLQEVMTRMA

SEQ ID NO: 39732 - protein, 171 aa, Zea mays subsp. mays
MMTLGFAVSIALTGTFSGNDVSLAQDNNGFWIDGPLPTPPIYNNIVNEQTGTRSFLKKGVYVADIGTKGRTYRVKKYAFDLLAMEDLIGPDTLNYVKKYLRLKSTFLFYDFDNLISAAASQDKLPLTDLANRLFDNFEKLEDAAKTKNLAETESCYKDTKFLLQEVMTRMA

SEQ ID NO: 39733 - protein, 170 aa, Zea mays subsp. mays
MTLGFAVSIALTGTFSGNDVSLAQDNNGFWIDGPLPTPPIYNNIVNEQTGTRSFLKKGVYVADIGTKGRTYRVKKYAFDLLAMEDLIGPDTLNYVKKYLRLKSTFLFYDFDNLISAAASQDKLPLTDLANRLFDNFEKLEDAAKTKNLAETESCYKDTKFLLQEVMTRMA

SEQ ID NO: 39734 - DNA, 681 bp, Zea mays subsp. mays
ctctcgcgccgccgcggaacacaacaccgcaccacactacccagcggaatccgcccacccgcacccggagcagaggagatatgtcgcaggggaagggaggagcgtcgaggaaggaggaggtggtcaccagggagtacaccatcaacctccacaagcgcctccacggctgcacattcaagaagaaggcacccaacgccatcaaggagatcaggaagtttgcgcagaaggccatgggcaccacggacattaggattgatgtgaagctcaacaagcacatctggagcagcgggatcaggagcgtgccgcggagggttcgtgtgaggatcgcccgcaagaggaacgacgaggaggatgccaaggaggagctctactcccttgtcaccgtcgcggagatccccgccgagggcttgaaagggctggggaccaaggtcgttgacgataccgattaagctgtcgcgttatctacatctttagagagttcctagtttgtatttgcaacagcaaaaccttttgtattcacaaagttgtctatttccgcaacagaattgcatggctagttttcttttcattgctgctgcatccttttcttcattatcgccccctgggaagtcgctgctcatgggacaagtttggaaatctcccatgtgtggtgtttacgttatcaagttgtgttccttggat

SEQ ID NO: 39735 - protein, 148 aa, Zea mays subsp. mays
LAPPRNTTPHHTTQRNPPTRTRSRGDMSQGKGGASRKEEVVTREYTINLHKRLHGCTFKKKAPNAIKEIRKFAQKAMGTTDIRIDVKLNKHIWSSGIRSVPRRVRVRIARKRNDEEDAKEELYSLVTVAEIPAEGLKGLGTKVVDDTD

SEQ ID NO: 39736 - protein, 122 aa, Zea mays subsp. mays
MSQGKGGASRKEEVVTREYTINLHKRLHGCTFKKKAPNAIKEIRKFAQKAMGTTDIRIDVKLNKHIWSSGIRSVPRRVRVRIARKRNDEEDAKEELYSLVTVAEIPAEGLKGLGTKVVDDTD

SEQ ID NO: 39737 - protein, 86 aa, Zea mays subsp. mays
LSRRRGTQHRTTLPSGIRPPAPGAEEICRRGREERRGRRRWSPGSTPSTSTSASTAAHSRRRHPTPSRRSGSLRRRPWAPRTLGLM

SEQ ID NO: 39738 - DNA, 786 bp, Zea mays subsp. mays
acattctaaaccaaaagatcattgcaaagcttttggattcttcgagcttcttcaacaatgactctctccctccgaatcgctccgtcaccggtatcgttccgttactctccggctccgtccaccccctccggcgtcggattacgtccggccaagcagcgctgccggatcccgaactcaggcgtcgcggcgaaaacaggatcatgttctagcggtggtgttttagatttaaggaagaggatcgccggttcctgtgtggcgaggtgtagcttagaaacggtgaatgtcagtgtcggcgaggtgacggaggttgacaaggacacgttttggccaatcgttaaagccgctggtgataagcttgttgtcctcgacatgtacactcagtggtgtggtccgtgcaaagttatggctcctaaatacaaagagctatcagagaagtaccaggacatggtgtttcttaagctcgactgcaacgaagaaaacaagccagtggcacaggagctagggattagagtggttccaacctttaagatcttgaaggacaacaaggtgataaaggaagtggccggggctaaatttgatgagttgctttcagccattgaggcagcgaggtcaggctgagcctctctgtctctacatttcactccatgctgtagagtattaggacaattctccatcaatatgtgtgtaaactctctgctgttcctgaaactggattcagttgtaatgtaacagtgtgtgtataaacgctgggaagttatgaaatatgatgagctatatgctttatat

SEQ ID NO: 39739 - protein, 186 aa, Zea mays subsp. mays
MTLSLRIAPSPVSFRYSPAPSTPSGVGLRPAKQRCRIPNSGVAAKTGSCSSGGVLDLRKRIAGSCVARCSLETVNVSVGEVTEVDKDTFWPIVKAAGDKLVVLDMYTQWCGPCKVMAPKYKELSEKYQDMVFLKLDCNEENKPVAQELGIRVVPTFKILKDNKVIKEVAGAKFDELLSAIEAARSG

SEQ ID NO: 39740 - DNA, 852 bp, Zea mays subsp. mays
acacatttctaagagacagataaaaaggagttaaaaaaattaagcaatggcggagaaagaagaagtgaagcttctgggaatatgggcgagccctttcagccgtcggatcgagatggctctcaaactcaaagggataccgtacgattacgttgaagaaatattggagcacaaaagccctttgcttcttgcactcaaccccatccacaagaaggtccctgttcttgtccacaatggcaaaaccattctcgagtctcaagtgattcttgaatacatcgatgagacttggaaacagaatccacttctccctcaggatccttacgagagatccaaggctcgattcttagctaaactcgtcgatgagcagatcatcactgcgggttttgtatcaatggcaagagcagacgagaaaggaagagaggctttggccgagcagacaagagaactgattatgaatctggagaaggaacttgtcggaaaagatttcttcggtggtaagagtgtcgggtttttggatttggtcgcccggaagtatgattccgttttgtttggagagaggttgggaaggaattggattgaaagtgattacagaggagaagtttccagaatacagcagatgggtgaagaacttggagaaggttgaggctgtgaaagattgtattcctccaagagagaaacatgttgaacacatgaattatatgggggagagaatcagatccgcttagaggaaagtcatatttggttcggtgtttcaatgttttaagttactgtaatgtttgaaccttgtttatctgttgtgtttctcaaaaaaagcttgtctttgttttttctttctaataaacaaagttattttat

SEQ ID NO: 39741 - protein, 197 aa, Zea mays subsp. mays
MAEKEEVKLLGIWASPFSRRIEMALKLKGIPYDYVEEILEHKSPLLLALNPIHKKVPVLVHNGKTILESQVILEYIDETWKQNPLLPQDPYERSKARFLAKLVDEQIITAGFVSMARADEKGREALAEQTRELIMNLEKELVGKDFFGGKSVGFLDLVARKYDSVLFGERLGRNWIESDYRGEVSRIQQMGEELGEG

SEQ ID NO: 39742 - protein, 175 aa, Zea mays subsp. mays
MALKLKGIPYDYVEEILEHKSPLLLALNPIHKKVPVLVHNGKTILESQVILEYIDETWKQNPLLPQDPYERSKARFLAKLVDEQIITAGFVSMARADEKGREALAEQTRELIMNLEKELVGKDFFGGKSVGFLDLVARKYDSVLFGERLGRNWIESDYRGEVSRIQQMGEELGEG

SEQ ID NO: 39743 - DNA, 1117 bp, Zea mays subsp. mays
aaagcttctcctctcttcctccgcccatctcggctttgcttcctccggtgaggcgtttaaaatggcggcagccttacctttatctccggttagccatcagttatgtcggagaagcaacaggttctggtacaacgctttgactcccaggttctgttcgccggttttctcgactacttctccctgtctcatcggcgtgaaaggaatcggctcgtcgagtcagttacggccacgccaccctctgatctcttcagcggcttcgactgattatctattgcatgacgtcggagccacggtggcagttcttggtggagcctacgcgcttgtcttactcttcgagagtctcacgaagcgagacgtgattccacagagattgagcagaaagcttgtgcatatactctcaggtctgcttttcgtactctcgtggccaatcttcagcgcatcaacggaggctcgatactttgctgcttttgttccgttagtgaatggcctaaggcttgttgtcaatggattatctgtctcccctaactccacgctaatccaatccgtcactagggaaggacgaccagaagagttgcttaaaggtccattgttctacgttctagcccttctcgttgctgcggttttcttctggagagattctcctaccggtatgatctcgctggcaatgatgtgtggtggcgacggaatagctgatatcatgggacgtaagtacggatcatataagataccttacaacccaagaaagagcttggcgggaagtatctccatgttcatattcggcttcttcatctccatcggattactttactattactcaagccttgggtatcttcacatgaactgggaaacaacctttacgagagtcgcgattgtctcattggtcgctacgttggttgagtcactacccatcaccgatcaaatagacgacaacgtttcggttcctctggcttcaattttggctgcttacctaagttttggatattagactcatccctcataaactgtataagttgtatttgtatgaatacgacctgggaatgcagctacgaatatgctaccagttgtatatattttactattactgctcaaagattcataactaatacaatttcgggtt

SEQ ID NO: 39744 - protein, 327 aa, Zea mays subsp. mays
KLLLSSSAHLGFASSGEAFKMAAALPLSPVSHQLCRRSNRFWYNALTPRFCSPVFSTTSPCLIGVKGIGSSSQLRPRHPLISSAASTDYLLHDVGATVAVLGGAYALVLLFESLTKRDVIPQRLSRKLVHILSGLLFVLSWPIFSASTEARYFAAFVPLVNGLRLVVNGLSVSPNSTLIQSVTREGRPEELLKGPLFYVLALLVAAVFFWRDSPTGMISLAMMCGGDGIADIMGRKYGSYKIPYNPRKSLAGSISMFIFGFFISIGLLYYYSSLGYLHMNWETTFTRVAIVSLVATLVESLPITDQIDDNVSVPLASILAAYLSFGY

SEQ ID NO: 39745 - protein, 307 aa, Zea mays subsp. mays
MAAALPLSPVSHQLCRRSNRFWYNALTPRFCSPVFSTTSPCLIGVKGIGSSSQLRPRHPLISSAASTDYLLHDVGATVAVLGGAYALVLLFESLTKRDVIPQRLSRKLVHILSGLLFVLSWPIFSASTEARYFAAFVPLVNGLRLVVNGLSVSPNSTLIQSVTREGRPEELLKGPLFYVLALLVAAVFFWRDSPTGMISLAMMCGGDGIADIMGRKYGSYKIPYNPRKSLAGSISMFIFGFFISIGLLYYYSSLGYLHMNWETTFTRVAIVSLVATLVESLPITDQIDDNVSVPLASILAAYLSFGY

SEQ ID NO: 39746 - DNA, 940 bp, Zea mays subsp. mays
cagccccaggaaacctataaaattccttagatccaaactccgagaatggccggtggatttaccatcaacataaacattccggctggtgaaggatttaccattagcattaacccaaactctgctgcagcggtaggggctgcctttggccgaattcaacctccggctggtgaaggacttaacattagtattaacccaaactctgcaccagctggtaatctatgtacgaatccgtcctctcaaaagcccctagaatgctctccaggaaaggctaaccctaaggttttctttgatatggcggtgcgcggcaaagctgttggtcggatcgtgatggagctctttgccgacacgaccccacggacggcagagaatttccgcgccctctgtacaggcgagaaaggcatggggaagaagggtaagccacttcattacaaaggatcaatcatccaccatatgtgccccgattatatcattggcggaggagatttcacttacgaaaggaaaggatacggaggcgaatcaatctacgccggaggttttttcgaggatgagaacttcatcaaaaagcacaccggtccgggtatcctctccatgaacaacaatggtcctgacaccaaccaatctcagtttttgatctccttgaccgagaactgggaactcgacgatctacacgtcgtcttcggccaagttgttgaaggattggatgtggtcaggatcatatcacacgaacctcttaaggacaagttttccaagcccgtcgtgatcgactgcggtcagattaaatagatctgacagagatattttccaactacaatggttgcttgcttgctctgtgtccttttgatgcttggtgcgtttttaattttgttacttttgtttttttatcttttttcttgaaatttagattggctaccattgaataatgattacaaccatcatcagt

SEQ ID NO: 39747 - protein, 245 aa, Zea mays subsp. mays
MAGGFTININIPAGEGFTISINPNSAAAVGAAFGRIQPPAGEGLNISINPNSAPAGNLCTNPSSQKPLECSPGKANPKVFFDMAVRGKAVGRIVMELFADTTPRTAENFRALCTGEKGMGKKGKPLHYKGSIIHHMCPDYIIGGGDFTYERKGYGGESIYAGGFFEDENFIKKHTGPGILSMNNNGPDTNQSQFLISLTENWELDDLHVVFGQVVEGLDVVRIISHEPLKDKFSKPVVIDCGQIK

SEQ ID NO: 39748 - protein, 163 aa, Zea mays subsp. mays
MAVRGKAVGRIVMELFADTTPRTAENFRALCTGEKGMGKKGKPLHYKGSIIHHMCPDYIIGGGDFTYERKGYGGESIYAGGFFEDENFIKKHTGPGILSMNNNGPDTNQSQFLISLTENWELDDLHVVFGQVVEGLDVVRIISHEPLKDKFSKPVVIDCGQIK

SEQ ID NO: 39749 - protein, 151 aa, Zea mays subsp. mays
MELFADTTPRTAENFRALCTGEKGMGKKGKPLHYKGSIIHHMCPDYIIGGGDFTYERKGYGGESIYAGGFFEDENFIKKHTGPGILSMNNNGPDTNQSQFLISLTENWELDDLHVVFGQVVEGLDVVRIISHEPLKDKFSKPVVIDCGQIK

SEQ ID NO: 39750 - DNA, 612 bp, Zea mays subsp. mays
atttttgtcttctgtgctttcgttatctcaggaagagaaaaaaaaaatctcgattcagcgatcaaacaagcgtaagatcagatggcggcacctttcacgttgaggaaaatcggcgttcctccgaactcagcgaacctaacggaagctcgccgccgtgtattcgatttcttcagagcagcctgcagatccatccctaccatcatggacatttacaatctccaagacgtcgtcgcgccttcccagctccgcttcgcaatctctgctcagattcgtaacaacgctcacgtcaccgaccctaaggtaattgatcttcttctattcaagggaatggaagagctgactgacatagtggatcacgcaaagcagcgtcatcacattatcggtcaatacgtggtgggtgaagggctcgtgcagaatacaggaagcaaggatcaaggaaagtctgattttctcaagaatttctacaccagcaactacttttgaactcctcatgtttccagtattgtattgcatgacttgaagaagtttcttcccaataataattagaccttttcatttgtatgagtttggtcaaacctctctaaattttatctggaacagtgtttgttgtgc

SEQ ID NO: 39751 - protein, 133 aa, Zea mays subsp. mays
MAAPFTLRKIGVPPNSANLTEARRRVFDFFRAACRSIPTIMDIYNLQDVVAPSQLRFAISAQIRNNAHVTDPKVIDLLLFKGMEELTDIVDHAKQRHHIIGQYVVGEGLVQNTGSKDQGKSDFLKNFYTSNYF

SEQ ID NO: 39752 - protein, 93 aa, Zea mays subsp. mays; identical to SEQ ID NO: 131

SEQ ID NO: 39753 - protein, 90 aa, Zea mays subsp. mays
FCLLCFRYLRKRKKKSRFSDQTSVRSDGGTFHVEENRRSSELSEPNGSSPPCIRFLQSSLQIHPYHHGHLQSPRRRRAFPAPLRNLCSDS

SEQ ID NO: 39754 - DNA, 579 bp, Zea mays subsp. mays
acatcaagcattgttaccaaaactcaaaaagttatcaagaaaaagatgagggactttactgctaagaccatgttactgtttgtgattacacttttggtggtgattgcgtatcatgagggagaagccatatcatgttcgcaggtaaacatgtttttagcaccatgtttgtcttatctaagaggtgtaggaaacccgtctcaaccgtgttgcgccggtcttaatagcctaaaagccgctgcgcctgggaaggcagaaagacaaacagcttgtcaatgcttgaagagtgtatctaatacaatccctggaatcaacgatgataatgccaaacaactaccttctaaatgtggtgttgacttgggtgttcctttctctaagagtgtggactgtaacagcataaactgaaaagaggactatgtaccaacggctatgcagctataataagtggatgtcctgaaagagcatacacattatgaacaaataaatcaattggatactttagtaataatcttctgatcttatactttatacatgtaatcatatagttattggcaaaataaatttccacatttacatattcct

SEQ ID NO: 39755 - protein, 133 aa, Zea mays subsp. mays
TSSIVTKTQKVIKKKMRDFTAKTMLLFVITLLVVIAYHEGEAISCSQVNMFLAPCLSYLRGVGNPSQPCCAGLNSLKAAAPGKAERQTACQCLKSVSNTIPGINDDNAKQLPSKCGVDLGVPFSKSVDCNSIN

SEQ ID NO: 39756 - protein, 118 aa, Zea mays subsp. mays
MRDFTAKTMLLFVITLLVVIAYHEGEAISCSQVNMFLAPCLSYLRGVGNPSQPCCAGLNSLKAAAPGKAERQTACQCLKSVSNTIPGINDDNAKQLPSKCGVDLGVPFSKSVDCNSIN

SEQ ID NO: 39757 - protein, 110 aa, Zea mays subsp. mays
MLLFVITLLVVIAYHEGEAISCSQVNMFLAPCLSYLRGVGNPSQPCCAGLNSLKAAAPGKAERQTACQCLKSVSNTIPGINDDNAKQLPSKCGVDLGVPFSKSVDCNSIN

SEQ ID NO: 39758 - DNA, 662 bp, Zea mays subsp. mays
acagctctcagcttctctatcacctcagtagaagaaaatgtcgatcattccaatcaacgatcgccggagtatctctcccggcgatagaatctgggagccattcgaactcatgaacaccttcttcgacttcccctcaccttctctcctcctctctcgccacttcccctcactttccccattctcttcaccatccaccgtcgaaacccagctgaactggacggagactccgacggctcacgttttcaaggcgtatcttcctgggacgactcaggacgaagcgatcgtgttcgtggacgacgaaggatacctccagatctgcgcgggagacaacaagttcatgagcagattcaagcttcccgacaacgccctgaaggatcaggtgacggcgtggatggaggaggatgggttcctcgtcgtgttcgtcgcgaaagatggtgctttttcccagacgccaccggagatcgaggataatcgcaatgtgagagtcgtggagatcaccggcgatgatgattaaattaagtctgggcctgtgtactaaaataaacagagtaatcatgtctttaggtttgtgatcggaagtcctttgtgaccttgtgtgatgaagtctcttgtgttataaaccaaactgtgtcgttttactgaattgaaaaaaaaagttatgt

SEQ ID NO: 39759 - protein, 158 aa, Zea mays subsp. mays
MSIIPINDRRSISPGDRIWEPFELMNTFFDFPSPSLLLSRHFPSLSPFSSPSTVETQLNWTETPTAHVFKAYLPGTTQDEAIVFVDDEGYLQICAGDNKFMSRFKLPDNALKDQVTAWMEEDGFLVVFVAKDGAFSQTPPEIEDNRNVRVVEITGDDD

SEQ ID NO: 39760 - protein, 134 aa, Zea mays subsp. mays
MNTFFDFPSPSLLLSRHFPSLSPFSSPSTVETQLNWTETPTAHVFKAYLPGTTQDEAIVFVDDEGYLQICAGDNKFMSRFKLPDNALKDQVTAWMEEDGFLVVFVAKDGAFSQTPPEIEDNRNVRVVEITGDDD

SEQ ID NO: 39761 - DNA, 795 bp, Zea mays subsp. mays
attcacaaccacacctctaaacatttctcacaattttttggtctaaagaaggaatataactctttttctcttttcctttttgcttttacacaatcttataagaaactttagcctgagagagcgagagacggtgtaggatgcactacacgcgcatctcaccaattatattgccttctccaccacccaccatcaccgccaccgttgaatccagtggtagaggaaccatgttagccaccctattcatggccctccttctcccttgcgttggcatgtgcattgtcttcctcatatatctcttcttcttgtggtgctccacacgtcgccgtattgagcgtctaagattttctgaaccggttaagctggtcaccggtaaaggtctctctgtctcggagctcgagaaactcccaaaactcaccggaaaagagcttgccttagaagtgaggtcgacagagtgccctgtttgccttgaaaatatcgagagttgccaatcggcccgtctggttcccggttgcaaccatgggtttcaccaattatgtgctgacacgtggttatctaaccacacggtgtgtcctgtttgtcgtggcgatcttgctcagaaggttcctcaacttagtaacaatcatagtccatgttgaaaacatgatcccaaatactcttcttctttattcattttcttctacttgtcttgttttctctctgttaacattttagttttttcatcgtttgctgtagtaggtggatatggtttgtacagtaaattgtaatagagtcaagtacaaaatttcctgttttgtc

SEQ ID NO: 39762 - protein, 165 aa, Zea mays subsp. mays
MHYTRISPIILPSPPPTITATVESSGRGTMLATLFMALLLPCVGMCIVFLIYLFFLWCSTRRRIERLRFSEPVKLVTGKGLSVSELEKLPKLTGKELALEVRSTECPVCLENIESCQSARLVPGCNHGFHQLCADTWLSNHTVCPVCRGDLAQKVPQLSNNHSPC

SEQ ID NO: 39763 - protein, 136 aa, Zea mays subsp. mays
MLATLFMALLLPCVGMCIVFLIYLFFLWCSTRRRIERLRFSEPVKLVTGKGLSVSELEKLPKLTGKELALEVRSTECPVCLENIESCQSARLVPGCNHGFHQLCADTWLSNHTVCPVCRGDLAQKVPQLSNNHSPC

SEQ ID NO: 39764 - protein, 130 aa, Zea mays subsp. mays
MALLLPCVGMCIVFLIYLFFLWCSTRRRIERLRFSEPVKLVTGKGLSVSELEKLPKLTGKELALEVRSTECPVCLENIESCQSARLVPGCNHGFHQLCADTWLSNHTVCPVCRGDLAQKVPQLSNNHSPC

SEQ ID NO: 39765 - DNA, 1023 bp, Zea mays subsp. mays
acaatttaaactctctttttttttgtaatgacaggttgcttcagcttctctgaagtaatagaacgggcttacaaatacgggttcaaaagatccggtttacgacccgtaaccatcgacttgaaagacggaaccgtggtccatttctgggtatccaagacccgagacgaatccaaacccaacctcctcctcatccacgggctcggagcttctgccatctggcaatggtacgacgtcgcacgacgcctctctcctcatttcaacctcttcatccccgacctcgttttcttcggcggatcctccacgacccgacccgaaagatccgacgttttccaggcccagacgcttatgcgggccttagaggcccagtccgtgaaacgtttcagcctcgtcggccttagctacggcgggttcgtcggttaccgaatggcgtcgatgtacggagacgccgtggagaaggtggtgatatgctgcgccgccgtgtgcgtggaggagaaggacatgagggacggcgttttctccgtgtcggatcttgatgaagcttccaagattctcgtgccggagtctgtgaagaagctacgggaacttatcggttacatcttctacaagccggcgttggcgagactggttcctccttgtctgctccatgatttcatcgaacatgcattgaccagagataatttaaaagaaaagagggagatgatcaaagacataccaaaagatagaatagtctcagagattccaaaactcgcacagccaactttgattatatggggagagcatgatcacgtgtttccactggagatgggatacagacttaagaagcacttaggagataatgggaagcttgttgtcatcaaaagaactggtcatatctttaactttgaaaaacctaaaacttatgttaaacatctgaagtcttttcttatgcagactaaacaacatgttcctgtctctaacggatctgttaagtcttaaacatctgtattattttcatatcttgtaacgattattaacgcatgtagc

SEQ ID NO: 39766 - protein, 315 aa, Zea mays subsp. mays
MTGCFSFSEVIERAYKYGFKRSGLRPVTIDLKDGTVVHFWVSKTRDESKPNLLLIHGLGASAIWQWYDVARRLSPHFNLFIPDLVFFGGSSTTRPERSDVFQAQTLMRALEAQSVKRFSLVGLSYGGFVGYRMASMYGDAVEKVVICCAAVCVEEKDMRDGVFSVSDLDEASKILVPESVKKLRELIGYIFYKPALARLVPPCLLHDFIEHALTRDNLKEKREMIKDIPKDRIVSEIPKLAQPTLIIWGEHDHVFPLEMGYRLKKHLGDNGKLVVIKRTGHIFNFEKPKTYVKHLKSFLMQTKQHVPVSNGSVKS

SEQ ID NO: 39767 - protein, 209 aa, Zea mays subsp. mays
MRALEAQSVKRFSLVGLSYGGFVGYRMASMYGDAVEKVVICCAAVCVEEKDMRDGVFSVSDLDEASKILVPESVKKLRELIGYIFYKPALARLVPPCLLHDFIEHALTRDNLKEKREMIKDIPKDRIVSEIPKLAQPTLIIWGEHDHVFPLEMGYRLKKHLGDNGKLVVIKRTGHIFNFEKPKTYVKHLKSFLMQTKQHVPVSNGSVKS

SEQ ID NO: 39768 - protein, 183 aa, Zea mays subsp. mays
MASMYGDAVEKVVICCAAVCVEEKDMRDGVFSVSDLDEASKILVPESVKKLRELIGYIFYKPALARLVPPCLLHDFIEHALTRDNLKEKREMIKDIPKDRIVSEIPKLAQPTLIIWGEHDHVFPLEMGYRLKKHLGDNGKLVVIKRTGHIFNFEKPKTYVKHLKSFLMQTKQHVPVSNGSVKS

SEQ ID NO: 39769 - DNA, 384 bp, Zea mays subsp. mays
aaaaaaaccctaatcgacatctggaggagagattcgttgaaagcaaaggaccgaccatgtatcttcagtgctatatcaacgaaaagggcgacaaggtttacaccactaagaaggaatcaccgctcgggttagccactgaatctgcccatccagcccgattctcccctgacgataaatattcaaaggagagagttacattgaagaagcgttttggtctcttaccgatccagggcgcacctgtcaagtactgaaaggcccaaaacactcggcttcctttgccttttgatcttctattcttgtctcttaattttagcttgacttttgtactgtctccaaatagtggattacttatgagattatgattcgtaatattttcatttatcc

SEQ ID NO: 39770 - protein, 82 aa, Zea mays subsp. mays
KNPNRHLEERFVESKGPTMYLQCYINEKGDKVYTTKKESPLGLATESAHPARFSPDDKYSKERVTLKKRFGLLPIQGAPVKY

SEQ ID NO: 39771 - protein, 64 aa, Zea mays subsp. mays
MYLQCYINEKGDKVYTTKKESPLGLATESAHPARFSPDDKYSKERVTLKKRFGLLPIQGAPVKY

SEQ ID NO: 39772 - protein, 43 aa, Zea mays subsp. mays
KKTLIDIWRRDSLKAKDRPCIFSAISTKRATRFTPLRRNHRSG

SEQ ID NO: 39773 - DNA, 709 bp, Zea mays subsp. mays
atattaatcatcccattcccagctatctatctcctagaaaaacaatctgattcttttcgcctaatattagctggagacgaaaccctagattttgtcaagctcgaagaagaagaaatcatggcaggagttggaccgatgacgcaagattgggagccggtggtgatccgaaagagagcccctaactccgccgccaagcgcgacgagaaaaccgtcaacgccgctcgtcgatccggcgccgatatcgaatccgtcagaaaatacaatgctggaaccaacaaggcagcctcaagtggcacatctctcaacactaaaaggcttgatgacgacactgagaacctcgctcatgagcgtgtgcctactgagcttaagaaagccattatgcaagctcgaactgacaagaagcttacccagtcccaacttgctcaaatcatcaatgagaagccacaagtgatccaagagtatgagtctggtaaagcgatccccaaccagcagatcctttctaagcttgagagagctcttggagctaaacttcgtggtaagaagtgatcatcatcaattcctgaagatgaacatcacttaattgcagtttcactattcttaatgactctgtggtaacaacaatcagtgctttgatgtaatgtcgtaacttttctaaagaacaatcttttctcatgtaagaaagatagaaccgtttgaatgtttggttgat

SEQ ID NO: 39774 - protein, 181 aa, Zea mays subsp. mays
ILIIPFPAIYLLEKQSDSFRLILAGDETLDFVKLEEEEIMAGVGPMTQDWEPVVIRKRAPNSAAKRDEKTVNAARRSGADIESVRKYNAGTNKAASSGTSLNTKRLDDDTENLAHERVPTELKKAIMQARTDKKLTQSQLAQIINEKPQVIQEYESGKAIPNQQILSKLERALGAKLRGKK

SEQ ID NO: 39775 - protein, 142 aa, Zea mays subsp. mays
MAGVGPMTQDWEPVVIRKRAPNSAAKRDEKTVNAARRSGADIESVRKYNAGTNKAASSGTSLNTKRLDDDTENLAHERVPTELKKAIMQARTDKKLTQSQLAQIINEKPQVIQEYESGKAIPNQQILSKLERALGAKLRGKK

SEQ ID NO: 39776 - protein, 136 aa, Zea mays subsp. mays
MTQDWEPVVIRKRAPNSAAKRDEKTVNAARRSGADIESVRKYNAGTNKAASSGTSLNTKRLDDDTENLAHERVPTELKKAIMQARTDKKLTQSQLAQIINEKPQVIQEYESGKAIPNQQILSKLERALGAKLRGKK

SEQ ID NO: 39777 - DNA, 706 bp, Zea mays subsp. mays
ataagagaaacgcaaagcaaacataatttttcatccataagtggaaaatggggaacattactaaaaaccagaccatgttactgcttgtttttacacttttaatggtaattgcgtaccatgagggagaagccatacaatgttcacagataaccatgtacttagcaccatgtttgtcctatgtaaaaggtggaggaaacccgcctcctccgtgttgcgccgggcttaataatctaaaagcctctgcgccggggaaaccagataaacaagcagcttgtcaatgcttgaagaatgtagctaatgccatttccggattcaacgatgacaatgccaaacaactccctgccaaatgtggcgttagtgtgggggtccctttctctaagagcgtggactgtaacagcataaactgaaaagaaggagtaccaaaggccatgcagctataatataaagtggatatcctgaaagagcaaaaagcattataacaaaactaattggatactttatacatgtaatcatatagctcttgtcaaaataaactgtggaattcctacatctacacagtcttttctagtactcagtctcatagaagggagctttaaaagtaatcttattaaaaagaaaacagtgcatagagagaaataaaagaagtttagtaaatgaccatagttataaattgagttgctctagtaatcccaaaatattgttcttg

SEQ ID NO: 39778 - protein, 119 aa, Zea mays subsp. mays
MGNITKNQTMLLLVFTLLMVIAYHEGEAIQCSQITMYLAPCLSYVKGGGNPPPPCCAGLNNLKASAPGKPDKQAACQCLKNVANAISGFNDDNAKQLPAKCGVSVGVPFSKSVDCNSIN

SEQ ID NO: 39779 - protein, 110 aa, Zea mays subsp. mays
MLLLVFTLLMVIAYHEGEAIQCSQITMYLAPCLSYVKGGGNPPPPCCAGLNNLKASAPGKPDKQAACQCLKNVANAISGFNDDNAKQLPAKCGVSVGVPFSKSVDCNSIN

SEQ ID NO: 39780 - protein, 101 aa, Zea mays subsp. mays
MVIAYHEGEAIQCSQITMYLAPCLSYVKGGGNPPPPCCAGLNNLKASAPGKPDKQAACQCLKNVANAISGFNDDNAKQLPAKCGVSVGVPFSKSVDCNSIN

SEQ ID NO: 39781 - DNA, 608 bp, Zea mays subsp. mays
atcggcctcagtcgcacatatctactatactatactctaggaagcaaggacaccaccgccatggcagccaagatgcttgcattgttcgctctcctagctctttgtgcaagcgccactagtgcgacccatattccagggcacttgccaccagtcatgccattgggtaccatgaacccatgcatgcagtactgcatgatgcaacaggggcttgccagcttgatggcgtgtccgtccctgatgctgcagcaactgttggccttaccgcttcagacgatgccagtgatgatgccacagatgatgacgcctaacatgatgtcaccattgatgatgccgagcatgatgtcaccaatggtcttgccgagcatgatgtcgcaaatgatgatgccacaatgtcactgcgacgccgtctcgcagattatgctgcaacagcaattaccattcatgttcaacccaatggccatgacgattccacccatgttcttacagcaaccctttgttggtgctgcattctagatagaaatatttgtgttgtatcgaataatgagttgacatgccatcgcgtgtgactcattattaacaataaaacaagtttcctcttattatctttt

SEQ ID NO: 39782 - protein, 170 aa, Zea mays subsp. mays
IGLSRTYLLYYTLGSKDTTAMAAKMLALFALLALCASATSATHIPGHLPPVMPLGTMNPCMQYCMMQQGLASLMACPSLMLQQLLALPLQTMPVMMPQMMTPNMMSPLMMPSMMSPMVLPSMMSQMMMPQCHCDAVSQIMLQQQLPFMFNPMAMTIPPMFLQQPFVGAAF

SEQ ID NO: 39783 - protein, 150 aa, Zea mays subsp. mays
MAAKMLALFALLALCASATSATHIPGHLPPVMPLGTMNPCMQYCMMQQGLASLMACPSLMLQQLLALPLQTMPVMMPQMMTPNMMSPLMMPSMMSPMVLPSMMSQMMMPQCHCDAVSQIMLQQQLPFMFNPMAMTIPPMFLQQPFVGAAF

SEQ ID NO: 39784 - protein, 146 aa, Zea mays subsp. mays
MLALFALLALCASATSATHIPGHLPPVMPLGTMNPCMQYCMMQQGLASLMACPSLMLQQLLALPLQTMPVMMPQMMTPNMMSPLMMPSMMSPMVLPSMMSQMMMPQCHCDAVSQIMLQQQLPFMFNPMAMTIPPMFLQQPFVGAAF

SEQ ID NO: 39785 - DNA, 630 bp, Zea mays subsp. mays
atactcaaaatctcagatcatatcgtcttctctttctctccctcccatctcgcaaaacccacgatcttaagatggaatccagtggcaatcatggagggatccagcaactgcttgctgctgaacaagaagctcagcaaatcgtcaatgccgctaggaccgcgaaaatggcaaggctgaagcaagccaaggaagaggctgagaccgagattgctgatcacaaaaccactacggagcattctttccagaggaagctcgaagagaccagtggagattcaggtgcaaacgtgaagaggcttgagcaagagactgatgagaagatcgagcagttgaagaacgaagcttccaggatttccagagatgttgtggacatgcttctcaaacatgtcaccactgtcaacaactgagatatatataccatccgtctttgagatggtgtcgagtgttatttttgagtggaattattcatcattcgtttcttttatggattccatgtttcaactgttgcttttgattttgaacttcagccttcagagttgctgtattcatctctctgaagacgtacagaatacagatcttttgtgtattgtaataaatttcagaacaaaaggaaaccaatgattttttttttgt

SEQ ID NO: 39786 - protein, 133 aa, Zea mays subsp. mays
TQNLRSYRLLFLSLPSRKTHDLKMESSGNHGGIQQLLAAEQEAQQIVNAARTAKMARLKQAKEEAETEIADHKTTTEHSFQRKLEETSGDSGANVKRLEQETDEKIEQLKNEASRISRDVVDMLLKHVTTVNN

SEQ ID NO: 39787 - protein, 110 aa, Zea mays subsp. mays
MESSGNHGGIQQLLAAEQEAQQIVNAARTAKMARLKQAKEEAETEIADHKTTTEHSFQRKLEETSGDSGANVKRLEQETDEKIEQLKNEASRISRDVVDMLLKHVTTVNN

SEQ ID NO: 39788 - protein, 86 aa, Zea mays subsp. mays
MLWTCFSNMSPLSTTEIYIPSVFEMVSSVIFEWNYSSFVSFMDSMFQLLLLILNFSLQSCCIHLSEDVQNTDLLCIVINFRTKGNQ

SEQ ID NO: 39789 - DNA, 841 bp, Zea mays subsp. mays
actattcgagcctccgccggattacaaatcgaagatgtcgtcgtcgccgttcgtgaagtcttatctcttcgcttacaattttctccaagcttcgtcatggacgatttcgcttctgagtatcgttagcagcgttttgtcgagcaagacgatcaatggcggcgcttactctgccgccggatatttgataagtgtgatgcaaactgctgctgttctagaagttcttcacggagccatgggaattgttccgagtggattcttgtctccgctgatgcaatggagtggaagaacacacttcatattggccattgttggacagatcaatgaggtccaggatttgccgtggctgtcaataactcttgtagcttggtgtatcggcgagatgattagatatcctcactatgctttaacttgccttggtagatgtccctattggctaacctatctcaggtacactggattcatcatcatctatccaacggggctggtgggtgaattgttgatcatgtacaaagcgcttccacatgttaaagaaaggaacctttatgcgaatttcttctctgttttccccttcagttactaccaattcctttgggccgtccttttggtctacccgttcctttggttgaagctttatctccagctgttcaaacaaagaaagtccaagcttggaaaagcagagaagcatcacggcaagagaaagagaatgtgaaaggcccttcaatcatctcctcagatatgtctatctttatccttgtttatgttatcgctctatgtgctgcctttaatttttgttttttcctttttttttttttaaagtttaaataatttaattatcatggcc

SEQ ID NO: 39790 - protein, 235 aa, Zea mays subsp. mays
LFEPPPDYKSKMSSSPFVKSYLFAYNFLQASSWTISLLSIVSSVLSSKTINGGAYSAAGYLISVMQTAAVLEVLHGAMGIVPSGFLSPLMQWSGRTHFILAIVGQINEVQDLPWLSITLVAWCIGEMIRYPHYALTCLGRCPYWLTYLRYTGFIIIYPTGLVGELLIMYKALPHVKERNLYANFFSVFPFSYYQFLWAVLLVYPFLWLKLYLQLFKQRKSKLGKAEKHHGKRKRM

SEQ ID NO: 39791 - protein, 224 aa, Zea mays subsp. mays
MSSSPFVKSYLFAYNFLQASSWTISLLSIVSSVLSSKTINGGAYSAAGYLISVMQTAAVLEVLHGAMGIVPSGFLSPLMQWSGRTHFILAIVGQINEVQDLPWLSITLVAWCIGEMIRYPHYALTCLGRCPYWLTYLRYTGFIIIYPTGLVGELLIMYKALPHVKERNLYANFFSVFPFSYYQFLWAVLLVYPFLWLKLYLQLFKQRKSKLGKAEKHHGKRKRM

SEQ ID NO: 39792 - protein, 171 aa, Zea mays subsp. mays
MQTAAVLEVLHGAMGIVPSGFLSPLMQWSGRTHFILAIVGQINEVQDLPWLSITLVAWCIGEMIRYPHYALTCLGRCPYWLTYLRYTGFIIIYPTGLVGELLIMYKALPHVKERNLYANFFSVFPFSYYQFLWAVLLVYPFLWLKLYLQLFKQRKSKLGKAEKHHGKRKRM

SEQ ID NO: 39793 - DNA, 1205 bp, Zea mays subsp. mays
cttcgattcgattcgtttcttcttcattcgacgccaaaaaaaacctaagtgctctgctgcaaactctttgttcctcagcgagaagaaaatctataaccaagagattggtttcaccgatctctctttctctatatctcctcgctgggtacggtctgtttaaaatcaaatctcaatgtcgtggaggaggattctccataatcactaggctctcttaccttctcaatctcatgctcacattctcttccttgtctatggcgtttactctcacctctcaaaagctctgcgtctttggccctgtgttgaatccttctttcccttactgcatcgccaatcactcctctgcctcccgttaattcatttacacaactcttgcctccttcaggctctactctcgatattttacttgtggtaccttctttacacattcctgtgagtctctactttaactgaagctcaagacctataatgatccaagaccagcctcttgttgtattctccctccggcgcaactctttcagacgccgatcctccataaccaacctcgacgacagaggctggactccgctccacgtcaaagctcgaaaaggcgatttgaaatccgtcaagcagctgctcgaccaagggtttgatgtcaacgctctagcgtggggacctaagtcgaaaggagtgagccctcttcaccttgctgcagagggaggtcatatagaagtcatggatctgcttcttgagcgtggggctaacattgatgcgaggacatggggctcctgcgggtggactcctctccacgctgcggctaaagagcggaagagagaagctgtgaagtttctggtggagaatggtgcgttcttgccggatgatataagtgatacgaggtttaatccgccggtgcattactgtcatgggctggagtgggcgtatgaggagatgaagaagcttaacagcgagtcttcctcttctggtggagacacatcttccagttctgagaactgagtctttgttgctgtgtttttttttttctcaggtcttgccgttgagaaaatgtcagaactcagcgttatggtttgtcagagaatgttatggttttgtgtttggtttaaaattgctatatgtgaaactgctggtatgctatgcataataaatcttctgtatgtgatacttttgtttgttctggatgaagcaaatatgagcacactggttttgatttc

SEQ ID NO: 39794 - protein, 174 aa, Zea mays subsp. mays
MIQDQPLVVFSLRRNSFRRRSSITNLDDRGWTPLHVKARKGDLKSVKQLLDQGFDVNALAWGPKSKGVSPLHLAAEGGHIEVMDLLLERGANIDARTWGSCGWTPLHAAAKERKREAVKFLVENGAFLPDDISDTRFNPPVHYCHGLEWAYEEMKKLNSESSSSGGDTSSSSEN

SEQ ID NO: 39795 - protein, 116 aa, Zea mays subsp. mays
SIRFVSSSFDAKKNLSALLQTLCSSARRKSITKRLVSPISLSLYLLAGYGLFKIKSQCRGGGFSIITRLSYLLNLMLTFSSLSMAFTLTSQKLCVFGPVLNPSFPYCIANHSSASR

SEQ ID NO: 39796 - protein, 92 aa, Zea mays subsp. mays
MDLLLERGANIDARTWGSCGWTPLHAAAKERKREAVKFLVENGAFLPDDISDTRFNPPVHYCHGLEWAYEEMKKLNSESSSSGGDTSSSSEN

SEQ ID NO: 39797 - DNA, 1049 bp, Zea mays subsp. mays
aagattacagaggcgatggcgattaacggcgaagatcgcatctccggcgaacgcccgatcatcatggtcaccaacgacgacgggatagacgcgcctggtctccgttctctcgttcgcgtcctcgtctccaccaacctctacgacgtccgcgtctgcgctcccgattcggagaagtctgctgttagtcacagtatcatatggagtagacctctcactgcacaccgtgttgagattgaaggagctgaggcctatgctgtttctggaacccctgcggattgcactgggttgggcttatcggaagcgctcttcccttctcttcctgacctggttcttagtggtataaacgttggtagcaactgtggctacaacatcgtctactctggaactgttgctggtgctcgtgaagccttcatttatgatgtgccttctgcctccatatcttatgattggaaacgtggagacatcaatgttaatgattttgttctctctgcccaagcttgcttgcctattatcaacggcatgctcagtgccatcaagaacaaaactcacccaacaaactgctttctgaacattgatttgcctactgatattgctaaccataagggatacaagctaactacacaaggtaaaagcttgggtaaaatgggttggagacaagtggaggaggaagcacaaggtgcgaagatgttgtcaacaatgtcaatggaaacagattcaggagtagtctcagacaacaacgacacttctgctcatcattcaaacgatagccgtttgttcaagagagagctaaggactgtggtggtggaagaaggcactgatcttcactttctgcgagaaggatatattacagtgacgccgataggagctctctctcaggttgatgtggattgccaaaactactacaaagaatggcttcccaagatttcttcatccttgtgatttcaccaaatgaaaacataaaactcttgtgatgatttatccattatggaccacagtttgtggtagacctattatcagtactcttttaagttattagctagttttcttgc

SEQ ID NO: 39798 - protein, 312 aa, Zea mays subsp. mays
KITEAMAINGEDRISGERPIIMVTNDDGIDAPGLRSLVRVLVSTNLYDVRVCAPDSEKSAVSHSIIWSRPLTAHRVEIEGAEAYAVSGTPADCTGLGLSEALFPSLPDLVLSGINVGSNCGYNIVYSGTVAGAREAFIYDVPSASISYDWKRGDINVNDFVLSAQACLPIINGMLSAIKNKTHPTNCFLNIDLPTDIANHKGYKLTTQGKSLGKMGWRQVEEEAQGAKMLSTMSMETDSGVVSDNNDTSAHHSNDSRLFKRELRTVVVEEGTDLHFLREGYITVTPIGALSQVDVDCQNYYKEWLPKISSSL

SEQ ID NO: 39799 - protein, 307 aa, Zea mays subsp. mays
MAINGEDRISGERPIIMVTNDDGIDAPGLRSLVRVLVSTNLYDVRVCAPDSEKSAVSHSIIWSRPLTAHRVEIEGAEAYAVSGTPADCTGLGLSEALFPSLPDLVLSGINVGSNCGYNIVYSGTVAGAREAFIYDVPSASISYDWKRGDINVNDFVLSAQACLPIINGMLSAIKNKTHPTNCFLNIDLPTDIANHKGYKLTTQGKSLGKMGWRQVEEEAQGAKMLSTMSMETDSGVVSDNNDTSAHHSNDSRLFKRELRTVVVEEGTDLHFLREGYITVTPIGALSQVDVDCQNYYKEWLPKISSSL

SEQ ID NO: 39800 - protein, 291 aa, Zea mays subsp. mays
MVTNDDGIDAPGLRSLVRVLVSTNLYDVRVCAPDSEKSAVSHSIIWSRPLTAHRVEIEGAEAYAVSGTPADCTGLGLSEALFPSLPDLVLSGINVGSNCGYNIVYSGTVAGAREAFIYDVPSASISYDWKRGDINVNDFVLSAQACLPIINGMLSAIKNKTHPTNCFLNIDLPTDIANHKGYKLTTQGKSLGKMGWRQVEEEAQGAKMLSTMSMETDSGVVSDNNDTSAHHSNDSRLFKRELRTVVVEEGTDLHFLREGYITVTPIGALSQVDVDCQNYYKEWLPKISSSL

SEQ ID NO: 39801 - DNA, 813 bp, Zea mays subsp. mays
agagatgtgtacgttggagaagcgtggtcaactcttcttgctgaaactcaccggcgacggcgaacaccgtctcaaccccaccttactcgacagcatcacctccgccatcacacagatccgttccgatccctcctcctcccaatcggtcctcatcacaacctccgacggcaaattcttctccaacggctacgatctcgccttggccgagtccaatccttctctccgccctgtcatggactccaaactccgatccctggtcgccgacctcatctccctccctatgccgacgatcgccgccgtgaccggccacgcctccgccgcggggttcgttctcgcgatgagccacgactatgtactgatgcgtagggatagagggtttttgtatatgagtgagttggacatcgagcttgtgattcctccgtggtttgcggcgatgatacggatgaagatcggttctcccgcggcgaggagagatgtgatgctgacggcggagaaggttacggcggagcggggtttggagatgggaatcgtggattctagttatggtagtgcggcggagacggttgaaggcgccgttaagttgggggaggagttagttagacgcgatgttgatggacacgtgtacggtgggatgagagaggctcttttaaaacaggttctccacacgattggttcaaatgagagcgtttccaatagaatgcgaaacagtggatctaaactgtaggttttttttttgtcaagtgtaggttgttcaaccacgaatataatttgtacgagttgataaaataaaaaataaaataaaaaatagagacc

SEQ ID NO: 39802 - protein, 240 aa, Zea mays subsp. mays
EMCTLEKRGQLFLLKLTGDGEHRLNPTLLDSITSAITQIRSDPSSSQSVLITTSDGKFFSNGYDLALAESNPSLRPVMDSKLRSLVADLISLPMPTIAAVTGHASAAGFVLAMSHDYVLMRRDRGFLYMSELDIELVIPPWFAAMIRMKIGSPAARRDVMLTAEKVTAERGLEMGIVDSSYGSAAETVEGAVKLGEELVRRDVDGHVYGGMREALLKQVLHTIGSNESVSNRMRNSGSKL

SEQ ID NO: 39803 - protein, 239 aa, Zea mays subsp. mays
MCTLEKRGQLFLLKLTGDGEHRLNPTLLDSITSAITQIRSDPSSSQSVLITTSDGKFFSNGYDLALAESNPSLRPVMDSKLRSLVADLISLPMPTIAAVTGHASAAGFVLAMSHDYVLMRRDRGFLYMSELDIELVIPPWFAAMIRMKIGSPAARRDVMLTAEKVTAERGLEMGIVDSSYGSAAETVEGAVKLGEELVRRDVDGHVYGGMREALLKQVLHTIGSNESVSNRMRNSGSKL

SEQ ID NO: 39804 - protein, 163 aa, Zea mays subsp. mays
MDSKLRSLVADLISLPMPTIAAVTGHASAAGFVLAMSHDYVLMRRDRGFLYMSELDIELVIPPWFAAMIRMKIGSPAARRDVMLTAEKVTAERGLEMGIVDSSYGSAAETVEGAVKLGEELVRRDVDGHVYGGMREALLKQVLHTIGSNESVSNRMRNSGSKL

SEQ ID NO: 39805 - DNA, 1020 bp, Zea mays subsp. mays
attctatttaaaaactatacgtttgtaacatttcatcagtcgccaagccgaaacaattcaaaatggctaccaccactgccgctgcagcctctggtatctttgggatccggatccaagatccaagttcgggagccggtagagtccaagccaagttcaatttcagcttcgggaaaaagaaaccagctccaccgccgaagaaaacaaagcagatccaaaacgacggagaccgactagtttggttccccggcgcaaacccgccggaatggctagacggttcgatgatcggagaccgtggattcgaccccttcggtttaggtaaaccggctgagtatcttcagtacgatttcgacgggcttgaccaaaacctcgccaagaacgtggcgggtggactccttggggtcaggcaggaatcgaaagagatcaacccgacgccgtttcagccctacactgaagtgttcgggatcgaacggttcagagaatgcgagctgatccatgggaggtgggccatgcttggtactcttggcgctcttgccgtcgaaggtctcaccggaatcgcctggcaagacgccggaaaggtggaactggtggaaggttcatcgtatttgggacagccattgccattttccttgacgacattgatatggatcgaggtgttagttgttggttacatagagttccagcgtaacgctgagctggatccggagaaacgtatttacccgggtgggtattttgacccgttgggactcgggtctgacccagagaagttggataccttgaagctggctgagatcaaacactctcgtctcgccatgatcgcattcctcatcttttcacttcaggcggcctttaccggcaaaggccccatcagcttcctcgctacttttagcagttaaaaatgagcctttatatctttgtgtttctatgtatgttttctaaaataatctaaaactaaaaatgcatgtttatcataaagaggctgtgatgtactatcgaccgtattaaatccgaacgagtttgttt

SEQ ID NO: 39806 - protein, 276 aa, Zea mays subsp. mays
MATTTAAAASGIFGIRIQDPSSGAGRVQAKFNFSFGKKKPAPPPKKTKQIQNDGDRLVWFPGANPPEWLDGSMIGDRGFDPFGLGKPAEYLQYDFDGLDQNLAKNVAGGLLGVRQESKEINPTPFQPYTEVFGIERFRECELIHGRWAMLGTLGALAVEGLTGIAWQDAGKVELVEGSSYLGQPLPFSLTTLIWIEVLVVGYIEFQRNAELDPEKRIYPGGYFDPLGLGSDPEKLDTLKLAEIKHSRLAMIAFLIFSLQAAFTGKGPISFLATFSS

SEQ ID NO: 39807 - protein, 204 aa, Zea mays subsp. mays
MIGDRGFDPFGLGKPAEYLQYDFDGLDQNLAKNVAGGLLGVRQESKEINPTPFQPYTEVFGIERFRECELIHGRWAMLGTLGALAVEGLTGIAWQDAGKVELVEGSSYLGQPLPFSLTTLIWIEVLVVGYIEFQRNAELDPEKRIYPGGYFDPLGLGSDPEKLDTLKLAEIKHSRLAMIAFLIFSLQAAFTGKGPISFLATFSS

SEQ ID NO: 39808 - DNA, 1060 bp, Zea mays subsp. mays
gggtttcgagattgaattccaatccaaaaaagagtcaatggcgtctcgtagatctcttctccttctcctccaagtcctttttgctacggttctttccgtctcggcctatctgccggagactggaagacttgccggagacaacgtcgtcgaagtcaatcgctcccagagagagtttgattattttgctctctctctccaatggcccggaacttactgccgtggaactcgccattgctgctccaaaaacgcttgctgtagaagctcggacactccaactcaattcaccatccgatttcttattacaacaataatttgaggataatcatctccaatactaatctcgtagatggactatggccggactataacgacggttcctggccttcatgttgctatcgatccgacttcaatgagaaggagatctcaacgttggtggatggcatggaaaagtactggcccagtctcagctgtggttctccgtcatcttgccatggtggaaaaggatcattttggggccatgagtgggagaaacatgggacttgctcttctcctgttattcgtgatgagtatagttacttcattaccacgcttaatctatacttcaagcataatgtcacggatgtcctttatcaagctggctatgttgcttccaacagcgagaagtatcctctaggaggtattgtcacagccattcagaatgcatttcatatcacccctgaagtagtatgcaaaagagatgcaatcgatgaaatacgtatatgcttctataaagatttcaagcccagggactgtgttggttcaaaagacatgacgtcgaaaaaatcatgtcccaagtacgtaagtttgccggaatacacgccattggatggtgaggctatggttctgaagatgccaacagatgaataagatctttcttctcttcttagaggcaatattcacatacaggactttgatgttgtaattttattgccaaacctataaacaacgaataaagattggcttactcttgttctatggggaatatgaatccgggctggttaatttttttttcttcttaaac

SEQ ID NO: 39809 - protein, 154 aa, Zea mays subsp. mays
MEKYWPSLSCGSPSSCHGGKGSFWGHEWEKHGTCSSPVIRDEYSYFITTLNLYFKHNVTDVLYQAGYVASNSEKYPLGGIVTAIQNAFHITPEVVCKRDAIDEIRICFYKDFKPRDCVGSKDMTSKKSCPKYVSLPEYTPLDGEAMVLKMPTDE

SEQ ID NO: 39810 - protein, 108 aa, Zea mays subsp. mays
MDYGRTITTVPGLHVAIDPTSMRRRSQRWWMAWKSTGPVSAVVLRHLAMVEKDHFGAMSGRNMGLALLLLFVMSIVTSLPRLIYTSSIMSRMSFIKLAMLLPTARSIL

SEQ ID NO: 39811 - protein, 104 aa, Zea mays subsp. mays
GFEIEFQSKKESMASRRSLLLLLQVLFATVLSVSAYLPETGRLAGDNVVEVNRSQREFDYFALSLQWPGTYCRGTRHCCSKNACCRSSDTPTQFTIRFLITTII

SEQ ID NO: 39812 - DNA, 1001 bp, Zea mays subsp. mays
aagaaagaagaaagagttgttttgtacattcatttacgaatagtagaattggtacaaagacgttgcatttccatagattcgaattttgtctggtagggagggagtggatcatggcggaggttgttgtgcacatatacgatgtgaccaacactggatcagacaaaaccaacaacaccattcttcagatcaacaggatcttcaaagacggcatcggtctaggcggcattttccacagcgccattcaggtgtatggaaacgatgagtggtcttatgggtattgtgagcaaggcactggtgtcttcagatgtcctagcagcaagaatccaatgtacacttatcgtgagaaaattgttcttgggaggacagattgtacaatctttatggttaatcagatattccgtgagctcaccagggaatggccaggacatacttatgatctcttgtctagaaactgcaaccacttctgtgatgtactctgtgataggcttggtgtgccgaagctcccaggttgggtgaaccgttttgcgcatgctggcgacacagctttggaagtagcagaaaccacagcgatgcggttaaagcaagccaaaactgagcttctatcagctagtaaagtagcctatcgcttcctttcgaatgtcacctcaagcgtaaccaacagcagcaatggctcaccacaacagcctggaaccgtcaacaattcagacaatgtgaactcgagaatgcaaggcacttggctcaaagggatgctaaacacttcgaaaccttccacaagcacagagatagagaacaaagatgaagatgcaaatcacgactctgaggttctacagtttcagcagcaaccgtagtccaccgtaatgcattcatttggttaattgcattgcatatccaccccggaccaaaagctactcaactgtatccattactttgtatcacaccattggaacccatctcttttttttctcaacacgttaatgacaagtaaccaagcaagtctcagc

SEQ ID NO: 39813 - protein, 281 aa, Zea mays subsp. mays
ERRKSCFVHSFTNSRIGTKTLHFHRFEFCLVGREWIMAEVVVHIYDVTNTGSDKTNNTILQINRIFKDGIGLGGIFHSAIQVYGNDEWSYGYCEQGTGVFRCPSSKNPMYTYREKIVLGRTDCTIFMVNQIFRELTREWPGHTYDLLSRNCNHFCDVLCDRLGVPKLPGWVNRFAHAGDTALEVAETTAMRLKQAKTELLSASKVAYRFLSNVTSSVTNSSNGSPQQPGTVNNSDNVNSRMQGTWLKGMLNTSKPSTSTEIENKDEDANHDSEVLQFQQQP

SEQ ID NO: 39814 - protein, 245 aa, Zea mays subsp. mays
MAEVVVHIYDVTNTGSDKTNNTILQINRIFKDGIGLGGIFHSAIQVYGNDEWSYGYCEQGTGVFRCPSSKNPMYTYREKIVLGRTDCTIFMVNQIFRELTREWPGHTYDLLSRNCNHFCDVLCDRLGVPKLPGWVNRFAHAGDTALEVAETTAMRLKQAKTELLSASKVAYRFLSNVTSSVTNSSNGSPQQPGTVNNSDNVNSRMQGTWLKGMLNTSKPSTSTEIENKDEDANHDSEVLQFQQQP

SEQ ID NO: 39815 - protein, 173 aa, Zea mays subsp. mays
MYTYREKIVLGRTDCTIFMVNQIFRELTREWPGHTYDLLSRNCNHFCDVLCDRLGVPKLPGWVNRFAHAGDTALEVAETTAMRLKQAKTELLSASKVAYRFLSNVTSSVTNSSNGSPQQPGTVNNSDNVNSRMQGTWLKGMLNTSKPSTSTEIENKDEDANHDSEVLQFQQQP

SEQ ID NO: 39816 - DNA, 696 bp, Zea mays subsp. mays
gaatttagggtagagttccaacggcgactcagtagtcgtctctcgatccctttacctcgtctcagctcaattcgctgcttttatcacggtggtgagagagatgaatcacggccaacaatctggcgaggcgaagcatgaagatgatcctgctcttacagagttccttgggtctctcatggattacactcctactattcctgatgatctaatggagcactacttggctaagagtgggtttcagtgccctgacgtacgattaataaggctagttgctgtggctacacaaaagtttgttgcagatgttgccagcgacgcccttcagcactgcaaggctagaccagcaccagttgtgaaagacaaaaaacagcaaaaggataaacgtttagtattgacaatggaagacctttccaaagctttgcgtgagtatggtgtgaacgtgaagcatccagaatattttgctgatagcccttccaccggaattgatcctgcgacaagggaggaatagaaaccaaacaggaagtctcgaccatattttgcctagtaagaatgattatgtgtgagagatccgtgattctatgttgtgtttccgtgaaaacaaaactcactctctcttcctattcacatgtatattcttttttgttgtttgtttcttgactcgtctctctccttgataaataagatttctgagttcttggt

SEQ ID NO: 39817 - protein, 134 aa, Zea mays subsp. mays
MNHGQQSGEAKHEDDPALTEFLGSLMDYTPTIPDDLMEHYLAKSGFQCPDVRLIRLVAVATQKFVADVASDALQHCKARPAPVVKDKKQQKDKRLVLTMEDLSKALREYGVNVKHPEYFADSPSTGIDPATREE

SEQ ID NO: 39818 - protein, 109 aa, Zea mays subsp. mays
MDYTPTIPDDLMEHYLAKSGFQCPDVRLIRLVAVATQKFVADVASDALQHCKARPAPVVKDKKQQKDKRLVLTMEDLSKALREYGVNVKHPEYFADSPSTGIDPATREE

SEQ ID NO: 39819 - protein, 98 aa, Zea mays subsp. mays
MEHYLAKSGFQCPDVRLIRLVAVATQKFVADVASDALQHCKARPAPVVKDKKQQKDKRLVLTMEDLSKALREYGVNVKHPEYFADSPSTGIDPATREE

SEQ ID NO: 39820 - DNA, 915 bp, Zea mays subsp. mays
attttagtgaacatatggcgaatttgggagaagagaagaaggggaagctgaagctctactcttactggagaagctcctgcgctcatcgtgtccgtatcgccctctctcttaaagggcttgaatatgagtatatacctgtgaatctgctcaagggtgaacaatccgatccagatttcaagaagatcaatccaatgggcactgtacctgctcttgttgatggagatgttgtcatatccgattctcttgctatcataatgtatctggatgagaagtatcctgagccaccgctcttacctcctgacctccacaaacgtgctgtcaatttccaggcagcgagtattgtcttgtctggcatacagcctcatcaaaacctgggtgtcattaaattcattgaggaaaagataaattcggaggagaaaacggcttgggttactaatgctatcacaaaaggattcacagctctcgagaaactgttggtgagctgcgctggaaaacacgcaactggtgatgaagtttacttggctgatctctttctagcaccacagatctacggagctatcaacaggttccagattaacatggaaccgtacccgactcttgcaaagtgttacgagtcatacaaggatcttcctgcgtttcaaaacgcagccccagagaagcagccagatgctcctgcttccaccagctgatcctgtgaactggtagtaatctattttcagcttaataaaacttcacaggcaacagcagcaacaataatgataaagaattaactttgtcctcgtatatagatgtatcatatgaaccagtttacttgtaagttttactctacttgtattatacaataaagactaggtgactttcccgtgcgcatgcacggataaaaatatttaaaaataaatatattataaattaatt

SEQ ID NO: 39821 - protein, 228 aa, Zea mays subsp. mays
FSEHMANLGEEKKGKLKLYSYWRSSCAHRVRIALSLKGLEYEYIPVNLLKGEQSDPDFKKINPMGTVPALVDGDVVISDSLAIIMYLDEKYPEPPLLPPDLHKRAVNFQAASIVLSGIQPHQNLGVIKFIEEKINSEEKTAWVTNAITKGFTALEKLLVSCAGKHATGDEVYLADLFLAPQIYGAINRFQINMEPYPTLAKCYESYKDLPAFQNAAPEKQPDAPASTS

SEQ ID NO: 39822 - protein, 224 aa, Zea mays subsp. mays
MANLGEEKKGKLKLYSYWRSSCAHRVRIALSLKGLEYEYIPVNLLKGEQSDPDFKKINPMGTVPALVDGDVVISDSLAIIMYLDEKYPEPPLLPPDLHKRAVNFQAASIVLSGIQPHQNLGVIKFIEEKINSEEKTAWVTNAITKGFTALEKLLVSCAGKHATGDEVYLADLFLAPQIYGAINRFQINMEPYPTLAKCYESYKDLPAFQNAAPEKQPDAPASTS

SEQ ID NO: 39823 - protein, 165 aa, Zea mays subsp. mays
MGTVPALVDGDVVISDSLAIIMYLDEKYPEPPLLPPDLHKRAVNFQAASIVLSGIQPHQNLGVIKFIEEKINSEEKTAWVTNAITKGFTALEKLLVSCAGKHATGDEVYLADLFLAPQIYGAINRFQINMEPYPTLAKCYESYKDLPAFQNAAPEKQPDAPASTS

SEQ ID NO: 39824 - DNA, 1135 bp, Zea mays subsp. mays
atatctgtatcagttcgcatcagttttgtctgagaaccacttttgtgtcaatctttagcgatgtcgattcctcaggccaagatggagcttcgtcctctgggaaacacaggtctcaaagttagctccatcggctttggcgcctctcccctcggaagcgtcttcggtccagtcgccgaagtcgatgcagtcgccaccgtacgcgaggcgttccgacaaggcattaacttcttcgacacttccccgtattatggaggaacactgtcggagaagatgcttggcaagggactaaaagcactacaagtccctagaagcgactacattgttgcaaccaagtgtggacgttacgaggaaggctttgacttcagcactgagagagtaacaaagagcatcgacgagagcttggagaggcttcagctagactacgttgacatacttcattgccacgacattgagttcgggtctcttgaccagattgtgagtgaaacaatccctgctctccagaaactgaaacaggaagggaagacacggttcatcggtatcactggtcttccgttgagtattttcacttacgttcttgatcgagtgcctccagggacggtcgatgtgatactatcgtactgccattacggtgtgaatgattcgacgttggtggatttgataccttacttgaaagggaaaggtgtgggtgtgattagtgcttctccattagcaatgggtctccttacggaacaaggtggtcctgaatggcatcctgcttcccctgagctcaagtctgcttgcaaagccgctgctgctcattgtaaatcaaaaggtaagaagatcacaaagttggcgttgcagtacagcttggcaaacaaggagatttcatcagtgttggttggaatgagctctgtctcacaggtagaagaaaatgttgcagcagttaaagagcttgaagatttgggtatggatcaagaaactctctctgaggttgaagctattcttgagcctgtcaagaatcagacatggccaagtggagtcgatcagaagtagaagctcttttgttgtgtttgttcacatttacttcttggagtgctttgatgtgtcgataacagttttaagttgagttgatacgattaataaagttttcttagat

SEQ ID NO: 39825 - protein, 323 aa, Zea mays subsp. mays
MSIPQAKMELRPLGNTGLKVSSIGFGASPLGSVFGPVAEVDAVATVREAFRQGINFFDTSPYYGGTLSEKMLGKGLKALQVPRSDYIVATKCGRYEEGFDFSTERVTKSIDESLERLQLDYVDILHCHDIEFGSLDQIVSETIPALQKLKQEGKTRFIGITGLPLSIFTYVLDRVPPGTVDVILSYCHYGVNDSTLVDLIPYLKGKGVGVISASPLAMGLLTEQGGPEWHPASPELKSACKAAAAHCKSKGKKITKLALQYSLANKEISSVLVGMSSVSQVEENVAAVKELEDLGMDQETLSEVEAILEPVKNQTWPSGVDQK

SEQ ID NO: 39826 - protein, 316 aa, Zea mays subsp. mays
MELRPLGNTGLKVSSIGFGASPLGSVFGPVAEVDAVATVREAFRQGINFFDTSPYYGGTLSEKMLGKGLKALQVPRSDYIVATKCGRYEEGFDFSTERVTKSIDESLERLQLDYVDILHCHDIEFGSLDQIVSETIPALQKLKQEGKTRFIGITGLPLSIFTYVLDRVPPGTVDVILSYCHYGVNDSTLVDLIPYLKGKGVGVISASPLAMGLLTEQGGPEWHPASPELKSACKAAAAHCKSKGKKITKLALQYSLANKEISSVLVGMSSVSQVEENVAAVKELEDLGMDQETLSEVEAILEPVKNQTWPSGVDQK

SEQ ID NO: 39827 - protein, 253 aa, Zea mays subsp. mays
MLGKGLKALQVPRSDYIVATKCGRYEEGFDFSTERVTKSIDESLERLQLDYVDILHCHDIEFGSLDQIVSETIPALQKLKQEGKTRFIGITGLPLSIFTYVLDRVPPGTVDVILSYCHYGVNDSTLVDLIPYLKGKGVGVISASPLAMGLLTEQGGPEWHPASPELKSACKAAAAHCKSKGKKITKLALQYSLANKEISSVLVGMSSVSQVEENVAAVKELEDLGMDQETLSEVEAILEPVKNQTWPSGVDQK

SEQ ID NO: 39828 - DNA, 1096 bp, Zea mays subsp. mays
gagatctttctcgatttgcctttactcgtttctcctgcgatatccgagctaagctgcagtgaaatatgatgcctcagcatcagatcaaggagcaacataatgctctcgtcatgaataagaagatcatgtccatccttgccgagagggacgctgccgtcaaggaaagaaacgaggccttggctgctaagcaggaagctttagccgctcgggatgaagcccttcagcaacgggacttagctatctctgagagagataatgctatcatggagagggaaaatgccttaactgctcttcaacaccgtgaaaaccatctcaactacattttggattgcgcaaagcgtggtggctaccaaacctgtttcactgaagaaacccacttgcccaacccttccccattgtcaaccattccacatgaaccacccaacaccaaaaggaagaaagatcgcaagagaaagaaagctggcggcgaagatctgaaccgtcagcttgcttctcctgggaagaaatgcagaaaggattgggactgtaacgatgtggggttaaaccttgtcacgttcgatgagacgacaatgccagtgcccatgtgcacttgcaccgggactgctcgtcagtgttacaaatggggaaatggcgggtggcaatcgtcttgctgcacaaccactttgtctcagtatccgctcccgcagatgccaaacaagcggcattctcgaataggcggtagaaaaatgagtggaaacgtcttctccaggttacttagccgtttagctggagaagggcacgacctctcctctccggttgatctcaaggactattgggctaggcatggcacgaatcgctacatcattatcaagtagccgagatttatgaaccactatgttaaatcaggtgtgtttctctcttcatcccttttttcttcttcgtttttttaacaattaggttcaaaaatgggatgaaagaatgaagcttaggctcattgttgtttttgttgtctatatagttcagctaataccaaatgtttagtagtattgttttgacttggtttcgtgtttatgtaattgtaaacagtccagtgaatgatgtcatattttattttaac

SEQ ID NO: 39829 - protein, 262 aa, Zea mays subsp. mays
MMPQHQIKEQHNALVMNKKIMSILAERDAAVKERNEALAAKQEALAARDEALQQRDLAISERDNAIMERENALTALQHRENHLNYILDCAKRGGYQTCFTEETHLPNPSPLSTIPHEPPNTKRKKDRKRKKAGGEDLNRQLASPGKKCRKDWDCNDVGLNLVTFDETTMPVPMCTCTGTARQCYKWGNGGWQSSCCTTTLSQYPLPQMPNKRHSRIGGRKMSGNVFSRLLSRLAGEGHDLSSPVDLKDYWARHGTNRYIIIK

SEQ ID NO: 39830 - protein, 261 aa, Zea mays subsp. mays
MPQHQIKEQHNALVMNKKIMSILAERDAAVKERNEALAAKQEALAARDEALQQRDLAISERDNAIMERENALTALQHRENHLNYILDCAKRGGYQTCFTEETHLPNPSPLSTIPHEPPNTKRKKDRKRKKAGGEDLNRQLASPGKKCRKDWDCNDVGLNLVTFDETTMPVPMCTCTGTARQCYKWGNGGWQSSCCTTTLSQYPLPQMPNKRHSRIGGRKMSGNVFSRLLSRLAGEGHDLSSPVDLKDYWARHGTNRYIIIK

SEQ ID NO: 39831 - protein, 247 aa, Zea mays subsp. mays
MNKKIMSILAERDAAVKERNEALAAKQEALAARDEALQQRDLAISERDNAIMERENALTALQHRENHLNYILDCAKRGGYQTCFTEETHLPNPSPLSTIPHEPPNTKRKKDRKRKKAGGEDLNRQLASPGKKCRKDWDCNDVGLNLVTFDETTMPVPMCTCTGTARQCYKWGNGGWQSSCCTTTLSQYPLPQMPNKRHSRIGGRKMSGNVFSRLLSRLAGEGHDLSSPVDLKDYWARHGTNRYIIIK

SEQ ID NO: 39832 - DNA, 958 bp, Zea mays subsp. mays
aatggattctcacgagtagaacgaaagcatttattcactatgctctcctcttcgaaattgcaaccgcccaaacctgcaatcttcgcgaatccgattttcaaacaaccattcatcgataaaagtcatccgtttcgccgccggtacactccccgtcaagcttctctgcgattcgccacggtttcggactcaatcgcgtctccattgcactcgaacccgcaggaatcatccggtctaacttcttccgtgggacagcctcctctccaactctctccattgacactcacgcagaaacacttcgtcttgctcaacgtcgtcgcttgcgtgacagcgatctcagcatcatggctattcttagctgcgattcctacgcttctggctttcaagaaagcagcagagtctcttgagaagcttttggatttaaccagagaagagttaccagatacaatggctgctcttcgcttatcggggatggagatcagtgacttaactatggagcttagtgatttaggccaaggtatcactcaaggtgttaaaagctcaacacgggctattcgcgtggctgaagatagactaaggcggttaactaacatgaatccagtagcttcaatgcaggaggtgatgcatcagaccaagagaaaggaaacagaaccagtggtggctaaagcggcgaggaacttgaaggaagggatcgttaagggacgttctttatggcaattgtacttcacaatcactcgcttctccaaaactgccgcaagttattttgcaaagcgagttaagcagtagaaggtttataatcacatcccatctcttcctcgttttttcacttgcccttttccagaaaccgagcctatctagtgtttgtagcttaagaatactctagtttgattattatgaaactatgaagatgatcttgaatctcgagacgcaaatcaagtttcttttaagagtttactggtac

SEQ ID NO: 39833 - protein, 260 aa, Zea mays subsp. mays
NGFSRVERKHLFTMLSSSKLQPPKPAIFANPIFKQPFIDKSHPFRRRYTPRQASLRFATVSDSIASPLHSNPQESSGLTSSVGQPPLQLSPLTLTQKHFVLLNVVACVTAISASWLFLAAIPTLLAFKKAAESLEKLLDLTREELPDTMAALRLSGMEISDLTMELSDLGQGITQGVKSSTRAIRVAEDRLRRLTNMNPVASMQEVMHQTKRKETEPVVAKAARNLKEGIVKGRSLWQLYFTITRFSKTAASYFAKRVKQ

SEQ ID NO: 39834 - protein, 247 aa, Zea mays subsp. mays
MLSSSKLQPPKPAIFANPIFKQPFIDKSHPFRRRYTPRQASLRFATVSDSIASPLHSNPQESSGLTSSVGQPPLQLSPLTLTQKHFVLLNVVACVTAISASWLFLAAIPTLLAFKKAAESLEKLLDLTREELPDTMAALRLSGMEISDLTMELSDLGQGITQGVKSSTRAIRVAEDRLRRLTNMNPVASMQEVMHQTKRKETEPVVAKAARNLKEGIVKGRSLWQLYFTITRFSKTAASYFAKRVKQ

SEQ ID NO: 39835 - DNA, 916 bp, Zea mays subsp. mays
acactctttctctagaaaatggagaccattctctctcctcgttgtctatctcctcctctcattccaaaactatcatcttctcatcaatccaaacatgctacttcttcttctttggctctctcgaatcccaccgtcttgggcccgaaacacctttccactcggtttagtgctaaaccagaatcttggttaacagatgcaaagcaaggactagctgctttatctctttctctggctcttactttctcacctgttggcactgccttagcctctgagttcaatattctcaacgatggtccacccaaagaaacttacgttgtggacgacgctggtgttcttagtcgagttacgagatcagatctgaagaaactcttgtctgatcttgaatacagaaagaaactccgactcaatttcatcactgtccggaagctcactagtaaagcagatgcgtttgagtatgcagaccaggttctggagaaatggtatccttcgattgaagaaggcaacaataagggtattgttgttttgattactagccagaaggaaggggcaattactggtggtcctgccttcattgaagctgtaggtgaaaagattcttgatgctaccgtctcggaaaatcttcctgtactagccacagacgaaaaatacaatgaagcaatatacagcagtgcaaaacggttggttgcagcaatagacggtctcccagaccccggtggtccagaagtgaaggataacaagagagaatcaaatttcaaaacgaaagaagaaaccgaagagaagagaggacagttcagtcttgtcgttggaggtttgcttgtaattgcctttgttgttcccatggctcagtactatgcttatgtatccaagaagtagtgtattggctcactttcgtatataccaaacttggccaggtcat

SEQ ID NO: 39836 - protein, 284 aa, Zea mays subsp. mays
METILSPRCLSPPLIPKLSSSHQSKHATSSSLALSNPTVLGPKHLSTRFSAKPESWLTDAKQGLAALSLSLALTFSPVGTALASEFNILNDGPPKETYVVDDAGVLSRVTRSDLKKLLSDLEYRKKLRLNFITVRKLTSKADAFEYADQVLEKWYPSIEEGNNKGIVVLITSQKEGAITGGPAFIEAVGEKILDATVSENLPVLATDEKYNEAIYSSAKRLVAAIDGLPDPGGPEVKDNKRESNFKTKEETEEKRGQFSLVVGGLLVIAFVVPMAQYYAYVSKK

SEQ ID NO: 39837 - DNA, 1149 bp, Zea mays subsp. mays
gaatcttcttatctgggtcttcctcgttttctccgcttttaagccatgaaagtcaccgtcgtctcccgcagcggcagagaagttctcaaagcccccctcgacctccccgattcggcgactgttgctgatctgcaggaagcttttcataagagagctaagaagttttacccgtcgaggcaaagactgactctccccgtggctcctggctcaaaggacaaaccggttgtcctcaacagcaagaagtcactcaaagagtactgtgatggaaacacagactccttaaccgtagtcttcaaggacttgggagcacaagtctcataccacacgctcttcttcttcgagtacctaggcccgctcctaatctacccggtcttctactacttccctgtctacaaatacctgggctacggcgaagaccgtgtgatccacccggtccagacctacgccatgtactactggtgctttcactacttcaaacgtatcatggaaacgttcttcgtccataggttcagccacgcgacttcaccgatagggaacgtgttcaggaactgtgcttactactggacctttggtgcttacattgcgtattacgtgaaccaccctttgtacacgccggtgagtgaccttcagatgaagatcggtttcgggtttggtttggtctgccaagtcgcaaacttttactgtcacattctgttgaagaatctgagagaccctagtggctctggagggtaccagatcccacgtggcttcctcttcaacattgttacgtgtgccaattacacgactgagatttaccagtggctagggttcaacatcgctactcagaccgttgcgggatacgttttcttggctgttgcggctctgattatgactaactgggctcttggaaagcacagccgtctgagaaagatatttgatgggaaagatgggaagccaaagtatccaagaagatgggtgatcttacctccattcctgtagaagactcatcgttgtgatcctcgtttttatcagtttaaaactctattaataaggttgtcaaagagatttgcaagatgtgtggtttcctctgtattggttgttccttttgttttgatatgttttgtaagtttagagattttagaaacatgcttctttaatcgtttatcacgc

SEQ ID NO: 39838 - protein, 310 aa, Zea mays subsp. mays
MKVTVVSRSGREVLKAPLDLPDSATVADLQEAFHKRAKKFYPSRQRLTLPVAPGSKDKPVVLNSKKSLKEYCDGNTDSLTVVFKDLGAQVSYHTLFFFEYLGPLLIYPVFYYFPVYKYLGYGEDRVIHPVQTYAMYYWCFHYFKRIMETFFVHRFSHATSPIGNVFRNCAYYWTFGAYIAYYVNHPLYTPVSDLQMKIGFGFGLVCQVANFYCHILLKNLRDPSGSGGYQIPRGFLFNIVTCANYTTEIYQWLGFNIATQTVAGYVFLAVAALIMTNWALGKHSRLRKIFDGKDGKPKYPRRWVILPPFL

SEQ ID NO: 39839 - protein, 176 aa, Zea mays subsp. mays
MYYWCFHYFKRIMETFFVHRFSHATSPIGNVFRNCAYYWTFGAYIAYYVNHPLYTPVSDLQMKIGFGFGLVCQVANFYCHILLKNLRDPSGSGGYQIPRGFLFNIVTCANYTTEIYQWLGFNIATQTVAGYVFLAVAALIMTNWALGKHSRLRKIFDGKDGKPKYPRRWVILPPFL

SEQ ID NO: 39840 - protein, 164 aa, Zea mays subsp. mays
METFFVHRFSHATSPIGNVFRNCAYYWTFGAYIAYYVNHPLYTPVSDLQMKIGFGFGLVCQVANFYCHILLKNLRDPSGSGGYQIPRGFLFNIVTCANYTTEIYQWLGFNIATQTVAGYVFLAVAALIMTNWALGKHSRLRKIFDGKDGKPKYPRRWVILPPFL

SEQ ID NO: 39841 - DNA, 803 bp, Zea mays subsp. mays
gtcgtcttcttgccgagaaaaaaaaaattaaaagagcctcgaaaaattcacagacttgtctcccctctccctctctttctcactctttagtagcttctgaaaatttcacagccctaaacaaacaaaaatgagcaagttctggactttcctcaccgctcttcactcaggcgctggtcctctggtgatgttggtgtatccattgtacgcatcggtggtggcaatggagagcacaacgaaagtagacgatgagcagtggcttgcctactggatcatttactccttcctcaccctcactgagctgattctgcagtcgcttcttgagtggatcccgatctggtactcggtgaaactggtgtttgtagcttggttggttctgcctcagttccatggtgcagctttcatctacaaccgtgtggtgagagaacagttcaagaaacacggcttcttcggctcctcctttcacaccaaacactccaaacccaacatcatccactccattttccaccgggagggacacgaggctcactctcactgacgccaaagcagaggagaagctcgaatagcattgtagcggagttggtggtggcccccgtcttgtcttaagtctaatctttacttttgttttagttttatttaataatttgagaaatgtgatggatgatgactaatgaggtgtgtgatcgtttaaaagtagaaatggcttcttgttgtttttgttgttgttgtattgctttagcttccacgcgtatcttccatttgggaacacaagtgttaacgctattgtttcaatcgctttctaatgc

SEQ ID NO: 39842 - protein, 135 aa, Zea mays subsp. mays
MSKFWTFLTALHSGAGPLVMLVYPLYASVVAMESTTKVDDEQWLAYWIIYSFLTLTELILQSLLEWIPIWYSVKLVFVAWLVLPQFHGAAFIYNRVVREQFKKHGFFGSSFHTKHSKPNIIHSIFHREGHEAHSH

SEQ ID NO: 39843 - protein, 116 aa, Zea mays subsp. mays
MLVYPLYASVVAMESTTKVDDEQWLAYWIIYSFLTLTELILQSLLEWIPIWYSVKLVFVAWLVLPQFHGAAFIYNRVVREQFKKHGFFGSSFHTKHSKPNIIHSIFHREGHEAHSH

SEQ ID NO: 39844 - protein, 104 aa, Zea mays subsp. mays
MESTTKVDDEQWLAYWIIYSFLTLTELILQSLLEWIPIWYSVKLVFVAWLVLPQFHGAAFIYNRVVREQFKKHGFFGSSFHTKHSKPNIIHSIFHREGHEAHSH

SEQ ID NO: 39845 - DNA, 608 bp, Zea mays subsp. mays
tccttcatcaagattctctcaattctacccgacgcttcttcagattctctttgttatcagagagatcaaatcgatggcttccctcgattccgacgtcaccatggttcccgcaggagaatcctcaagcagcgtcgccccatcgtcgtcgtccaccaagaaggcgaagagattcgaagttaagaagtggagcgccgtggctctctgggcttgggatatcgttgttgataattgcgccatctgcagaaaccacatcatggatttgtgtattgaatgtcaggctaatcaggccagtgctacgagtgaggaatgcactgttgcttggggggtttgcaaccacgccttccactttcactgcatcagcagatggcttaagactcgtcaagtttgtccattggataacagtgagtgggagttccagaagtatggtcactaaacccaccagcaaatcatttggttggcgcatatgagatgctgatattgctcaaagttctttgttttttttcttttttctggttgtctcaaagttgtcaaaacagagattactctgttgatattactcttcactgaacctattatgttttgctttgagtgataccttcaatttcaag

SEQ ID NO: 39846 - protein, 154 aa, Zea mays subsp. mays
LHQDSLNSTRRFFRFSLLSERSNRWLPSIPTSPWFPQENPQAASPHRRRPPRRRRDSKLRSGAPWLSGLGISLLIIAPSAETTSWICVLNVRLIRPVLRVRNALLLGGFATTPSTFTASADGLRLVKFVHWITVSGSSRSMVTKPTSKSFGWRI

SEQ ID NO: 39847 - protein, 143 aa, Zea mays subsp. mays
PSSRFSQFYPTLLQILFVIREIKSMASLDSDVTMVPAGESSSSVAPSSSSTKKAKRFEVKKWSAVALWAWDIVVDNCAICRNHIMDLCIECQANQASATSEECTVAWGVCNHAFHFHCISRWLKTRQVCPLDNSEWEFQKYGH

SEQ ID NO: 39848 - protein, 119 aa, Zea mays subsp. mays
MASLDSDVTMVPAGESSSSVAPSSSSTKKAKRFEVKKWSAVALWAWDIVVDNCAICRNHIMDLCIECQANQASATSEECTVAWGVCNHAFHFHCISRWLKTRQVCPLDNSEWEFQKYGH

SEQ ID NO: 39849 - DNA, 743 bp, Zea mays subsp. mays
aaaagaggaagaatccaagaaatgggatctccagcgaagaagacgactctgcaacgatacttgtcacaacttcagcaacatcctcttagaacaaaggcgattactgctggagttttgtccggtgtgagtgatgttgtttcacagaaactctctgggatacagaagattcagctgagaagggttcttctcaaaatgatatttgcaggggggtttctcggaccagtagggcatttctttcatacaactctagataagatttttcaagggaagaaagacacaaagaccgtcgcaaagaaggtaatcgtggaacaactgacattgtcaccattgaaccatttgcttttcatgatctattatggagtagtcattgaaagaactccttggaatcttgttagagacaggatcaagaagacttacccaacagtccagcttacagcatggacctttttccccattgtgggatgggtaaactacaagtatgtgccactgcacttccgggtcatattgcacagcctcgtcgcattcttctggggaatcttcctgaccctgcgagcaaggtcgatgacactagctttggcaaaggctaagtgatcagggaaacacatcaagcaagaactagctatgatctttgttttttctgtaagttaaagcatgtctaaaaagtaaattaaaaagggtgaaaacgaataagaatctgtattaagatgataacaatggtttttaagttattacaaacatttcgc

SEQ ID NO: 39850 - protein, 196 aa, Zea mays subsp. mays
KRGRIQEMGSPAKKTTLQRYLSQLQQHPLRTKAITAGVLSGVSDVVSQKLSGIQKIQLRRVLLKMIFAGGFLGPVGHFFHTTLDKIFQGKKDTKTVAKKVIVEQLTLSPLNHLLFMIYYGVVIERTPWNLVRDRIKKTYPTVQLTAWTFFPIVGWVNYKYVPLHFRVILHSLVAFFWGIFLTLRARSMTLALAKAK

SEQ ID NO: 39851 - protein, 189 aa, Zea mays subsp. mays
MGSPAKKTTLQRYLSQLQQHPLRTKAITAGVLSGVSDVVSQKLSGIQKIQLRRVLLKMIFAGGFLGPVGHFFHTTLDKIFQGKKDTKTVAKKVIVEQLTLSPLNHLLFMIYYGVVIERTPWNLVRDRIKKTYPTVQLTAWTFFPIVGWVNYKYVPLHFRVILHSLVAFFWGIFLTLRARSMTLALAKAK

SEQ ID NO: 39852 - protein, 132 aa, Zea mays subsp. mays
MIFAGGFLGPVGHFFHTTLDKIFQGKKDTKTVAKKVIVEQLTLSPLNHLLFMIYYGVVIERTPWNLVRDRIKKTYPTVQLTAWTFFPIVGWVNYKYVPLHFRVILHSLVAFFWGIFLTLRARSMTLALAKAK

SEQ ID NO: 39853 - DNA, 1093 bp, Zea mays subsp. mays
atggccaagccatcctctcctctgcccaaatccaaatcccaataacccaactctcctccttctctccttcctttccttcgtatggctgcaatcgcttctctttccttcccggcgctgggccaatctggaaagatttcgaatcccacgccttgtcgtcctctcgcctccgtctccgccatctgcaggagactttctcgccgctctctgacttcttccaggccttccacttcctcttcgaaattcgtcatccactgcatgtcaaatgctaccgatgtgccacctgtatcggagacaaagtcgaatttcctcaaagcttacaagcggcccatcccaagcatctacaacaccgtgttgcaggagctcatcgtgcagcagcatttgatgaggtacaaaaggacttaccgttacgaccccgttttcgcccttggctttgtaaccgtctacgatcagctcatggatgggtatccgagcgatcaggatcgtgattccattttccaagcttacgttgaagctttgaacgaggatcctaagcaataccgaattgatgcgcagaagatggaggaatgggccagaagtcagacgtctgcttcactagttgacttctcctctaaggaaggagaagttgaagcgattcttaaggacatttcagaaagagctggcagtaaggagggtttcagttacagcaggttcttcgctgttggcctctttcgcttgcttgagcttgcaggtgctactgatccaactgtccttgacaagctttgtgcgtccctaaatatcaacaagaaaagcgtggatcgggacctcgatgtgtatcgcaacctgctgtcaaagcttgtccaagccaaggaactactcaaggagtatgtcgagagggagaagaagaagagaggggaaagagccgaatcccagaaagctaacgaatcaatctccaagtctctgggagataatagcctatctttcttcgtttaatgaaaatcctaaaacaatctatttgtgattttttttgttttattgttcttagtaacgacatcaacttcttgacttgagatatacatatgctcattcctaagaacaaacatcactctgtctttcg

SEQ ID NO: 39854 - protein, 295 aa, Zea mays subsp. mays
MAAIASLSFPALGQSGKISNPTPCRPLASVSAICRRLSRRSLTSSRPSTSSSKFVIHCMSNATDVPPVSETKSNFLKAYKRPIPSIYNTVLQELIVQQHLMRYKRTYRYDPVFALGFVTVYDQLMDGYPSDQDRDSIFQAYVEALNEDPKQYRIDAQKMEEWARSQTSASLVDFSSKEGEVEAILKDISERAGSKEGFSYSRFFAVGLFRLLELAGATDPTVLDKLCASLNINKKSVDRDLDVYRNLLSKLVQAKELLKEYVEREKKKRGERAESQKANESISKSLGDNSLSFFV

SEQ ID NO: 39855 - protein, 237 aa, Zea mays subsp. mays
MSNATDVPPVSETKSNFLKAYKRPIPSIYNTVLQELIVQQHLMRYKRTYRYDPVFALGFVTVYDQLMDGYPSDQDRDSIFQAYVEALNEDPKQYRIDAQKMEEWARSQTSASLVDFSSKEGEVEAILKDISERAGSKEGFSYSRFFAVGLFRLLELAGATDPTVLDKLCASLNINKKSVDRDLDVYRNLLSKLVQAKELLKEYVEREKKKRGERAESQKANESISKSLGDNSLSFFV

SEQ ID NO: 39856 - protein, 195 aa, Zea mays subsp. mays
MRYKRTYRYDPVFALGFVTVYDQLMDGYPSDQDRDSIFQAYVEALNEDPKQYRIDAQKMEEWARSQTSASLVDFSSKEGEVEAILKDISERAGSKEGFSYSRFFAVGLFRLLELAGATDPTVLDKLCASLNINKKSVDRDLDVYRNLLSKLVQAKELLKEYVEREKKKRGERAESQKANESISKSLGDNSLSFFV

SEQ ID NO: 39857 - DNA, 590 bp, Zea mays subsp. mays
cacaaattctcagctattgagatttgaacatttcatccaaaaaatgttctttcagattattcagggggttttcaccggcgttgaggcattagctctattggcattcgctggtataacgcttggcggctcggccgtgggactagctttaagcacgccgctttttattctattcagtccgattctcgtgccagcaactatagccaccactttgttaactacgggtttcacaacctccgggggcttaggaatcgtggctctccgcatcttctggaagctcttcaagcgtcttaggaagaaggggaaaggaacgccaaaaattccgggattggccccgggggctccagattctaactcagtgtctgggggataaacggagtaggctttcgtagtatgagataatctatggaggaatttaatgagaattgatggggttccttaaataaaacctaaaattatccagtgtctttaacgtaatactgattacgcgcggatgaaactaatgtttcatataccattcttcaaatgtatatcgtgttacgaaattatagtaaatgtactcgatcgtgttgtatattttaaagaattaagtg

SEQ ID NO: 39858 - protein, 122 aa, Zea mays subsp. mays
TNSQLLRFEHFIQKMFFQIIQGVFTGVEALALLAFAGITLGGSAVGLALSTPLFILFSPILVPATIATTLLTTGFTTSGGLGIVALRIFWKLFKRLRKKGKGTPKIPGLAPGAPDSNSVSGG

SEQ ID NO: 39859 - protein, 108 aa, Zea mays subsp. mays
MFFQIIQGVFTGVEALALLAFAGITLGGSAVGLALSTPLFILFSPILVPATIATTLLTTGFTTSGGLGIVALRIFWKLFKRLRKKGKGTPKIPGLAPGAPDSNSVSGG

SEQ ID NO: 39860 - DNA, 760 bp, Zea mays subsp. mays
gaagaaaaaaatctatgaagaagttagcgagaagatggcggagaactcgcggcgacgacgaagatgatgaggataagctcgcccttcctacttttgacgacatcgattctcggcctatcgatacgcaagagcaagaagagtacgtcaggtcgctcgaagaagctcacgctcagcaaagtcgtcaatggaagagcgtgttcgccgttcttctggtttgctacggagctttcctcttctactccagtttccagcagttcatgtcaccgtgggagctgcggtatcatgcctacttcatggaagatcttaagtcgtggatggtcatttcagctgagtggattgctatcatggcttgctgcctctcaattgtggggctactagataagaagaatgatcataggaggtggttttggtactcttgtgttcccggatctgcattggccatcttttggatttactacttactgaggcttccgaagttccggtgggatgctatatggcttctatttggtcccctttgcggagctggaatttgtctatacgtggatcatctactggaggaatcatctgaagaagtgaaaaaactaaggaactatatgtatgcatacaaagcaaggtagagataaaagtcattccaatacacttgagagtaactctgtgatggcaacagtgcaagttttgactaaaaacagaatgattctgaataatctctcattattgacgcaaaactatagattccatgtcaatcacgagagatttgtct

SEQ ID NO: 39861 - protein, 204 aa, Zea mays subsp. mays
RKKSMKKLARRWRRTRGDDEDDEDKLALPTFDDIDSRPIDTQEQEEYVRSLEEAHAQQSRQWKSVFAVLLVCYGAFLFYSSFQQFMSPWELRYHAYFMEDLKSWMVISAEWIAIMACCLSIVGLLDKKNDHRRWFWYSCVPGSALAIFWIYYLLRLPKFRWDAIWLLFGPLCGAGICLYVDHLLEESSEEVKKLRNYMYAYKAR

SEQ ID NO: 39862 - protein, 200 aa, Zea mays subsp. mays
MKKLARRWRRTRGDDEDDEDKLALPTFDDIDSRPIDTQEQEEYVRSLEEAHAQQSRQWKSVFAVLLVCYGAFLFYSSFQQFMSPWELRYHAYFMEDLKSWMVISAEWIAIMACCLSIVGLLDKKNDHRRWFWYSCVPGSALAIFWIYYLLRLPKFRWDAIWLLFGPLCGAGICLYVDHLLEESSEEVKKLRNYMYAYKAR

SEQ ID NO: 39863 - protein, 119 aa, Zea mays subsp. mays
MSPWELRYHAYFMEDLKSWMVISAEWIAIMACCLSIVGLLDKKNDHRRWFWYSCVPGSALAIFWIYYLLRLPKFRWDAIWLLFGPLCGAGICLYVDHLLEESSEEVKKLRNYMYAYKAR

SEQ ID NO: 39864 - DNA, 1174 bp, Zea mays subsp. mays
aatcggtacgatcagattgcataaaagcaaatcataataagtcacgtggcacagttttgtcagatccaagagaagaaatcagaaaaagaacttgaaacgatgccgtactacaccagagacgaggacgaagtcgacgatttcgacgagttcgatccgacgccgtacagtggaggctacgacatcaccgtgatctacggccgtccgatccctccttgcgacgacacttgctaccctctctcctccgcagcggatgaagatttcgagtacgagagacctgaattcacctcgtaccacgatccttccgcctacgccgaagaagctctcaacaccgagtacagcagctactcccgccccaagccccgtcccggatttcgacccggttcagccggtggcggtcatgtccaaggtgagagacccgatcccagttacggatccggatacggtggagcgacggaggctgagtacggtaggagacctgaatctggatatggtgggagatcggagacggagaccggatacggatccgggtatgagaagaaaccgagcttcggtgaagagaggagcgagtatgagcgtaagcctagctatggaaggtctggggaagaggaaggaggttacaggaagcctagctatgggagatctgaggatcaggttgagagctacataaagcccaccagctatgaaaggtctgaggaacaggaggaagggagttacaggaagcctagctatggccgcaatgatgacgatgatgatgaagagcgcaggaaccgttctggtgatgatgaggaaggcagctatggccgcaagaaatatggtggcaatgactctaatgatgatgatgaggagaagaagcagcatcgttacaagcatcaccaccaccagaggcgccgtgatgaagatgatgactaaaaccttctctcagtactggagagtgttatgatcaagtacttttgcttagcttcatcttactaaataataaaaaagctaaggcatttatctttggatgttgttgttgcgtttgtttgattctctttggatacagcagagtctgtgtctgactttgtttctggttcataataagaccttgaactgatatcgggtcatcatcatgtaaaaagtaaactgttgtttttgttttctcgatattaaatatcaaaagtcattgccgagaagt

SEQ ID NO: 39865 - protein, 269 aa, Zea mays subsp. mays
MPYYTRDEDEVDDFDEFDPTPYSGGYDITVIYGRPIPPCDDTCYPLSSAADEDFEYERPEFTSYHDPSAYAEEALNTEYSSYSRPKPRPGFRPGSAGGGHVQGERPDPSYGSGYGGATEAEYGRRPESGYGGRSETETGYGSGYEKKPSFGEERSEYERKPSYGRSGEEEGGYRKPSYGRSEDQVESYIKPTSYERSEEQEEGSYRKPSYGRNDDDDDEERRNRSGDDEEGSYGRKKYGGNDSNDDDEEKKQHRYKHHHHQRRRDEDDD

SEQ ID NO: 39866 - protein, 138 aa, Zea mays subsp. mays
MKISSTRDLNSPRTTILPPTPKKLSTPSTAATPAPSPVPDFDPVQPVAVMSKVRDPIPVTDPDTVERRRLSTVGDLNLDMVGDRRRRPDTDPGMRRNRASVKRGASMSVSLAMEGLGKRKEVTGSLAMGDLRIRLRAT

SEQ ID NO: 39867 - DNA, 820 bp, Zea mays subsp. mays
actcttcaaagtctccgccagacacttctccatcaaaactcctctcacacaatggccacttccttccctaccttgacaccttttcttttcatcctccttctctccatcccctccgttcttgaagcagctcatcaccacacggcggcgccggctccggctgtagactgttcgatgctcatactcaacatggctgattgtttgtcctttgtttccgctggaggcacggaggccaagccggctagttcgtgttgcaacggccttaagacggtgctcaagactgacgcagagtgtctatgtgaggcgtttaaaagcagtgcttctctaggagttactttgaacatgactaaagcagctacacttcccgctgcatgcaagcttcacgctccttctatggctgcttgtggattgtccgccgctcctactatggctccaggtcttgctccaggaggagctgctggacccgacttaagttttctatctccaaacccatctccagggaaccgcggatcttccttgcttcccttctccttcaccaccgtactcggtgctatgtccttcgtattgttattcttgtctcgtgtctgaagaagccagctagatttggttgtatgaaatggctttgggtttgggttttcgtgactttagttttgcgtgtcttttgagtctacttctgttttagaccatgtcggtttctgttcgtagtttatttaatcttaattacgtttcacattggtccttttatctaagaacatctctgatccctcgtatactgatggctacttattaaatttcgagttttcctaaaacaatttctttggtt

SEQ ID NO: 39868 - protein, 194 aa, Zea mays subsp. mays; identical to SEQ ID NO: 16125

SEQ ID NO: 39869 - protein, 177 aa, Zea mays subsp. mays; identical to SEQ ID NO: 16126

SEQ ID NO: 39870 - protein, 137 aa, Zea mays subsp. mays; identical to SEQ ID NO: 16127

SEQ ID NO: 39871 - DNA, 725 bp, Zea mays subsp. mays
aaaaactcgcatcccattcacttctaccagatttcgtttattactctcgtcacactctctctccgtctcccatctcccatctcatcgtctctcagatctagaagcgagcagcatcaattgcgagcgaacatggcaggcaaaggaggtaaaggtctcatcgctacaaaaaccatggctggtaacaaggacaaagacaaggacaagaagaaacccatcactcgctctgctcgtgctggtattcagtttccggtgggtcgtatccataggcaactcaagacgagagtttcagcacacggaagggttggtgccactgctgctgtctacacggcttcgatcctcgagtacttaactgcggaggttcttgagttagctggaaacgcgagcaaagatctgaaagtgaagaggataactcctaggcatttgcagctggccatcagaggagatgaggagcttgacacgctcatcaaagggactattgctggaggaggtgtgattcctcacatccacaagtctctaatcaacaaggccatcaaggagtgatttgttttcttaggcagtgtggttatgtggtctgctaattagtagcttatggtgttaatgtttgtgtttgtttagtcttggactgcttttctttctcgtagtttctctgtcagtgtgttgaactcttctggacatcctcagatgtacattagttaatctgaacgcttaggcttctcgtttgagtt

SEQ ID NO: 39872 - protein, 179 aa, Zea mays subsp. mays
KNSHPIHFYQISFITLVTLSLRLPSPISSSLRSRSEQHQLRANMAGKGGKGLIATKTMAGNKDKDKDKKKPITRSARAGIQFPVGRIHRQLKTRVSAHGRVGATAAVYTASILEYLTAEVLELAGNASKDLKVKRITPRHLQLAIRGDEELDTLIKGTIAGGGVIPHIHKSLINKAIKE

SEQ ID NO: 39873 - protein, 136 aa, Zea mays subsp. mays
MAGKGGKGLIATKTMAGNKDKDKDKKKPITRSARAGIQFPVGRIHRQLKTRVSAHGRVGATAAVYTASILEYLTAEVLELAGNASKDLKVKRITPRHLQLAIRGDEELDTLIKGTIAGGGVIPHIHKSLINKAIKE

SEQ ID NO: 39874 - protein, 122 aa, Zea mays subsp. mays
MAGNKDKDKDKKKPITRSARAGIQFPVGRIHRQLKTRVSAHGRVGATAAVYTASILEYLTAEVLELAGNASKDLKVKRITPRHLQLAIRGDEELDTLIKGTIAGGGVIPHIHKSLINKAIKE

SEQ ID NO: 39875 - DNA, 616 bp, Zea mays subsp. mays
tctttcgtttcgtgtatcactccgctctcattccaaatccctaaatctcgagctcgacggaggagatggcactcagaaccgcagtccttcgtcaccttagggttccggtgacgggatcgaaccagtctcaaattggtttccttggttcgatccgtgctttctcgtcgcacgatgatcatctcagcaagcaggaagtcgtcgacagagtcctcgacgttgtcaaatgcttccctaaagtcgatccagctaaggtgactcctgatgttcatttccagaaggatctggggttagatagtttggacactgtggagatagttatggctattgaagaggagttcaagcttgagatcccagacaaagaagctgacaagatcgactcttgccctcttgctattgaatacgttttcaaccatccaatgtctagctaaagaccctgtgctgctctctccttttatttgtttgtatgaggttctctctcaagttatctcttgaaaattgggattttgcaaataaatgcgagcatccttgtgactctttcattttccataaaagaaccattttggcttttgattattttgtaattcgactctttttgaagctaaggttattttgcgtt

SEQ ID NO: 39876 - protein, 120 aa, Zea mays subsp. mays
MALRTAVLRHLRVPVTGSNQSQIGFLGSIRAFSSHDDHLSKQEVVDRVLDVVKCFPKVDPAKVTPDVHFQKDLGLDSLDTVEIVMAIEEEFKLEIPDKEADKIDSCPLAIEYVFNHPMSS

SEQ ID NO: 39877 - DNA, 798 bp, Zea mays subsp. mays
agattcggtcgctaataatatttggagtcgggaggggtgacctgagatattcacgacacaaaacaaatcatcatcatgtggagaagaatcgtctcctctggtctcaaaaccctagcctccgatgtcgccgctgcttctcctcgtcgatccgtagccaccaccaccgtgagacccttgaggttctacctcgcatccaatcccgcttcttcttcccttttacctcgccatttcagctccgaatcagtggagaccgttgggaagaagaaggtggaggatgttatgcccattgctactggacatgaaaaggaggagcttgaagctgaacttgaggggaggaggctgcttgacattgacttccctgaaggtccttttggaactaaggaagctcctgctatcgtaaagtcctactatgacaagcgaattgtgggatgccctggtggtgaaggcgaggatgaacacgatgttgtgtggttctggctggagaaaggaaagtcttttgaatgccccgtttgcactcagtactttgagctggaagtggttggtccaggtggacctcccgatggtcacggtgatgaagacgatgagcaccaccactgattccggcttctcccttgctgcgagttttgctttttttttttttattattttttactggaataaaaaacatatgctgctggtgagacagttaaaaatgtttttgatccttttggaacaacacttcggtatcggaagttgtcaaaatgcctaaaccgttgttttacttttgtaccaattcttgaatcagagttattcctgcct

SEQ ID NO: 39878 - protein, 173 aa, Zea mays subsp. mays
MWRRIVSSGLKTLASDVAAASPRRSVATTTVRPLRFYLASNPASSSLLPRHFSSESVETVGKKKVEDVMPIATGHEKEELEAELEGRRLLDIDFPEGPFGTKEAPAIVKSYYDKRIVGCPGGEGEDEHDVVWFWLEKGKSFECPVCTQYFELEVVGPGGPPDGHGDEDDEHHH

SEQ ID NO: 39879 - protein, 112 aa, Zea mays subsp. mays
MTSELWDALVVKARMNTMLCGSGWRKESLLNAPFALSTLSWKWLVQVDLPMVTVMKTMSTTTDSGFSLAASFAFFFFIIFYWNKKHMLLVRQLKMFLILLEQHFGIGSCQNA

SEQ ID NO: 39880 - protein, 105 aa, Zea mays subsp. mays
MPIATGHEKEELEAELEGRRLLDIDFPEGPFGTKEAPAIVKSYYDKRIVGCPGGEGEDEHDVVWFWLEKGKSFECPVCTQYFELEVVGPGGPPDGHGDEDDEHHH

SEQ ID NO: 39881 - DNA, 756 bp, Zea mays subsp. mays
attcttccttcacagcacttcttctctaacgaacaaatctttcttcatatctttctctcaaacacaaacgatggctcaggaaggtgttgctgctgctgcgaatggtgctacagtggtggagaagtctgttaccttcactgcctacaagccccagctgatcgtggaggctcagaaggtcggtgacgctgtcgctttctacaaggatgtgtttggtgcgacggagactggacactctctttaccctaagcgtaaggctgaccaagagctccctcacgttgtctccgctgagattaacctcgctggtgctaccgtcgttgtctccgacgtctctgttcactctggctctaatgtgaagacggggactgtgtctgcactcctcgaaactgatgacgtggaagctgccgttgcgaaagctgtagccgccggagctgtgaaagtggaggaggtctcggagggggaagctgagggttgggtgaagggaaaggtgactgacccgttcggtttcacctggatctttgtttctccggtggacaaggatgacaaggaagaaaacaaagaggtggtctaactgtcgtcgtcgtcgtcggatctgatcgttcgtcggtttctgaacaaaccttctattatcctttttttatgcttttgtagtttgtcttttgtggaatctccggtatcagtaaaccgggtcggttaacttatgacttttgttgagtttaatttcacccttttgacataagacttggtgaaataaaacgg

SEQ ID NO: 39882 - protein, 188 aa, Zea mays subsp. mays
FFLHSTSSLTNKSFFISFSQTQTMAQEGVAAAANGATVVEKSVTFTAYKPQLIVEAQKVGDAVAFYKDVFGATETGHSLYPKRKADQELPHVVSAEINLAGATVVVSDVSVHSGSNVKTGTVSALLETDDVEAAVAKAVAAGAVKVEEVSEGEAEGWVKGKVTDPFGFTWIFVSPVDKDDKEENKEVV

SEQ ID NO: 39883 - protein, 165 aa, Zea mays subsp. mays
MAQEGVAAAANGATVVEKSVTFTAYKPQLIVEAQKVGDAVAFYKDVFGATETGHSLYPKRKADQELPHVVSAEINLAGATVVVSDVSVHSGSNVKTGTVSALLETDDVEAAVAKAVAAGAVKVEEVSEGEAEGWVKGKVTDPFGFTWIFVSPVDKDDKEENKEVV

SEQ ID NO: 39884 - DNA, 967 bp, Zea mays subsp. mays
aattaacttttcttttttcattgttgtgttctctctctctttctctcgctggagaaaaatgttggctatatttcacgaggcctttgctcacccgccggaggaactctacagtccggcgtctgagaaatgctctaaacagcccaaacttccagaagaaaccttagacgacttcttgtctcgtcactctgacaacactttctccatgtctttcggaaaagcagctgttcttgcttacgttcgtccctctgcttccttctcagtccaccagaggttgttctgtgggtttgatgacatctactgtctcttctttgggagcttgaacaatctgtgtcagctaaacaagcaatatggtctgaccaagacaacaaacgaggccatgtttgtgattgaagcttataggactcttagagacagaggtccttatccagctgatcaggttgtcaaggatttagacggtagctttgcctttgttgtttatgatagcaaagctggttctgtcttcacggccctggggtctgatggaggagtgaagctgttttggggaatagctgctgatggatctgttgtgatatcagatgatttggatgttatcaaagagggttgtgctaaatcttttgctccttttcctactggatgtatgttccacagtgaaggagggttaatgagctttgagcatccgatgaacaagataaaggcgatgccgagagtggacagtgaaggagtcctatgtggtgctaacttcaaggtggatgtgtacacgcgtgttaacagtatccctcgtcgaggaagtgaagccaattggtctctctgaatgccttgcattctctcaacttcctaaatgatactttcctttccgcactttcatgctccgttcttgttcttctctacttctgttatggaataagccatgaataaaaactgtgaatagctttcgaggttctatataaaaataaatttctcagcgctc

SEQ ID NO: 39885 - protein, 269 aa, Zea mays subsp. mays
INFSFFIVVFSLSFSRWRKMLAIFHEAFAHPPEELYSPASEKCSKQPKLPEETLDDFLSRHSDNTFSMSFGKAAVLAYVRPSASFSVHQRLFCGFDDIYCLFFGSLNNLCQLNKQYGLTKTTNEAMFVIEAYRTLRDRGPYPADQVVKDLDGSFAFVVYDSKAGSVFTALGSDGGVKLFWGIAADGSVVISDDLDVIKEGCAKSFAPFPTGCMFHSEGGLMSFEHPMNKIKAMPRVDSEGVLCGANFKVDVYTRVNSIPRRGSEANWSL

SEQ ID NO: 39886 - protein, 250 aa, Zea mays subsp. mays
MLAIFHEAFAHPPEELYSPASEKCSKQPKLPEETLDDFLSRHSDNTFSMSFGKAAVLAYVRPSASFSVHQRLFCGFDDIYCLFFGSLNNLCQLNKQYGLTKTTNEAMFVIEAYRTLRDRGPYPADQVVKDLDGSFAFVVYDSKAGSVFTALGSDGGVKLFWGIAADGSVVISDDLDVIKEGCAKSFAPFPTGCMFHSEGGLMSFEHPMNKIKAMPRVDSEGVLCGANFKVDVYTRVNSIPRRGSEANWSL

SEQ ID NO: 39887 - protein, 202 aa, Zea mays subsp. mays
MSFGKAAVLAYVRPSASFSVHQRLFCGFDDIYCLFFGSLNNLCQLNKQYGLTKTTNEAMFVIEAYRTLRDRGPYPADQVVKDLDGSFAFVVYDSKAGSVFTALGSDGGVKLFWGIAADGSVVISDDLDVIKEGCAKSFAPFPTGCMFHSEGGLMSFEHPMNKIKAMPRVDSEGVLCGANFKVDVYTRVNSIPRRGSEANWSL

SEQ ID NO: 39888 - DNA, 1084 bp, Zea mays subsp. mays
acatttcattttcattcatcctctcgcttctgacctgacctgacctaaatcatcatcatcgaaaatggtttccgcgcgtgaggagttcgtgtacatggccaagctcgccgagcaagccgagcgctacgaggagatggtggagttcatggagaaagtgtccgcctccgtcgacggcgacgagctcaccgtcgaggagcgtaacctcctctccgtcgcctacaagaacgtgatcggcgcgcggcgcgcctcgtggcgcatcatatcgtcgatcgagcagaaggaggagagccgcggcaacgacgaccacgtggcggcgatccgcgattacagggggaagatcgagacggagctcacggggatctgcgaggggatactgaagctgctggactcgaggctggtccccgccgcagcgtcgggggactcgaaggtgttttatctgaagatgaagggggattaccataggtacttggctgagtttaagaccggtcaagagaggaaagacgccgctgagaatactctctccgcttacaaatctgctcaggatattgcgaatgcagagctcgctccaactcacccaatccgtctaggtctggcattgaacttctctgtgttctactacgagatcttaaactctcctgatcgtgcctgcagcctcgctaaacaggcctttgatgacgcgattgcggagttggacactctaggtgaagagtcgtacaaagacagcaccttgatcatgcagcttctccgtgacaacctcactctctggacatccgacatgcaggatgatgctgcggatgaggagatcaaggaagagtcggctccaaagccagctgaggaacagcagtaatcaaatctttttgactgaactgctgttttctaggggtttggaacttttattcattcatcgtaatccctagcaagttggaccatcagtcatcatcttttatctctttgcctgattttctccttttttatttgttgttgttctatctttttttttttgtcttctgggatatgtctatttcaatgtctgcaatcgaaccttgctttgtgtgtttctattcaatttgaaaggctctgtcct

SEQ ID NO: 39889 - protein, 260 aa, Zea mays subsp. mays
MVSAREEFVYMAKLAEQAERYEEMVEFMEKVSASVDGDELTVEERNLLSVAYKNVIGARRASWRIISSIEQKEESRGNDDHVAAIRDYRGKIETELTGICEGILKLLDSRLVPAAASGDSKVFYLKMKGDYHRYLAEFKTGQERKDAAENTLSAYKSAQDIANAELAPTHPIRLGLALNFSVFYYEILNSPDRACSLAKQAFDDAIAELDTLGEESYKDSTLIMQLLRDNLTLWTSDMQDDAADEEIKEESAPKPAEEQQ

SEQ ID NO: 39890 - protein, 250 aa, Zea mays subsp. mays
MAKLAEQAERYEEMVEFMEKVSASVDGDELTVEERNLLSVAYKNVIGARRASWRIISSIEQKEESRGNDDHVAAIRDYRGKIETELTGICEGILKLLDSRLVPAAASGDSKVFYLKMKGDYHRYLAEFKTGQERKDAAENTLSAYKSAQDIANAELAPTHPIRLGLALNFSVFYYEILNSPDRACSLAKQAFDDAIAELDTLGEESYKDSTLIMQLLRDNLTLWTSDMQDDAADEEIKEESAPKPAEEQQ

SEQ ID NO: 39891 - protein, 237 aa, Zea mays subsp. mays
MVEFMEKVSASVDGDELTVEERNLLSVAYKNVIGARRASWRIISSIEQKEESRGNDDHVAAIRDYRGKIETELTGICEGILKLLDSRLVPAAASGDSKVFYLKMKGDYHRYLAEFKTGQERKDAAENTLSAYKSAQDIANAELAPTHPIRLGLALNFSVFYYEILNSPDRACSLAKQAFDDAIAELDTLGEESYKDSTLIMQLLRDNLTLWTSDMQDDAADEEIKEESAPKPAEEQQ

SEQ ID NO: 39892 - DNA, 1072 bp, Zea mays subsp. mays
aaaaagatgaaactcgcaggtctgaaatcgatcgagaacgcgcacgaagattccgtttgggcggcgacatgggttccggcgacggaagaacgaccggcgttgcttcttaccggatctctagacgagacggtgaagctatggagagcggacgagctggatctagtgaggactaacacaggacactccttgggagtagcagctgtggcggcgcatccttccggaatcatcgcagcttcttcttccctcgatagcttcgtccgtgtcttcgatgttgacacgaatgccaccatcgctgttctcgaagctcctccttctgaggtttggggtatgcaatttgaacctaagggtacaatccttgctgttgctggtggaagtagtgcctcggtcaagctttgggacactgcgagctggagactaatctcaactctctcaatcccacgtccagaagcaccaaagccttctgataaaaccagcagcaagaagttcgttctctctgtggcttggtctcccaacgggaaacgtctagcttgtggttcaatggatggcacgatctgcgtctttgatgttgatcgctctaagcttcttcaccagcttgaaggacacaacatgcctgtaaggtcccttgtgttctcccctgtagacccgagagtcctcttctccggatcagatgatgggcatgtgaacgtgcacgacgcagaagggaaaacgcttgtggggtccatgtcggggcacacgagctgggtgctgagcgttgatgctagccctgacggtggagctatagcaacggggtcgagtgataggactgtgaggctgtgggatcttaagatgagagcggctattcagacaatgagcaatcataatgaccaggtttggtctgttgcgtttagaccacctggtggaaccggtgtccgtgctggtcgtctcgctagtgtctctgacgacaagagtgtatcgctctatgattactcatgaaaaaagtcctgttgtttcttacttttatgcatttacaatgtaatctgcaagagtttttttttttttctgttggttcaaactttgcttgagagcttattat

SEQ ID NO: 39893 - protein, 323 aa, Zea mays subsp. mays
KKMKLAGLKSIENAHEDSVWAATWVPATEERPALLLTGSLDETVKLWRADELDLVRTNTGHSLGVAAVAAHPSGIIAASSSLDSFVRVFDVDTNATIAVLEAPPSEVWGMQFEPKGTILAVAGGSSASVKLWDTASWRLISTLSIPRPEAPKPSDKTSSKKFVLSVAWSPNGKRLACGSMDGTICVFDVDRSKLLHQLEGHNMPVRSLVFSPVDPRVLFSGSDDGHVNVHDAEGKTLVGSMSGHTSWVLSVDASPDGGAIATGSSDRTVRLWDLKMRAAIQTMSNHNDQVWSVAFRPPGGTGVRAGRLASVSDDKSVSLYDYS

SEQ ID NO: 39894 - protein, 321 aa, Zea mays subsp. mays
MKLAGLKSIENAHEDSVWAATWVPATEERPALLLTGSLDETVKLWRADELDLVRTNTGHSLGVAAVAAHPSGIIAASSSLDSFVRVFDVDTNATIAVLEAPPSEVWGMQFEPKGTILAVAGGSSASVKLWDTASWRLISTLSIPRPEAPKPSDKTSSKKFVLSVAWSPNGKRLACGSMDGTICVFDVDRSKLLHQLEGHNMPVRSLVFSPVDPRVLFSGSDDGHVNVHDAEGKTLVGSMSGHTSWVLSVDASPDGGAIATGSSDRTVRLWDLKMRAAIQTMSNHNDQVWSVAFRPPGGTGVRAGRLASVSDDKSVSLYDYS

SEQ ID NO: 39895 - protein, 214 aa, Zea mays subsp. mays
MQFEPKGTILAVAGGSSASVKLWDTASWRLISTLSIPRPEAPKPSDKTSSKKFVLSVAWSPNGKRLACGSMDGTICVFDVDRSKLLHQLEGHNMPVRSLVFSPVDPRVLFSGSDDGHVNVHDAEGKTLVGSMSGHTSWVLSVDASPDGGAIATGSSDRTVRLWDLKMRAAIQTMSNHNDQVWSVAFRPPGGTGVRAGRLASVSDDKSVSLYDYS

SEQ ID NO: 39896 - DNA, 750 bp, Zea mays subsp. mays
agaggaaataaaatatcttgaatcttagagaagaaggaaaagagaagagaagatgacgaccgagaagaaagagatggaagtggtgaaaggtctagacttggagaggtacatgggccgttggtacgaggttgcttctttcccttccaggttccaacccaagaacggtgcagacactcgcgccacctacacccttaaccccgacgggaccgtgaaagtcttgaacgagacgtgggacggaggcaagagaggtttcatccaaggctcagctttcaaaaccgatcctaagagcgacgaggccaagttcaaagtcaggttctacgtccctcctttcctccctatcattcccgttaccggcgactactgggtgctgtatatcgatcctgagtaccagcatgccgtcattggccagccttcaaggagttatctctggatcctgagcaggacggcgcacgtggaggaagagacatacaagcagctggtggagaaggcggtggagcaagggtatgatgttagcaagcttcgcaagacagctcagagtgacacaccacccgagtccgacgctgctcctgacgacaccaagggtatttggtggatcaaatctatcttcggcaaatagttacctgacacattaaaagacttgtttcacctccttgtacttgctctgtctatgtaatatactaccccttttgtttactccagtaatgaacgtcctacttttgttggtttttaaacatctaaatctatttgcgt

SEQ ID NO: 39897 - protein, 187 aa, Zea mays subsp. mays
MTTEKKEMEVVKGLDLERYMGRWYEVASFPSRFQPKNGADTRATYTLNPDGTVKVLNETWDGGKRGFIQGSAFKTDPKSDEAKFKVRFYVPPFLPIIPVTGDYWVLYIDPEYQHAVIGQPSRSYLWILSRTAHVEEETYKQLVEKAVEQGYDVSKLRKTAQSDTPPESDAAPDDTKGIWWIKSIFGK

SEQ ID NO: 39898 - protein, 180 aa, Zea mays subsp. mays
MEVVKGLDLERYMGRWYEVASFPSRFQPKNGADTRATYTLNPDGTVKVLNETWDGGKRGFIQGSAFKTDPKSDEAKFKVRFYVPPFLPIIPVTGDYWVLYIDPEYQHAVIGQPSRSYLWILSRTAHVEEETYKQLVEKAVEQGYDVSKLRKTAQSDTPPESDAAPDDTKGIWWIKSIFGK

SEQ ID NO: 39899 - protein, 168 aa, Zea mays subsp. mays
MGRWYEVASFPSRFQPKNGADTRATYTLNPDGTVKVLNETWDGGKRGFIQGSAFKTDPKSDEAKFKVRFYVPPFLPIIPVTGDYWVLYIDPEYQHAVIGQPSRSYLWILSRTAHVEEETYKQLVEKAVEQGYDVSKLRKTAQSDTPPESDAAPDDTKGIWWIKSIFGK

SEQ ID NO: 39900 - DNA, 935 bp, Zea mays subsp. mays
atccattacatcgaaagagcacagaagaacaacaatggcgattctctgttcgtcttcggcagttatactcccttcttcttcttcggtgaaaacctccggatgtaacagaaggtcttcgttcttaggcttctctctaaatgctatctcaaagccgccagttcgagtcgccactaacgcgaacacgaagaggggagtgcaggtgaagtgcgaagccgagcagacaactactacttccctcgttcctgcaaaccaacggtggatgttcgacgaagaggaagcaaatggccctgacatctggaacacaacatggtacccaaaggcttcagaccatgtgaacacggacaagccctggtatgtggtcgatgcaaccgacaagattctgggaaggttagcatcaaccattgctaatcacatccgtgggaagaaccttgcctcctacactcccagtgtcgacatgggagcctttgtcattgtggtgaatgctgagaaagtggctgtgtctggaaagaaaaggaaccaaaagctgtacaggaggcattcaggacgacctggcggcatgacagtggaaacctttgatcagttgcagcagagaatccctgagagaatcattgagcatgctgttcgtggaatgctcccaaagggacggcttgggagagctctgttcaatcacctgaaggtgtacaaaggcccagaccatcctcacgaggcacagaagccacttgatctgcctatcagggataagagaatacagctgcagaaatagataacaccatggagtatatctactaagctccagttttttacttctcgggtttgtgtagtttcttcatctcaaaaccagaggggagactttgaagattcttgattctgttgcttgcaactatcaactctatgctataaagttttttagtgtgattttttttttttttgctgcc

SEQ ID NO: 39901 - protein, 253 aa, Zea mays subsp. mays
SITSKEHRRTTMAILCSSSAVILPSSSSVKTSGCNRRSSFLGFSLNAISKPPVRVATNANTKRGVQVKCEAEQTTTTSLVPANQRWMFDEEEANGPDIWNTTWYPKASDHVNTDKPWYVVDATDKILGRLASTIANHIRGKNLASYTPSVDMGAFVIVVNAEKVAVSGKKRNQKLYRRHSGRPGGMTVETFDQLQQRIPERIIEHAVRGMLPKGRLGRALFNHLKVYKGPDHPHEAQKPLDLPIRDKRIQLQK

SEQ ID NO: 39902 - protein, 242 aa, Zea mays subsp. mays
MAILCSSSAVILPSSSSVKTSGCNRRSSFLGFSLNAISKPPVRVATNANTKRGVQVKCEAEQTTTTSLVPANQRWMFDEEEANGPDIWNTTWYPKASDHVNTDKPWYVVDATDKILGRLASTIANHIRGKNLASYTPSVDMGAFVIVVNAEKVAVSGKKRNQKLYRRHSGRPGGMTVETFDQLQQRIPERIIEHAVRGMLPKGRLGRALFNHLKVYKGPDHPHEAQKPLDLPIRDKRIQLQK

SEQ ID NO: 39903 - protein, 167 aa, Zea mays subsp. mays
MFDEEEANGPDIWNTTWYPKASDHVNTDKPWYVVDATDKILGRLASTIANHIRGKNLASYTPSVDMGAFVIVVNAEKVAVSGKKRNQKLYRRHSGRPGGMTVETFDQLQQRIPERIIEHAVRGMLPKGRLGRALFNHLKVYKGPDHPHEAQKPLDLPIRDKRIQLQK

SEQ ID NO: 39904 - DNA, 774 bp, Zea mays subsp. mays
aaacataaacaggacttgttcaagtgtcagatatttcgagaagaagaagaagagatggagagggagccgacaagagtgatggtggctgtgaatgaatcgacgatcaaagggaagccccacccttcgataagcagcaaaagagctttcgaatggactctggagaagatgatccgatccaacacatccgatttcaagattctcttgctccatgtacatgttgtcgacgaagacggttttgatgaggtagacagcatatatgcctctcccgatgatttcaaagagtctaacaagtctaaaggtcttcaccttctcgagtttttcgttaaaaaatgtcatgagattggggttagttgcgaggcatggatcaagaaaggtgatcccaaggatgtgatctgccaagaagtcagccgggtccgaccagatcttcttgttttgggaagccgtggtcttggccgcttccaaaaggtctttgttgggaccgtgagtgggttctgtgtgaaacatgctgagtgtccagtcctcacgatcaaacgcaacgccgatgaaactcccagtgatcttgctgatgactaaaccaactacattctaaacattccttccttccaaaatgataaataaactcttcattgatcctatcccattgtgtgcttttgtgtgtccaagtttatgattaataatattagtatgtgtgtgaagtctgctatgtttctgttgtcagtgatactgataatgcaactaaactttcaatttcttttaatcatttctaaattgaat

SEQ ID NO: 39905 - protein, 190 aa, Zea mays subsp. mays
KHKQDLFKCQIFREEEEEMEREPTRVMVAVNESTIKGKPHPSISSKRAFEWTLEKMIRSNTSDFKILLLHVHVVDEDGFDEVDSIYASPDDFKESNKSKGLHLLEFFVKKCHEIGVSCEAWIKKGDPKDVICQEVSRVRPDLLVLGSRGLGRFQKVFVGTVSGFCVKHAECPVLTIKRNADETPSDLADD

SEQ ID NO: 39906 - protein, 172 aa, Zea mays subsp. mays
MEREPTRVMVAVNESTIKGKPHPSISSKRAFEWTLEKMIRSNTSDFKILLLHVHVVDEDGFDEVDSIYASPDDFKESNKSKGLHLLEFFVKKCHEIGVSCEAWIKKGDPKDVICQEVSRVRPDLLVLGSRGLGRFQKVFVGTVSGFCVKHAECPVLTIKRNADETPSDLADD

SEQ ID NO: 39907 - protein, 164 aa, Zea mays subsp. mays
MVAVNESTIKGKPHPSISSKRAFEWTLEKMIRSNTSDFKILLLHVHVVDEDGFDEVDSIYASPDDFKESNKSKGLHLLEFFVKKCHEIGVSCEAWIKKGDPKDVICQEVSRVRPDLLVLGSRGLGRFQKVFVGTVSGFCVKHAECPVLTIKRNADETPSDLADD

SEQ ID NO: 39908 - DNA, 620 bp, Zea mays subsp. mays
atcaagattctcaattctacccgacgcttcttcagattctctttgtcatcggtttcaaaacaatcggagagatcaaatcaatggcttcgctcgattccgacgtcaccatggttcccgcaggagaatcctcaagcagcgtcgccccatcgtcgtcgtccaccaagaaggcgaagagattcgaagttaagaagtggagcgccgtggctctctgggcttgggatatcgttgttgataattgcgctatctgcagaaaccacatcatggatctgtgtattgaatgtcaggctaatcaggccagtgctacgagtgaggagtgcactgttgcttggggagtttgcaaccacgccttccactttcactgcatcagcagatggctaaagactcgtcaagtttgtccattggataacagtgagtgggagttccagaagtatggtcactaaaccaactaatcgtaccggcaaatcatttggttggcgcatatgagatgctgatattgctcgaagttctttgtttttttttttctggttgtcgcaaagttgtcaaaacagagattactctgttgatattactcttcactgaacctattatgttttgctttgagtgatatcttcaatttcaag

SEQ ID NO: 39909 - protein, 145 aa, Zea mays subsp. mays
QDSQFYPTLLQILFVIGFKTIGEIKSMASLDSDVTMVPAGESSSSVAPSSSSTKKAKRFEVKKWSAVALWAWDIVVDNCAICRNHIMDLCIECQANQASATSEECTVAWGVCNHAFHFHCISRWLKTRQVCPLDNSEWEFQKYGH

SEQ ID NO: 39910 - protein, 125 aa, Zea mays subsp. mays
IKILNSTRRFFRFSLSSVSKQSERSNQWLRSIPTSPWFPQENPQAASPHRRRPPRRRRDSKLRSGAPWLSGLGISLLIIALSAETTSWICVLNVRLIRPVLRVRSALLLGEFATTPSTFTASADG

SEQ ID NO: 39911 - protein, 119 aa, Zea mays subsp. mays; identical to SEQ ID NO: 39848

SEQ ID NO: 39912 - DNA, 744 bp, Zea mays subsp. mays
aacctttattaaaacagagctcactctctctctctctctctctctagctccaatgggcttccccgtaggctacacagaggtcttcctcccgaagctcttcgtacaaacactctcaatcctcagtctcatcagaaccgtcgtcttctccctcttccgcttcttgggcctctccgacttcctcgaaatggaccaaacctggcccgactacacatcttacccgacccgaacacccgagctccgctcccccttctccgccctcctcatccgcgagatcttacccgtcatcaagttcgaagacgtgacgacctcttccggcgaagatctgccggagagctgcgccgtctgcctctacgagttcgaaggagagcaagagatccggtggctgagaaactgcagacatatattccaccggagctgtctcgaccgttggatggatcacgatcagaagacgtgtcctctctgtagaacgccgtttgttccggacgagatgcaagaagagtttaatcaacggctgtgggctgcttctggtgttcatgattttcacagtgagtactgtcccgtgacggaactatagagagacagagagacagcttccttccctcctcctttgtgtctttttttttttgacttttcacccctgtacttttaaattttctttttttcaccccttgctaacattagatttgccacgcttttatgtgtgtatgtaaatatacatatgaatgagatgagcaataaacattg

SEQ ID NO: 39913 - protein, 190 aa, Zea mays subsp. mays
TFIKTELTLSLSLSLAPMGFPVGYTEVFLPKLFVQTLSILSLIRTVVFSLFRFLGLSDFLEMDQTWPDYTSYPTRTPELRSPFSALLIREILPVIKFEDVTTSSGEDLPESCAVCLYEFEGEQEIRWLRNCRHIFHRSCLDRWMDHDQKTCPLCRTPFVPDEMQEEFNQRLWAASGVHDFHSEYCPVTEL

SEQ ID NO: 39914 - protein, 173 aa, Zea mays subsp. mays
MGFPVGYTEVFLPKLFVQTLSILSLIRTVVFSLFRFLGLSDFLEMDQTWPDYTSYPTRTPELRSPFSALLIREILPVIKFEDVTTSSGEDLPESCAVCLYEFEGEQEIRWLRNCRHIFHRSCLDRWMDHDQKTCPLCRTPFVPDEMQEEFNQRLWAASGVHDFHSEYCPVTEL

SEQ ID NO: 39915 - protein, 129 aa, Zea mays subsp. mays
MDQTWPDYTSYPTRTPELRSPFSALLIREILPVIKFEDVTTSSGEDLPESCAVCLYEFEGEQEIRWLRNCRHIFHRSCLDRWMDHDQKTCPLCRTPFVPDEMQEEFNQRLWAASGVHDFHSEYCPVTEL

SEQ ID NO: 39916 - DNA, 686 bp, Zea mays subsp. mays
agattccgtttcatcgcctctcgtctcaggatctagaagtaagggaacaccaaatcgtgagcgagaacatggcaggcaagggagggaaagggctcgttgctgcaaagacgatggctgctaacaaggacaaagacaagggcaagatgaaacccatctctcgatctgctcgtgctggtattcagtttccagtgggccgtatccataggcaactcaagaccagggtttcagcacacggaagagttggtgccactgctgctgtgtacactgcttcgattctagagtacctgactgcagaagttcttgagttggctggaaacgcaagcaaggatctgaaagtgaagaggataactccaaggcatttgcagttggcaatcagaggagatgaggagcttgacacgctcatcaaaggaaccattgccggaggtggtgtgatccctcacatccacaagtctctcatcaacaaaaccaccaatgagtgatttgtttcctaagcactaaggttgtttgatcggctagttagtagcttatcatgtcagtgtttgttaagtcttggactgcttttcttttccttttttagtgtcgcctttaattggacatcttcaggtgtacatgagttaatttgaactcttatgcttctcctttgcatactcttgttgttttctgtcaagtaaaccaatttaattacc

SEQ ID NO: 39917 - protein, 158 aa, Zea mays subsp. mays; identical to SEQ ID NO: 155

SEQ ID NO: 39918 - protein, 136 aa, Zea mays subsp. mays; identical to SEQ ID NO: 156

SEQ ID NO: 39919 - protein, 122 aa, Zea mays subsp. mays; identical to SEQ ID NO: 157

SEQ ID NO: 39920 - DNA, 825 bp, Zea mays subsp. mays
taaacgcgtcaggagaggagaaagatcagattcaatcggcgtcatcatcttaagatccagaactcgtcggaaaatgtctacgttcagtggcgatgaaaccgctcctttcttcggcttccttggcgctgccgcagccctcgtcttctcctgcatgggagctgcatatgggacagccaagagtggtgttggagtggcgtctatgggtgtgatgaggcctgagttggtgatgaagtctattgtccctgttgttatggctggtgtgttgggtatttacggtttgattattgctgttatcatcagtaccgggattaaccccaaggctaaatcttactacctcttcgacgggtatgcacatctctcttctggtctcgcttgtggacttgctggtctctctgctggaatggccattggtattgttggtgatgctggtgtcagggccaatgctcagcagccaaagcttttcgttggtatgattcttatcctcattttcgctgaagctctggctctatacggtctcatcgtggggatcatcttgtcctcccgagctggtcagtccagagccgaatgaggatgagaatgattctttcttcttggattcggcgtgattctttcttttggtttttgccaccggtctcattcttcatcgagccgggatctttcttatattattatttatcaggttagtagaggcacaatgtggttttgctacgtgtagacaaaaaccacacctcatcaaactgttgtttgttttctctcttctgttacgtgtagacaagatgtaactgatttatttttttatcactccaataaatcacagaaaactcg

SEQ ID NO: 39921 - protein, 188 aa, Zea mays subsp. mays
KRVRRGERSDSIGVIILRSRTRRKMSTFSGDETAPFFGFLGAAAALVFSCMGAAYGTAKSGVGVASMGVMRPELVMKSIVPVVMAGVLGIYGLIIAVIISTGINPKAKSYYLFDGYAHLSSGLACGLAGLSAGMAIGIVGDAGVRANAQQPKLFVGMILILIFAEALALYGLIVGIILSSRAGQSRAE

SEQ ID NO: 39922 - protein, 164 aa, Zea mays subsp. mays; identical to SEQ ID NO: 3219

SEQ ID NO: 39923 - protein, 138 aa, Zea mays subsp. mays; identical to SEQ ID NO: 3220

SEQ ID NO: 39924 - DNA, 700 bp, Zea mays subsp. mays
atcatttcagactctctctctctctccattcttcagctcagagagagagagagagagatggcgagttccatttcttcgatgtcaacacgtttttgtttcatccttaacaacaatggtagtcacaaaccaaacccatggctctatcaaccatcgttaagctcgaacagtctcatattctattcaaagcatcatcctcatcgtcgtccactatcttcttcttcccagattcccgtcgtagagactgatgaaggcgacgacaaagatggccttacattcagtggttgcagcggatgcgggaaggaggtgaaggagaatggttgcaacggcgacggacggattcaaggaggcattgccactgtccctggcttcggttggtggcccattaaggcttaccggccttgtcccggtttcgttgaggccggaggtagataccgccgcatagggcagagcatggatgaggttgcctttggtcgcggtgactctaaatcctccaccgattcctagctttatggctcaggtaaaaaattgcaaacatataccagtttttaattggactattgaaacatattcagattttcaatttagagaaagtcttatgtaacattacaaagtaaatgtttaaatagaattttgcacaaatgatgtttaaatagttgtttgagactgtcttgcagagcaatagatctcttgctttgcttct

SEQ ID NO: 39925 - protein, 167 aa, Zea mays subsp. mays
IISDSLSLSILQLREREREMASSISSMSTRFCFILNNNGSHKPNPWLYQPSLSSNSLIFYSKHHPHRRPLSSSSQIPVVETDEGDDKDGLTFSGCSGCGKEVKENGCNGDGRIQGGIATVPGFGWWPIKAYRPCPGFVEAGGRYRRIGQSMDEVAFGRGDSKSSTDS

SEQ ID NO: 39926 - protein, 148 aa, Zea mays subsp. mays
MASSISSMSTRFCFILNNNGSHKPNPWLYQPSLSSNSLIFYSKHHPHRRPLSSSSQIPVVETDEGDDKDGLTFSGCSGCGKEVKENGCNGDGRIQGGIATVPGFGWWPIKAYRPCPGFVEAGGRYRRIGQSMDEVAFGRGDSKSSTDS

SEQ ID NO: 39927 - protein, 141 aa, Zea mays subsp. mays
MSTRFCFILNNNGSHKPNPWLYQPSLSSNSLIFYSKHHPHRRPLSSSSQIPVVETDEGDDKDGLTFSGCSGCGKEVKENGCNGDGRIQGGIATVPGFGWWPIKAYRPCPGFVEAGGRYRRIGQSMDEVAFGRGDSKSSTDS

SEQ ID NO: 39928 - DNA, 925 bp, Zea mays subsp. mays
accttaccaagactgagctctcaatggcggccttctcgatgactctgtcaaatccgaaggctttctcagctgctccacgaagactttctccgatcaacgcctccgctccctcttccaccactttccgattgaacaccaaatctaccgtcaacttcatcaagtttccgtctttaaccgcatcatctctcctcctccatacatcttccaccaagagaaaccgccgcagctgcttatcggttcaatccagtgctgagcctttagcggagccacaatcgaagataacgcataaggtgtatttcgatataagtgttgggaacccagttgggaaattggctgggaggattgttattggtttgtttggtgatgatgttccccaaactgttgagaacttccgtgctctttgcacaggtgagaaggggtttggctacaagggctcaacattccaccgtgtcatccgagatttcatgattcagggtggagactttgacaagggcaatggaactggaggtaaaagtgtatatggtcggacatttaaggatgagaatttcaatttatcccatgtcggacccggagttgtgagtatggcaaatgctggccctaatacaaatggaagtcagttcttcatctgcactgttaagacttcatggttggacgggaggcatgtggtgttcgggcaagttatagaaggaatggatgtcgtgaggctgatagaggaacaagagacagatagaggagaccgtcccagaaagaaagtggtcattgcagactgtggtcaacttccaatgtctgaagcttaagtaacaacatccaaaaccccaaaaccttgtgacaatgagattgagttgtattatgcgtttgcaatttttacacgctttcttttgtgaaatggatacaagtccctttataataatatcaatttcagttc

SEQ ID NO: 39929 - protein, 264 aa, Zea mays subsp. mays
LTKTELSMAAFSMTLSNPKAFSAAPRRLSPINASAPSSTTFRLNTKSTVNFIKFPSLTASSLLLHTSSTKRNRRSCLSVQSSAEPLAEPQSKITHKVYFDISVGNPVGKLAGRIVIGLFGDDVPQTVENFRALCTGEKGFGYKGSTFHRVIRDFMIQGGDFDKGNGTGGKSVYGRTFKDENFNLSHVGPGVVSMANAGPNTNGSQFFICTVKTSWLDGRHVVFGQVIEGMDVVRLIEEQETDRGDRPRKKVVIADCGQLPMSEA

SEQ ID NO: 39930 - protein, 257 aa, Zea mays subsp. mays
MAAFSMTLSNPKAFSAAPRRLSPINASAPSSTTFRLNTKSTVNFIKFPSLTASSLLLHTSSTKRNRRSCLSVQSSAEPLAEPQSKITHKVYFDISVGNPVGKLAGRIVIGLFGDDVPQTVENFRALCTGEKGFGYKGSTFHRVIRDFMIQGGDFDKGNGTGGKSVYGRTFKDENFNLSHVGPGVVSMANAGPNTNGSQFFICTVKTSWLDGRHVVFGQVIEGMDVVRLIEEQETDRGDRPRKKVVIADCGQLPMSEA

SEQ ID NO: 39931 - protein, 252 aa, Zea mays subsp. mays
MTLSNPKAFSAAPRRLSPINASAPSSTTFRLNTKSTVNFIKFPSLTASSLLLHTSSTKRNRRSCLSVQSSAEPLAEPQSKITHKVYFDISVGNPVGKLAGRIVIGLFGDDVPQTVENFRALCTGEKGFGYKGSTFHRVIRDFMIQGGDFDKGNGTGGKSVYGRTFKDENFNLSHVGPGVVSMANAGPNTNGSQFFICTVKTSWLDGRHVVFGQVIEGMDVVRLIEEQETDRGDRPRKKVVIADCGQLPMSEA

SEQ ID NO: 39932 - DNA, 852 bp, Zea mays subsp. mays
atttccatttcgtatttaataagaggataaaaagaaaatgattcggtgcttcgcgcgtgcacctttcatcgccaccgtccatttcgcatctccaccatccatcaccatctccgcatctcattctcccgcgacgtcatcgccgtcagtatcagcatctagaagagaaatatctctatccattatcgccgtcgcgtcttccatcatctcctccggttacttctcttctccggcacgagctgacttctctgaaatccctaactccggcggagttaagagtctcgacctccgaatcggcgacggtgaaatccccattgaaggagatcaggttgctatacattactatgggagattagctgcgaagcaaggatggagatttgattcaacgtatgatcataaagacagtagtggagactctgttccttttacattcatccttggttctaccaatgttattccggggatcgaaacagctgtgaggtcgatgaaagtaggagggattcgtcgggtggttatacctccgtctcaaggctaccagaacacatcacaagaacctctcccaccaaatttctttgacagacaaagactcttcacgactatctttaacccaacacgtcttgccaatggtgaaggctctactcttggaaccctcgttttcgatatcgaactcgtcagtaccagacgccctaaccgatgattcatacagccagccattcattctcttcggttgtttcttgctggacaagatatcataaaacataaaattaaaattaaacaaaatctttctttaacccactcagattagttgtaactcgatgtgcacctcagtcccaatctatgattatagtattatcc

SEQ ID NO: 39933 - protein, 218 aa, Zea mays subsp. mays
MIRCFARAPFIATVHFASPPSITISASHSPATSSPSVSASRREISLSIIAVASSIISSGYFSSPARADFSEIPNSGGVKSLDLRIGDGEIPIEGDQVAIHYYGRLAAKQGWRFDSTYDHKDSSGDSVPFTFILGSTNVIPGIETAVRSMKVGGIRRVVIPPSQGYQNTSQEPLPPNFFDRQRLFTTIFNPTRLANGEGSTLGTLVFDIELVSTRRPNR

SEQ ID NO: 39934 - DNA, 763 bp, Zea mays subsp. mays
atttatcgatggagcctttgatggaagacgaagagttcagtgttagggaagtggtgttgccgtcgctgatcccggtcgtgccggagccggagctagagagggaggacggagagaggaggagagggagagatgtaatcatagccgttgaccatggtcccaacagcaaacacgcttttgattgggctctcgttcatttctgccgcctcgccgacaccattcacctcgtccacgccgtctcgagtgttaagaacgatgttgtacgagacgagccaagccctcatggagaaactcgctgttgaggcctttcaagttgccatggtgaagagtgtggctcgtgttgttgaaggggaagcaggtaaagtaatctgcaaggaagcagagagattgaagcctgcggctgtcatcatgggtacccgaggccggagcttagtaagaagtgtgctacaagggagtgtaagcgagtattgtttccacaattgcaaatccgctcctgtcattatcgttcctgggaaagaagctggagacgaatcgattgtaagttggacaaaatcaggagatcctaaaccctgaagaaagaagagctctcaagtctctttgtacctcgtatctttctcactgtagttgaagtcattgtttcagaatgtgttgtagaacctttcaagtcattgttttttttttttttttgttattcttcgtcttcttcttctctgtatttgtgtgttttgtttgtagtttcaagttcgtgtataaaaaaacttttgtt

SEQ ID NO: 39935 - protein, 139 aa, Zea mays subsp. mays
MVPTANTLLIGLSFISAASPTPFTSSTPSRVLRTMLYETSQALMEKLAVEAFQVAMVKSVARVVEGEAGKVICKEAERLKPAAVIMGTRGRSLVRSVLQGSVSEYCFHNCKSAPVIIVPGKEAGDESIVSWTKSGDPKP

SEQ ID NO: 39936 - protein, 105 aa, Zea mays subsp. mays
MLYETSQALMEKLAVEAFQVAMVKSVARVVEGEAGKVICKEAERLKPAAVIMGTRGRSLVRSVLQGSVSEYCFHNCKSAPVIIVPGKEAGDESIVSWTKSGDPKP

SEQ ID NO: 39937 - protein, 98 aa, Zea mays subsp. mays
LSMEPLMEDEEFSVREVVLPSLIPVVPEPELEREDGERRRGRDVIIAVDHGPNSKHAFDWALVHFCRLADTIHLVHAVSSVKNDVVRDEPSPHGETRC

SEQ ID NO: 39938 - protein, 96 aa, Zea mays subsp. mays
MEPLMEDEEFSVREVVLPSLIPVVPEPELEREDGERRRGRDVIIAVDHGPNSKHAFDWALVHFCRLADTIHLVHAVSSVKNDVVRDEPSPHGETRC

SEQ ID NO: 39939 - DNA, 955 bp, Zea mays subsp. mays
aaaagaaaagcgaaaagaaacaaaatttgcttctctgttagctcaaagatcaaccatggaagctaccgccctaagctctgcggccaccatcgtctcttcctcatcttcgtcgctatccatcttctctccgaagaagagaacatactcatcttcgccaagaatcgtccggctttctaagagtaaacaaccttacgcataatatgctatttcattgcttacgatcatctctcagggttactttgattcttctcttttcttattttgattcagaggacgacaaagattatgatcccaaattcgaatcggattccttgagcctcgttcctctattccaaaatcgaactctctcgaatgatgaggccatgggattggtcttgagcgccgcctcggtcagaggctggaccaccggttccgggatggaggggccgtctcttccggcaaaggccgatgcggagacgatttcaacatttccgtggtcactattcacgaaatcgccccgtaggcgtatgcgcgttgccttcacttgcaacgtttgtggacagagaactacacgagccataaatccacatgcctacactgacggcaccgtcttcgtgcagtgttgcggatgctatgtgttccataagctggtggataatctgaacttgtttcatgaggtgaagtattatgtgagctcgagttccagctaccaagatgcaaagtgggatgttgggggattcaatctcttccagatggatgacgatactgatgatgatgccggtgacggccgcaatgactccttccctctttaaagaggttgggactagtgatcaatactttgtgcaaacgaatgccgcatatatatatatatatatatatctgtatatagctagctttatcctatcatctagcacgaataatacgtttgaagtatctcagttcccattgataataaattggtcatatatatagctcg

SEQ ID NO: 39940 - protein, 196 aa, Zea mays subsp. mays
MLFHCLRSSLRVTLILLFSYFDSEDDKDYDPKFESDSLSLVPLFQNRTLSNDEAMGLVLSAASVRGWTTGSGMEGPSLPAKADAETISTFPWSLFTKSPRRRMRVAFTCNVCGQRTTRAINPHAYTDGTVFVQCCGCYVFHKLVDNLNLFHEVKYYVSSSSSYQDAKWDVGGFNLFQMDDDTDDDAGDGRNDSFPL

SEQ ID NO: 39941 - protein, 142 aa, Zea mays subsp. mays
MGLVLSAASVRGWTTGSGMEGPSLPAKADAETISTFPWSLFTKSPRRRMRVAFTCNVCGQRTTRAINPHAYTDGTVFVQCCGCYVFHKLVDNLNLFHEVKYYVSSSSSYQDAKWDVGGFNLFQMDDDTDDDAGDGRNDSFPL

SEQ ID NO: 39942 - protein, 124 aa, Zea mays subsp. mays
MEGPSLPAKADAETISTFPWSLFTKSPRRRMRVAFTCNVCGQRTTRAINPHAYTDGTVFVQCCGCYVFHKLVDNLNLFHEVKYYVSSSSSYQDAKWDVGGFNLFQMDDDTDDDAGDGRNDSFPL

SEQ ID NO: 39943 - DNA, 791 bp, Zea mays subsp. mays
gttccttcccatgctagctaagtaacaccaataacatttatttactaaagcttatattacaaagagagaaatgaagaaagctacggcattgatgaaacatgtcgttgcattgttgagttccgcagcaaaggcgaaatctatagccataaagaataaaacaagtgctttcaagacaagactcctcatgttgtcccttgtgaaacatgagaagctcgggttccgttcaatttccaacaagatccacaacctcctagggcattcagatcaagagcaagactacgaccatgaacaagacaatagcaaggctataatcctctacaacaacggggaagtggctcactgtgagagttatgacgtacaaggcgaggaatgtgacaagtatcctgatctgaggcacacgttgttcgaaggtgaggaggattttggggacttggaggaaggccaaggaagttctgtcatagatatggtgaggaactcgaagaaagaagaaggagagagtttcaagctagaagatgagatcgaccatgttgcggatctcttcatttcaaggtttcataagcagatgaagcttcagaaactcttgtcctttaagaggtatcaagaaatgctagcccgaggcacataaaatcacacacctatatatatttatacacgttggcatagatatgaagaatagattcatattacgatttgtgctaacgttcatattttgtgttgtcaatcataaatccttccagcctctcatttttaggataaaatatcatgatctatttaatatgatttcagttatt

SEQ ID NO: 39944 - protein, 184 aa, Zea mays subsp. mays
MKKATALMKHVVALLSSAAKAKSIAIKNKTSAFKTRLLMLSLVKHEKLGFRSISNKIHNLLGHSDQEQDYDHEQDNSKAIILYNNGEVAHCESYDVQGEECDKYPDLRHTLFEGEEDFGDLEEGQGSSVIDMVRNSKKEEGESFKLEDEIDHVADLFISRFHKQMKLQKLLSFKRYQEMLARGT

SEQ ID NO: 39945 - protein, 177 aa, Zea mays subsp. mays
MKHVVALLSSAAKAKSIAIKNKTSAFKTRLLMLSLVKHEKLGFRSISNKIHNLLGHSDQEQDYDHEQDNSKAIILYNNGEVAHCESYDVQGEECDKYPDLRHTLFEGEEDFGDLEEGQGSSVIDMVRNSKKEEGESFKLEDEIDHVADLFISRFHKQMKLQKLLSFKRYQEMLARGT

SEQ ID NO: 39946 - protein, 146 aa, Zea mays subsp. mays
MLSLVKHEKLGFRSISNKIHNLLGHSDQEQDYDHEQDNSKAIILYNNGEVAHCESYDVQGEECDKYPDLRHTLFEGEEDFGDLEEGQGSSVIDMVRNSKKEEGESFKLEDEIDHVADLFISRFHKQMKLQKLLSFKRYQEMLARGT

SEQ ID NO: 39947 - DNA, 670 bp, Zea mays subsp. mays
aaaaaaaaaaaatctcaaatctccttccactataaccatcagtaaaatctttcagccagcgcaaaccttcatcccgtgcaatggaaaccaccggaaaagtgaagaaggcttttggaggaagaaaagccggtggcccaaaaaccaaatcggtttcgaaatcgatcaaagccggtctccagttccccgtcggaagaatcacacgtttcctgaagaagggacggtacgctcagagactcggtggtggagctccggtctacatggccgccgttcttgagtacctcgcagccgaagttcttgagcttgctggtaacgcagcgagagacaacaagaagtcgaggatcattccgaggcatcttcttttggcgattaggaacgatgaagagttggggaagcttctgagtggagttacgatcgctcacggtggtgtgttgccgaacattaactctgttctattgcctaagaagtctgctaaatcgactgaggaagttgcgtccaagtcgccagctaaatctccgaagaaagcttaaatgtgctcgactttggtttcgttcaccagtttagttaatgtgttcgggtgctttgtgttgagtttggtggatgtatatgtaaaaatatctatcttttttaattatgtattttggatttgatgtctcttcaggtccaactttcc

SEQ ID NO: 39948 - protein, 148 aa, Zea mays subsp. mays
METTGKVKKAFGGRKAGGPKTKSVSKSIKAGLQFPVGRITRFLKKGRYAQRLGGGAPVYMAAVLEYLAAEVLELAGNAARDNKKSRIIPRHLLLAIRNDEELGKLLSGVTIAHGGVLPNINSVLLPKKSAKSTEEVASKSPAKSPKKA

SEQ ID NO: 39949 - protein, 90 aa, Zea mays subsp. mays
KKKNLKSPSTITISKIFQPAQTFIPCNGNHRKSEEGFWRKKSRWPKNQIGFEIDQSRSPVPRRKNHTFPEEGTVRSETRWWSSGLHGRRS

SEQ ID NO: 39950 - protein, 89 aa, Zea mays subsp. mays
MAAVLEYLAAEVLELAGNAARDNKKSRIIPRHLLLAIRNDEELGKLLSGVTIAHGGVLPNINSVLLPKKSAKSTEEVASKSPAKSPKKA

SEQ ID NO: 39951 - DNA, 1087 bp, Zea mays subsp. mays
atcaaacaacaccctccaagtgctctctcagatagggatctcaacgcagcagcagcacaaaccctaatttcgagaaagaggagattcgatttctaaaaaaatggcgtacgcttctcgtttcctctccagatctaagcagctacaagggagtttagtcattttgcagcagcaccatgctattcccgtccgcgcttttgccaaggaagctgctcgtcctacttttaaaggagatgagatgttgaagggtgtctttacggagatcaagaacaaatttctggctgcagttgatattctccgtaaggagaagatcacccttgatcctgaagaccctgctgcggtcaaacagtatgctaatgtcatgaagaccatcaggcaaaaggcagacatgttctccgaatctcaacgcatcaaatatgatattgagaacgagactaaggagatcccagatgctcgtgcttacctcttgaagttgaaggatatccgcaccaggagggggcttactgatgagcttggtgctgaggccatgatgttcgaggctttggagaaagttgaaaaggatataaagaagcctctcttgagaagcgacaagaaaggaatggatcttttggttgctgaattcgagaaaggcaacaaaaagcttgggattaggaaagaagatcttcctaaatacgaggagaacttggagctgagcattgctaaagctcagttggatgagctgaagagtgatgctcttggagcaatggaatctcagaaaaagaaggaggagttcaaggatgaggagatgccagacgtgaaatcgttggacatccgtaactttatgtaaggtttgatgatgatcctaagaagaagcattttgagattttcttgcaagaaaagcagaagaaagatctctctcgctcttttttattgttcccttttgttgtttttggttaataaggtcggtctctcaccatggactcgaaatataataccaaatggtcttaactttctttctggttattaatacgcttgtgatttttagaaacaaacgtgggtttcatgtttctgataatggtgatataaatgaaactcgagattacatttaaat

SEQ ID NO: 39952 - protein, 240 aa, Zea mays subsp. mays
MAYASRFLSRSKQLQGSLVILQQHHAIPVRAFAKEAARPTFKGDEMLKGVFTEIKNKFLAAVDILRKEKITLDPEDPAAVKQYANVMKTIRQKADMFSESQRIKYDIENETKEIPDARAYLLKLKDIRTRRGLTDELGAEAMMFEALEKVEKDIKKPLLRSDKKGMDLLVAEFEKGNKKLGIRKEDLPKYEENLELSIAKAQLDELKSDALGAMESQKKKEEFKDEEMPDVKSLDIRNFM

SEQ ID NO: 39953 - protein, 195 aa, Zea mays subsp. mays
MLKGVFTEIKNKFLAAVDILRKEKITLDPEDPAAVKQYANVMKTIRQKADMFSESQRIKYDIENETKEIPDARAYLLKLKDIRTRRGLTDELGAEAMMFEALEKVEKDIKKPLLRSDKKGMDLLVAEFEKGNKKLGIRKEDLPKYEENLELSIAKAQLDELKSDALGAMESQKKKEEFKDEEMPDVKSLDIRNFM

SEQ ID NO: 39954 - protein, 154 aa, Zea mays subsp. mays
MKTIRQKADMFSESQRIKYDIENETKEIPDARAYLLKLKDIRTRRGLTDELGAEAMMFEALEKVEKDIKKPLLRSDKKGMDLLVAEFEKGNKKLGIRKEDLPKYEENLELSIAKAQLDELKSDALGAMESQKKKEEFKDEEMPDVKSLDIRNFM

SEQ ID NO: 39955 - DNA, 1046 bp, Zea mays subsp. mays
cttcacttttagtctctaacgttttcctcattcttcttcttctttttttttttttgcttcgggttcaagtcagctatggtggctatgtcctctgcttctggttctgctctttgtttcactgatgcttctagttctcccgctatcagacgtgatcttggatctttctgtcttcctcctagcacaatcacctttggatttgtcgataagcctattataaatcttcagcgactcagattatctcggttgaagcctcgagcagcaaacgctactgctgtggagaatggtaagcaggattctgacgaagtcccaactccagtggtcatagtcgaccaagattctgaccctgatgcaaccgtcgttgaagtaacatttggagaccgtctcggagctctacttgatactatgaatgccctaaaaaacttgggtctgaatgtcgtcaaggctaatgtctacctcgattcgtctggcaaacacaacaaatttgccattactaaagcggatagtggaagaaaagtagaagaccctgagttgctcgaggccatccgtctcactgtcataaacaatttgcttgagtttcatcctgaatcaagttctcagttggcaatgggagcagcttttggtgttcttccaccaactgaacaggttgatgtggacattgcaacacatatcaaaattgaagatgatggaccagaccgcagtttactgtacatagaaacagcggataggcctggactattagttgagctggtgaagatgattacagatatcagcgtagctgtcgaatctggagagttcgacaccgagggtttgttggctaaggttaagttccacgtaagttacagaaacaaagccctaatcaagcctcttcagcaggttcttgccaatagtctgaggtacttcttgaggcgtccatctactaacgactccagtttctgaaatgtcatttataagaaagaaaacaaaaaaacacaaaattgaaatatcatttcacatgaatacttatttttttacattttaccaaaataaactgcttcgttttagtggcc

SEQ ID NO: 39956 - protein, 286 aa, Zea mays subsp. mays
MVAMSSASGSALCFTDASSSPAIRRDLGSFCLPPSTITFGFVDKPIINLQRLRLSRLKPRAANATAVENGKQDSDEVPTPVVIVDQDSDPDATVVEVTFGDRLGALLDTMNALKNLGLNVVKANVYLDSSGKHNKFAITKADSGRKVEDPELLEAIRLTVINNLLEFHPESSSQLAMGAAFGVLPPTEQVDVDIATHIKIEDDGPDRSLLYIETADRPGLLVELVKMITDISVAVESGEFDTEGLLAKVKFHVSYRNKALIKPLQQVLANSLRYFLRRPSTNDSSF

SEQ ID NO: 39957 - protein, 283 aa, Zea mays subsp. mays
MSSASGSALCFTDASSSPAIRRDLGSFCLPPSTITFGFVDKPIINLQRLRLSRLKPRAANATAVENGKQDSDEVPTPVVIVDQDSDPDATVVEVTFGDRLGALLDTMNALKNLGLNVVKANVYLDSSGKHNKFAITKADSGRKVEDPELLEAIRLTVINNLLEFHPESSSQLAMGAAFGVLPPTEQVDVDIATHIKIEDDGPDRSLLYIETADRPGLLVELVKMITDISVAVESGEFDTEGLLAKVKFHVSYRNKALIKPLQQVLANSLRYFLRRPSTNDSSF

SEQ ID NO: 39958 - protein, 177 aa, Zea mays subsp. mays
MNALKNLGLNVVKANVYLDSSGKHNKFAITKADSGRKVEDPELLEAIRLTVINNLLEFHPESSSQLAMGAAFGVLPPTEQVDVDIATHIKIEDDGPDRSLLYIETADRPGLLVELVKMITDISVAVESGEFDTEGLLAKVKFHVSYRNKALIKPLQQVLANSLRYFLRRPSTNDSSF

SEQ ID NO: 39959 - DNA, 580 bp, Zea mays subsp. mays
accaaagtccaagcaccttcccaaaaaatcccccattttcttcgaggcgaggagagcgtgaaagacagggcaccggcagcgacgatgtcggggcgcggcaagggcggcaaaggtctgggcaagggcggagcaaagcgccaccggaaggtgctccgtgacaacatccagggcatcaccaagcccgccatccggaggctggctcggaggggcggcgtgaagcgcatttcggggcttatctacgaggagacccgcggcgtcctcaagatcttcctcgagaacgtcatccgcgacgccgtcacctacaccgagcacgcacgctcgcaagactgttaccgccatggacgtcgtctacgcgctcaagcgccagggccgaaccctctacggcttcggaggctaggctggatgcctcttctccttgctgacgaggatgcctgtttgttgttagggttacttcgtttagttccttgtctgtgacgtgttggactattgttagtagtattcttgaagttgtgtttcgaatgtaatccaatcttatcgttcgagaattgaaatgattcctgggcaacattatgcaggcaag

SEQ ID NO: 39960 - protein, 157 aa, Zea mays subsp. mays
TKVQAPSQKIPHFLRGEESVKDRAPAATMSGRGKGGKGLGKGGAKRHRKVLRDNIQGITKPAIRRLARRGGVKRISGLIYEETRGVLKIFLENVIRDAVTYTEHARSQDCYRHGRRLRAQAPGPNPLRLRRLGWMPLLLADEDACLLLGLLRLVPCL

SEQ ID NO: 39961 - protein, 129 aa, Zea mays subsp. mays
MSGRGKGGKGLGKGGAKRHRKVLRDNIQGITKPAIRRLARRGGVKRISGLIYEETRGVLKIFLENVIRDAVTYTEHARSQDCYRHGRRLRAQAPGPNPLRLRRLGWMPLLLADEDACLLLGLLRLVPCL

SEQ ID NO: 39962 - DNA, 772 bp, Zea mays subsp. mays
acacaaaatctcaaaacactctttcattcatgaacagagcttatctcttctagtctctctttcctttttcttccgagctagctaacaaaagaagggacataatggagtgggaggaacaaggattgtggtcgtccttggtgcttgatagcgcttcgatgctaaagctcaccgcttcgactctaacggctactgtgctttcctctttcgtagagctcctcgctcaggtcgctgccttggagagtgatgttaaagagaaaggagacgaggttgttgatgcagaggaaggcaatggaaacaatgaagatggtgatagtggtgatgatgttggaggggaagacgaagaagaaggcggtgatgcagaggaagtaaaggagaccaagaaaggaccagcaagtggtcctggtgagaatggtgaagctggagatggtgatgatgatgacgatgaacctgaagggggtgacgacaatgacgatgatgacgagaacaatgatgatgatgatgatgatgaggaagaagaggatgaagatggtggtgaagaagaagaggaagaggaggtggaggaagaagaggaagaggaagaagatgaggaggaagaggccctacagccaccaaagaagaggaagaagtaaacaacccaaccgctttgatcttctaacattttagattcaaaatatcaaaaacttcttgtgggttttacctgaagagagtctttagcttccactgtaatctctgttgttccatgaatcaaaaagacctttgtttactgtgtacc

SEQ ID NO: 39963 - protein, 175 aa, Zea mays subsp. mays
MEWEEQGLWSSLVLDSASMLKLTASTLTATVLSSFVELLAQVAALESDVKEKGDEVVDAEEGNGNNEDGDSGDDVGGEDEEEGGDAEEVKETKKGPASGPGENGEAGDGDDDDDEPEGGDDNDDDDENNDDDDDDEEEEDEDGGEEEEEEEVEEEEEEEEDEEEEALQPPKKRKK

SEQ ID NO: 39964 - protein, 157 aa, Zea mays subsp. mays
MLKLTASTLTATVLSSFVELLAQVAALESDVKEKGDEVVDAEEGNGNNEDGDSGDDVGGEDEEEGGDAEEVKETKKGPASGPGENGEAGDGDDDDDEPEGGDDNDDDDENNDDDDDDEEEEDEDGGEEEEEEEVEEEEEEEEDEEEEALQPPKKRKK

SEQ ID NO: 39965 - DNA, 754 bp, Zea mays subsp. mays
gggatcgatctctctttctctgaaacattttggaaacttctaggtaaggcttcttcattccaaagcaagaccacaatttttcttcatggccaccggagaggagaaacctgttatggtcgtcggtatcgacgaaagcgagcagagcacttacgccttggagtggaccctcgatcgtttcttcactccctacgctcctaattttcctttcaagctcttcatcgtccacgccaaacctaacgccgtctctgccgttggtcttgctggtcccggagctgcggaggttctgccttatgttgataccgatttgaagcatattgctgccagggttatcgagatggctaaaggtatctgtcagagcaaatcggttaatggcgctatgttcgaagtttttgaaggtgatgcaagaagtatactgtgcgatgttgtggataaacatcatgcttctcttcttgtcgtgggaagccatggttatggagctatcaagagggcggttctagggagcgtgagcgactactgtgctcatcatgctcattgctcggtgatgatcgtgaagaagcctaagatcaagcactgatgatcacctaaacccaagctgttatatcagtcaaagcaaagcaaagtctcatctgcatagtcgtcagtttcggtgaaatgaaataaaattgtgaaacgatccaatctatatattaatattcgtgtgtaaattggttattgtattcataaactattttatatattgacgtttgataatact

SEQ ID NO: 39966 - protein, 162 aa, Zea mays subsp. mays
MATGEEKPVMVVGIDESEQSTYALEWTLDRFFTPYAPNFPFKLFIVHAKPNAVSAVGLAGPGAAEVLPYVDTDLKHIAARVIEMAKGICQSKSVNGAMFEVFEGDARSILCDVVDKHHASLLVVGSHGYGAIKRAVLGSVSDYCAHHAHCSVMIVKKPKIKH

SEQ ID NO: 39967 - protein, 153 aa, Zea mays subsp. mays
MVVGIDESEQSTYALEWTLDRFFTPYAPNFPFKLFIVHAKPNAVSAVGLAGPGAAEVLPYVDTDLKHIAARVIEMAKGICQSKSVNGAMFEVFEGDARSILCDVVDKHHASLLVVGSHGYGAIKRAVLGSVSDYCAHHAHCSVMIVKKPKIKH

SEQ ID NO: 39968 - DNA, 671 bp, Zea mays subsp. mays
atttagctctgttcatagaaccaaagatacatggcgactctaggccatatcgcgagagaatcatccgacgtcacacgcctcgcccagttctacaaagaggtatttgggtttgaggagatcgaaagccctgattttggagacttgaaggtgatatggctaaacttaccaggtgcttttgcgatgcacatcatccagagaaacacttcaacaaacctccctgaaggtccttacagcgccacctcggccgttcgagatcctagccatctccctatgggccaccatatctgcttctccgtctctaacttcgactccttccttcgttctctcaaggagaaagggatagacactttccagaagtctcttcctgatggaaaagtcaagcaagttttcttctttgatcctgatggaaacggattagaggtagcaagtcgatctgagtcttgaaccgggaactttgtggtatgagtaattaatgaaaataaaaaataatcagcttgttcaaagcaggataattaaagttgcatatctaaagaaaaacgttgctgttctcgtttcttagctggagtgttttggaacaatcttgagtctctatgctgtctaggctttgatgtttacttctgacaacttacccttcatgtgctttgaatgttggatgtatcgcattaatgacc

SEQ ID NO: 39969 - protein, 137 aa, Zea mays subsp. mays
MATLGHIARESSDVTRLAQFYKEVFGFEEIESPDFGDLKVIWLNLPGAFAMHIIQRNTSTNLPEGPYSATSAVRDPSHLPMGHHICFSVSNFDSFLRSLKEKGIDTFQKSLPDGKVKQVFFFDPDGNGLEVASRSES

SEQ ID NO: 39970 - protein, 87 aa, Zea mays subsp. mays
MHIIQRNTSTNLPEGPYSATSAVRDPSHLPMGHHICFSVSNFDSFLRSLKEKGIDTFQKSLPDGKVKQVFFFDPDGNGLEVASRSES

SEQ ID NO: 39971 - DNA, 956 bp, Zea mays subsp. mays
aatcacgtcctcacatcaaagaaaactaagccaagtatatttataactaaataaaaaatgcttgacaaacttatcggagagtacgggcatggatacggcaatgggtacggccacaaggatcacagaagcagcggctacggctttgaggagcacaagaagtacgagtctcatatggagtcagaaggaggctactttgaccgtcaagcccgctacgaccaccgcgtgaggcttccggtcaaccacggccgtccacccatggctcacatgcctccctgtgatgaagaagactccgactcagatgtagatgagttctataagagcagccgaagccaccacactactgtgttaccggaccacggaaaaatccaccgccaacaaccacctcatatgaacttcatgcccccacctccgatgtctcaacctcaccacaatatgggtaatggatggcaggggaggcatgaagatgcatacctcggtgggcatgggatgcagcaccacggtgagcacgggatgcagcaccacggtgagcacgggatgcagcaccacggtgagcacgggatgcagcaccacggtgagcacgggatgaagcaccacggtgcgcacggaatgaagcaccaggacaggcttatggctcctcaggtgttaccacatcatgtctacatgaacccaaacagcggaggcggccaccacaaggccgggtgggggaataagggactctaactgcaaccaactactctaccggttcaaataaaaagtaatgattatgtataataccagttaacgaaactataattaagatgtgtgtgtgaggaacatgtttcagcatcctactaaacctaaacataggccttttagcaaaaaaataaaggaagtgttcttgtttgagaaacttatgattactaaaaggaatgttgttgttgctgcttatgttaaataaaagtgatgcaagtattacg

SEQ ID NO: 39972 - protein, 220 aa, Zea mays subsp. mays
MLDKLIGEYGHGYGNGYGHKDHRSSGYGFEEHKKYESHMESEGGYFDRQARYDHRVRLPVNHGRPPMAHMPPCDEEDSDSDVDEFYKSSRSHHTTVLPDHGKIHRQQPPHMNFMPPPPMSQPHHNMGNGWQGRHEDAYLGGHGMQHHGEHGMQHHGEHGMQHHGEHGMQHHGEHGMKHHGAHGMKHQDRLMAPQVLPHHVYMNPNSGGGHHKAGWGNKGL

SEQ ID NO: 39973 - protein, 182 aa, Zea mays subsp. mays
MESEGGYFDRQARYDHRVRLPVNHGRPPMAHMPPCDEEDSDSDVDEFYKSSRSHHTTVLPDHGKIHRQQPPHMNFMPPPPMSQPHHNMGNGWQGRHEDAYLGGHGMQHHGEHGMQHHGEHGMQHHGEHGMQHHGEHGMKHHGAHGMKHQDRLMAPQVLPHHVYMNPNSGGGHHKAGWGNKGL

SEQ ID NO: 39974 - protein, 154 aa, Zea mays subsp. mays
MAHMPPCDEEDSDSDVDEFYKSSRSHHTTVLPDHGKIHRQQPPHMNFMPPPPMSQPHHNMGNGWQGRHEDAYLGGHGMQHHGEHGMQHHGEHGMQHHGEHGMQHHGEHGMKHHGAHGMKHQDRLMAPQVLPHHVYMNPNSGGGHHKAGWGNKGL

SEQ ID NO: 39975 - DNA, 748 bp, Zea mays subsp. mays
aaaactcactcctcaaacctctctctcatcttcaagctattcgatcaatggcagcgacaatggcgacatcagcaaaatgcatgtccctaaacacatctcttcctaaagccctaaaccaaaccaaacccatctgttcctcaaaacccttcatctccctcccatccccaccaaaacccaccgtctctctcgccgtcactagcaccgccctcgccggagccgtgttctcttccctcagctactcggaacccgctttcgccgctcaccagatcgctcagctggcagcggcggctcaaggtagcgacaaccgcggcctagctctcctcctcccgatcgtcccggccatcggatgggtactcttcaacatcctccagccagctcttaaccagatcaacaagatgcgcgctagcaaaggagtcgtcgtgggtcttggcatcggtggtggtctcgctgcgtcagggcttttgactatgaccccggaggcctccgctagtatggtcaacgagatggcggcggtggcggaagctgcggcgaaagttgaagacaacaggggacagttgttgttgttcgtggttgcgccggctctgctttgggttctttacaatatattgcagcctgctttgaaccaactcaacaaaatgaggaataagtaataatcttattgtttacatgtaatcattgttgggattcaaaatgtaaaattaatcatttgtttcatggacagattctctggttaaattttggacagact

SEQ ID NO: 39976 - protein, 215 aa, Zea mays subsp. mays
NSLLKPLSHLQAIRSMAATMATSAKCMSLNTSLPKALNQTKPICSSKPFISLPSPPKPTVSLAVTSTALAGAVFSSLSYSEPAFAAHQIAQLAAAAQGSDNRGLALLLPIVPAIGWVLFNILQPALNQINKMRASKGVVVGLGIGGGLAASGLLTMTPEASASMVNEMAAVAEAAAKVEDNRGQLLLFVVAPALLWVLYNILQPALNQLNKMRNK

SEQ ID NO: 39977 - protein, 200 aa, Zea mays subsp. mays
MAATMATSAKCMSLNTSLPKALNQTKPICSSKPFISLPSPPKPTVSLAVTSTALAGAVFSSLSYSEPAFAAHQIAQLAAAAQGSDNRGLALLLPIVPAIGWVLFNILQPALNQINKMRASKGVVVGLGIGGGLAASGLLTMTPEASASMVNEMAAVAEAAAKVEDNRGQLLLFVVAPALLWVLYNILQPALNQLNKMRNK

SEQ ID NO: 39978 - protein, 196 aa, Zea mays subsp. mays
MATSAKCMSLNTSLPKALNQTKPICSSKPFISLPSPPKPTVSLAVTSTALAGAVFSSLSYSEPAFAAHQIAQLAAAAQGSDNRGLALLLPIVPAIGWVLFNILQPALNQINKMRASKGVVVGLGIGGGLAASGLLTMTPEASASMVNEMAAVAEAAAKVEDNRGQLLLFVVAPALLWVLYNILQPALNQLNKMRNK

SEQ ID NO: 39979 - DNA, 1129 bp, Zea mays subsp. mays
attttccagactctccaccttcgatctatagatcctcttcttcaccaccggagagctcagccgtcgcactgaatccaatcaaccgagaaagcaatctctagatctgtcgtctccttcacatcttcttccagagatgtataataacatgggacctcagcctgggatgccaatgcctcaggcagttcctcagcctaacccttttgggaatgccttctctggtcctggctctggacttatcagaagtggcttgggagcttatggggagaagattttcggatccagctctgagtatgtgcagagcaacataactcgttacttctccgatcctcaatactattttcaagtgaatgaccaatatgtgaggaacaagttgaagattgttctgcttcctttccttcacaggggacactggactagaatctcagagccagttgggggtagactttcatacaagcccccgatatatgatattaatgcaccagacttatacattccacttatggcatttggcacatacgttgttcttgctggtttgtcactaggactctatgggaagttttctccggaagctctgaactggctttttgtcaaaggaatggttggctggtttttgcaagtcatgctgctgaagataacattgctttcattgggtagcggcgaagcacccctcttggatatcgtggcatatgctggctatactttcacgggtctctgcttagctgttcttggcaagatcatctggggatactcttactatgctctacttccgtggacctgcttgtgcagcggggttttcctagtgaagacgatgaagcgagttctctttgcggaagctaggagttatgactcgagcaggcatcactacctcttgatctttgtagctttagcacagtttcctcttttgatctggcttggtaacattagtgtcaattggctcttttgaaatgcactacgtttaagatgttgtgaaaagaaaaaacacctctgatgttatgttagcagaatttgagtttttatttatttctgggtttagacttttgtcaaacataaatatatgatgaaagaaaagtgtgatctcaagtacacatctctttttttatcttttgttttgaatgtcagtttcttgact

SEQ ID NO: 39980 - protein, 269 aa, Zea mays subsp. mays
MYNNMGPQPGMPMPQAVPQPNPFGNAFSGPGSGLIRSGLGAYGEKIFGSSSEYVQSNITRYFSDPQYYFQVNDQYVRNKLKIVLLPFLHRGHWTRISEPVGGRLSYKPPIYDINAPDLYIPLMAFGTYVVLAGLSLGLYGKFSPEALNWLFVKGMVGWFLQVMLLKITLLSLGSGEAPLLDIVAYAGYTFTGLCLAVLGKIIWGYSYYALLPWTCLCSGVFLVKTMKRVLFAEARSYDSSRHHYLLIFVALAQFPLLIWLGNISVNWLF

SEQ ID NO: 39981 - protein, 265 aa, Zea mays subsp. mays
MGPQPGMPMPQAVPQPNPFGNAFSGPGSGLIRSGLGAYGEKIFGSSSEYVQSNITRYFSDPQYYFQVNDQYVRNKLKIVLLPFLHRGHWTRISEPVGGRLSYKPPIYDINAPDLYIPLMAFGTYVVLAGLSLGLYGKFSPEALNWLFVKGMVGWFLQVMLLKITLLSLGSGEAPLLDIVAYAGYTFTGLCLAVLGKIIWGYSYYALLPWTCLCSGVFLVKTMKRVLFAEARSYDSSRHHYLLIFVALAQFPLLIWLGNISVNWLF

SEQ ID NO: 39982 - protein, 259 aa, Zea mays subsp. mays
MPMPQAVPQPNPFGNAFSGPGSGLIRSGLGAYGEKIFGSSSEYVQSNITRYFSDPQYYFQVNDQYVRNKLKIVLLPFLHRGHWTRISEPVGGRLSYKPPIYDINAPDLYIPLMAFGTYVVLAGLSLGLYGKFSPEALNWLFVKGMVGWFLQVMLLKITLLSLGSGEAPLLDIVAYAGYTFTGLCLAVLGKIIWGYSYYALLPWTCLCSGVFLVKTMKRVLFAEARSYDSSRHHYLLIFVALAQFPLLIWLGNISVNWLF

SEQ ID NO: 39983 - DNA, 1034 bp, Zea mays subsp. mays
atttttcttttgattgaccggcggcgatggacgcattgagagcttcttacggtgactcttcatcggactcggatactgatgatctctctccggctgctgaaaatcacggcgaggtatcaacctctggaaaacacgggaaggagtcgatttctctgcctcctccgccgctttcgcttctcgaatccattggatccacaggttctttggatgtctactcaacgaagactgtgactagagtaaggaactttcctcatgtcgatggaaactacgccttgcatgtttacatccctgtttttataccactattggcgaagaaggagattgcctgtgttttaaagagggttgcatcacttgttccccatcttcatttggtcgaagctgatattccactcagcattctttgcaacgatgaccagaagcttgaccatgctttggggagagagttccacataagcttgggaagaagcgttcctcttcgtgttcatcagattaactctctggtttctatgcttaggcaaaaacttcagttacacaagagatattggattgattttaataagtggcaagtctttgtgaatgacgactctactcgttctttcctctctctggaaatcaccacttctggactatccgagataagcaagcaaattgatgctgttaatgaagtttacaagcttcacaatcttccagagttttacaaggatccgcgaccacatatctccttggtctgggcgttgggtgatattagaacttccttaaagggagctgttgacggggaactgaagaagcttagagctggtggttgcgtgcagaatcgtatattcacctctaagttttctggaatcgagtgtaagataggaaacaaaacacacaaaatatgtaaactcccagatgaataatatctctgtatcacaatacctatcaggtatgcatttgtaacggcatagaagcatgagtttactatttttatttgggtggtccaatagtccctgtgcttaggaaaagagagataatgaacagtctttgtgcttcgg

SEQ ID NO: 39984 - protein, 290 aa, Zea mays subsp. mays
MDALRASYGDSSSDSDTDDLSPAAENHGEVSTSGKHGKESISLPPPPLSLLESIGSTGSLDVYSTKTVTRVRNFPHVDGNYALHVYIPVFIPLLAKKEIACVLKRVASLVPHLHLVEADIPLSILCNDDQKLDHALGREFHISLGRSVPLRVHQINSLVSMLRQKLQLHKRYWIDFNKWQVFVNDDSTRSFLSLEITTSGLSEISKQIDAVNEVYKLHNLPEFYKDPRPHISLVWALGDIRTSLKGAVDGELKKLRAGGCVQNRIFTSKFSGIECKIGNKTHKICKLPDE

SEQ ID NO: 39985 - DNA, 1064 bp, Zea mays subsp. mays
atcatttagggttggttctctttcctctccgcacgaacgaacggttacgagtttctccttcttctctctgtatggcgcaagacgatcaatcggcggcgagatctaccggaacagttaactggttcagcgatgccaaaggctacggtttcatcgctcccgacgatggcggagacgagcttttcgttcaccagtcctcgatcgtctccgacggtttccgaaccttgactgttgatgagccggttgagtacgcgatcgcggttggaaacgacggcaagaccaaggccgtcgatgtcactgctcccggcggcggatctctcaacaagaaggaaatgagctcccgcggaaacggcggtagttgtttcagttgcggcgaggttggccatatggcgaaggattgcgccggtgggaaaagatacggaggcggagggcgtagatccggtggcgaaggctcttgctacgtgtgcggtaatgtaggacatttcgctagggattgtaggcagaacgccggtggaaacagcggcggcggcggcggaggcgagtgttacaattgcggagtggttggtcacatggcgaaggattgtcgcggtgggaacagatacggtggccgtggatctggcggtgagggatgctacacgtgtggcgatgtggggcatttcgctagggattgcagggcaaacggcggtggaaacgtcggaggtggttggcggtggaaacacttgctatacctgtggcggagttggccacatggctagggtttgcacaagcaggagaccgtccggtactggtactggtgggggtggtccttgctacgagtgtggaggcattggtcacttggcacgtgactgtgatcgtagaggaagcggaagaagtggtggcacgtgtttcacatgcggggaggaaggtcactttgcaagggactgctcttcgcttgcttaacaaagaaaaaaagaaaagtaatgttgataaactttttttgttttctattcaaatggtgactatgaatgtgatagctagagttgtttctgttgatgttttggaatatgtttattgggagttagtttatc

SEQ ID NO: 39986 - protein, 249 aa, Zea mays subsp. mays
HLGLVLFPLRTNERLRVSPSSLCMAQDDQSAARSTGTVNWFSDAKGYGFIAPDDGGDELFVHQSSIVSDGFRTLTVDEPVEYAIAVGNDGKTKAVDVTAPGGGSLNKKEMSSRGNGGSCFSCGEVGHMAKDCAGGKRYGGGGRRSGGEGSCYVCGNVGHFARDCRQNAGGNSGGGGGGECYNCGVVGHMAKDCRGGNRYGGRGSGGEGCYTCGDVGHFARDCRANGGGNVGGGWRWKHLLYLWRSWPHG

SEQ ID NO: 39987 - protein, 226 aa, Zea mays subsp. mays
MAQDDQSAARSTGTVNWFSDAKGYGFIAPDDGGDELFVHQSSIVSDGFRTLTVDEPVEYAIAVGNDGKTKAVDVTAPGGGSLNKKEMSSRGNGGSCFSCGEVGHMAKDCAGGKRYGGGGRRSGGEGSCYVCGNVGHFARDCRQNAGGNSGGGGGGECYNCGVVGHMAKDCRGGNRYGGRGSGGEGCYTCGDVGHFARDCRANGGGNVGGGWRWKHLLYLWRSWPHG

SEQ ID NO: 39988 - protein, 140 aa, Zea mays subsp. mays
MSSRGNGGSCFSCGEVGHMAKDCAGGKRYGGGGRRSGGEGSCYVCGNVGHFARDCRQNAGGNSGGGGGGECYNCGVVGHMAKDCRGGNRYGGRGSGGEGCYTCGDVGHFARDCRANGGGNVGGGWRWKHLLYLWRSWPHG

SEQ ID NO: 39989 - DNA, 557 bp, Zea mays subsp. mays; identical to SEQ ID NO: 18301

SEQ ID NO: 39990 - protein, 133 aa, Zea mays subsp. mays; identical to SEQ ID NO: 18302

SEQ ID NO: 39991 - DNA, 853 bp, Zea mays subsp. mays
gttccccaaggatttcaatctcaaagtctctctctccctcttaagacccaaaaaaaatcatcatctttctaatacggaattatttagggtttattgtcgtttgaatcttcttctactattgccatggatatagaagaaactaatataattgaagttgaaacgaaggtgatgaatctagcgctaaacatggagtctatgaacattctctcaatccgtgtacacaatctgattgaagattttaccgaagacgtgattttacatataagatcacgttacatccgcttggagccacacggcttcacgccaagtcatatctctgaactccttcgtggccaacaagttgatgaatctcaacacataggtgaaaagatcgctaatgaaatcaatcgttcacttagcaatgataaaactctccgagagcctgtcttcgtgaacgtcgaagttgaattcgtcaaagagaggcgtttggttgtgccgtctgatgttcctgcttcgattgaagttttacagaggttggtggaagaacatatagtggatttgaacggaaataaagaagctatgtgttcaatttgcatcgaggatttgtccaagagtcaacaaagcatcattgagatgcctaactgtttgcatatgtttcatcaaaactgtctttttgagtggcttggtcggaaaaactcgtgtccgttgtgccggagattcgtacgacctaggaataggatcaagaaacagaaactcgaaaacgttacagcttcaggggtttcgattatgttgcgaattgttgacactcatccttatgttaattagttcttataagatgaaattgtttacaagtatcatgaattattgactgact

SEQ ID NO: 39992 - protein, 226 aa, Zea mays subsp. mays
MDIEETNIIEVETKVMNLALNMESMNILSIRVHNLIEDFTEDVILHIRSRYIRLEPHGFTPSHISELLRGQQVDESQHIGEKIANEINRSLSNDKTLREPVFVNVEVEFVKERRLVVPSDVPASIEVLQRLVEEHIVDLNGNKEAMCSICIEDLSKSQQSIIEMPNCLHMFHQNCLFEWLGRKNSCPLCRRFVRPRNRIKKQKLENVTASGVSIMLRIVDTHPYVN

SEQ ID NO: 39993 - protein, 211 aa, Zea mays subsp. mays
MNLALNMESMNILSIRVHNLIEDFTEDVILHIRSRYIRLEPHGFTPSHISELLRGQQVDESQHIGEKIANEINRSLSNDKTLREPVFVNVEVEFVKERRLVVPSDVPASIEVLQRLVEEHIVDLNGNKEAMCSICIEDLSKSQQSIIEMPNCLHMFHQNCLFEWLGRKNSCPLCRRFVRPRNRIKKQKLENVTASGVSIMLRIVDTHPYVN

SEQ ID NO: 39994 - protein, 205 aa, Zea mays subsp. mays
MESMNILSIRVHNLIEDFTEDVILHIRSRYIRLEPHGFTPSHISELLRGQQVDESQHIGEKIANEINRSLSNDKTLREPVFVNVEVEFVKERRLVVPSDVPASIEVLQRLVEEHIVDLNGNKEAMCSICIEDLSKSQQSIIEMPNCLHMFHQNCLFEWLGRKNSCPLCRRFVRPRNRIKKQKLENVTASGVSIMLRIVDTHPYVN

SEQ ID NO: 39995 - DNA, 711 bp, Zea mays subsp. mays
atctattattactcacactagtcacaaaccttatcggagtgaagtgaagattggtgggggtagtagcgaaaatggcgtcgattacagcttcttctactttccgctccttgtcaacaaccaaaagccctaacctttcttcgacccatctccttcctctttccaaaaaccacagcagagtttgcatctttacgaaacagaacccccttgggctgaggaagctttcgtcccttggccaaggaggagaagctgtcgcagtcgcagtcgcagtcgcagatgaagagcaacaacagcagcaagaggctgtctctgtccctgtctctccttcagacatgctcaccatgttttttcaggctgatggaactttgaatgacgcagctattcctaatgtcacaaaggccttacaggacatcgacggagtttccaatttaaaggttcaagttgctgaaggtgttgccgttgttgagctttcaaagcaaacaacggttcaagcaacaggagtggcgtcaagcttggtggagactatacaaggagctggctttaagttacaaaccttgaatctgagctttgaagacgaagatgaagttcttgtctaattaaatcatctttctcctcctccatttttgtgattaaagaaacacattaatgttcaattattatttaaaaatgacaatgtgccatattacaaaagtaatgaactctcacttttcttac

SEQ ID NO: 39996 - protein, 173 aa, Zea mays subsp. mays
MASITASSTFRSLSTTKSPNLSSTHLLPLSKNHSRVCIFTKQNPLGLRKLSSLGQGGEAVAVAVAVADEEQQQQQEAVSVPVSPSDMLTMFFQADGTLNDAAIPNVTKALQDIDGVSNLKVQVAEGVAVVELSKQTTVQATGVASSLVETIQGAGFKLQTLNLSFEDEDEVLV

SEQ ID NO: 39997 - protein, 87 aa, Zea mays subsp. mays
MLTMFFQADGTLNDAAIPNVTKALQDIDGVSNLKVQVAEGVAVVELSKQTTVQATGVASSLVETIQGAGFKLQTLNLSFEDEDEVLV

SEQ ID NO: 39998 - DNA, 1221 bp, Zea mays subsp. mays
agaaggaaaccctaataacctctcccgggtcccggcgctgagcgagcaggactgcaggagcagcgagaaaggcaaccgcggcgccccgccgccccgcctcgccgctgcctcacccgccgtgcgctgccgcgacccgaccaaatcgaactgaagctgcgtgaagcggctgttgggctctgttgttggatgggctttcgggcactcagattgggctgtagtttagagagtcccagcgacctgtagcctcctcctctctccgtcgacctcgctctcgcctcgccgcctcctacccgcagcagcgcctccattgctctctctcacgagtcccggcgttccagtggggggcattcatggcggggcagtccgacccgcacctctccatcttctcgccctccgaggtggagttcgtggcggaggatgagattgtcgaaatcgtccccaacatccgcatggacgccctcaacatgatctgcggggatttcgggcccttcttcccccagattcccaccaaggtgcctctctggctcgctgtcgcgctcaagaagcgtagcaagtgcaccatccgcaccccggactggatgactgttgaccgcttgacacaggtattggaagcggaaagagagtcgccacgagaattccagccattaccattccactatattgaaatttctaagcttctgtttgatcatgctcgtgatgacatctcagatgcatacctggtaagatctctaattgaggacatcagagatgtcagatttcacaaggttgagactggattagagacgatatctggacgcacccatgctgtaaagctcaaaaatctctctgcaatggaagtgaacattgtccgccctttcatggtgagaactttgcaggcattctataagcacgatagtccacagatgattcagcaagcagataatatagggagcagagcaacactggttacagaccgtggcccgagaagagatctaaggcgcaggtagtccacttgtattctgccaaaaaaatgtatatctgaggacagcagcaagtgcttgctttcttgcaataataccagctaagtatgtgctaatgagtcctgagatgtatcagatagtaaagcaatggtggatcatagttttgtctacttttatagagggaactggcattgctcttccccgctttgaaattgtactgctttattcctactgatgttatatgcaagtgtgtgtgtggctc

SEQ ID NO: 39999 - protein, 211 aa, Zea mays subsp. mays
MAGQSDPHLSIFSPSEVEFVAEDEIVEIVPNIRMDALNMICGDFGPFFPQIPTKVPLWLAVALKKRSKCTIRTPDWMTVDRLTQVLEAERESPREFQPLPFHYIEISKLLFDHARDDISDAYLVRSLIEDIRDVRFHKVETGLETISGRTHAVKLKNLSAMEVNIVRPFMVRTLQAFYKHDSPQMIQQADNIGSRATLVTDRGPRRDLRRR

SEQ ID NO: 40000 - protein, 178 aa, Zea mays subsp. mays
MDALNMICGDFGPFFPQIPTKVPLWLAVALKKRSKCTIRTPDWMTVDRLTQVLEAERESPREFQPLPFHYIEISKLLFDHARDDISDAYLVRSLIEDIRDVRFHKVETGLETISGRTHAVKLKNLSAMEVNIVRPFMVRTLQAFYKHDSPQMIQQADNIGSRATLVTDRGPRRDLRRR

SEQ ID NO: 40001 - protein, 173 aa, Zea mays subsp. mays
MICGDFGPFFPQIPTKVPLWLAVALKKRSKCTIRTPDWMTVDRLTQVLEAERESPREFQPLPFHYIEISKLLFDHARDDISDAYLVRSLIEDIRDVRFHKVETGLETISGRTHAVKLKNLSAMEVNIVRPFMVRTLQAFYKHDSPQMIQQADNIGSRATLVTDRGPRRDLRRR

SEQ ID NO: 40002 - DNA, 862 bp, Zea mays subsp. mays
aatcaatcaagccgagaccaaagttggtggtgtaatccgatcctagtcttcttgtgttcgatttcatctcttcctgtgaatttcagagatatgtcttcaagggagaggctaggttcatctaagcattatagccgaggcatgtcaactagtggttcatcatcatcccggcaccacgagaccatctcttccgcttctgaccaccgggtttcccattccgacgttcttgaaaacaagattgcagctcgagctgctgagattgaccgtctctctagtgacaaccgcaaacttgctgctagctacgtagctctcaaggaagacctatcccttgctgaccgcgaagtccagggactgagagctcacatcgtcaagacagagacagacggcgagattcagatccgaggtgcactcgagaagattgcgaaacttgagggtattgtcaacaacagggataacatcaggagggagctgcaatcagctcacattgaggctcatacattagccagagaacgcgaggagctagctgcacaggtgaaggcggcagtaaaggagttgaagaaggtttgcctcgagtcagagggtctagagtcttcagttcaagagcttgagcggttgaaagaagagcaccagagattaagggaagagtttgatgcagagaagagcggtaacgtagagaaacttgagcaattgaaagagatggagagtaacataatcggagcagtcaaagctattgagaagctgcgaagtgagatcgcaaccgcaaggagtagagcttgagactcaaaagagggtctttctatttagcaaaagaaacaaaactgtgttcctaattttcgcaatatatataacatgagtttattttttc

SEQ ID NO: 40003 - protein, 257 aa, Zea mays subsp. mays
NQSSRDQSWWCNPILVFLCSISSLPVNFRDMSSRERLGSSKHYSRGMSTSGSSSSRHHETISSASDHRVSHSDVLENKIAARAAEIDRLSSDNRKLAASYVALKEDLSLADREVQGLRAHIVKTETDGEIQIRGALEKIAKLEGIVNNRDNIRRELQSAHIEAHTLAREREELAAQVKAAVKELKKVCLESEGLESSVQELERLKEEHQRLREEFDAEKSGNVEKLEQLKEMESNIIGAVKAIEKLRSEIATARSRA

SEQ ID NO: 40004 - protein, 227 aa, Zea mays subsp. mays
MSSRERLGSSKHYSRGMSTSGSSSSRHHETISSASDHRVSHSDVLENKIAARAAEIDRLSSDNRKLAASYVALKEDLSLADREVQGLRAHIVKTETDGEIQIRGALEKIAKLEGIVNNRDNIRRELQSAHIEAHTLAREREELAAQVKAAVKELKKVCLESEGLESSVQELERLKEEHQRLREEFDAEKSGNVEKLEQLKEMESNIIGAVKAIEKLRSEIATARSRA

SEQ ID NO: 40005 - protein, 211 aa, Zea mays subsp. mays
MSTSGSSSSRHHETISSASDHRVSHSDVLENKIAARAAEIDRLSSDNRKLAASYVALKEDLSLADREVQGLRAHIVKTETDGEIQIRGALEKIAKLEGIVNNRDNIRRELQSAHIEAHTLAREREELAAQVKAAVKELKKVCLESEGLESSVQELERLKEEHQRLREEFDAEKSGNVEKLEQLKEMESNIIGAVKAIEKLRSEIATARSRA

SEQ ID NO: 40006 - DNA, 965 bp, Zea mays subsp. mays
atctcaaactaaattatcaattttctcagaatcctctcatgtctcgtctcttcatctctcatatctggtcatctgcaatcttcttttctatgggataaacagaagatgaagaacatcaggagacggagagaagagagaagaggcgaagtcggagctctgtagtgatggagatagcggctatgactgtgatgggaacttaaattgatgtatcagcatgaaagcggtcttttcgattttagacggactgaaagctctccgttgctgcttgtaattgacaaaagagatgacccggtacggttaccccattgcttaatcagtggacatatcaggcaatggtgcacgaactcataggacttgaggataataaagttgacgtgagagccattcgaagtctttcaaaagatcagcaagttgaggtggttttatcatcagaacaagatgcattcttcaaatctaacatgtatgaaaattttggggatatcggaatgaacatcagcaggtggccaagagtaacaaaaatatccagacagtagaggacatggccagatttgttgacagctaccctgagcacaaaaaaatgcaaggcaacgtgtcaaagcatgtaaccctggttactgaaatgagcaagctagttgaagcaaggaaactgatgctggtttcacaaacagagcaggacttggcttgcaatggtggctcgtggaattaaggtctgtatctgagattatacctctcgaggaacttcgtatatctcccaatatatgtcatgttgctgacttgttgaaaaaaaaaattcaggggttgagaatgtatacactcaactgcagctaggggtttttttagattttgtttttaaacctggtttgtatgtaaactggtttagtttgtaaaccgaaattttttgtaatctggtttaatttataaaccgattgtgaaccaaaattttaatataaaccaaaatcatttat

SEQ ID NO: 40007 - protein, 66 aa, Zea mays subsp. mays; identical to SEQ ID NO: 31311

SEQ ID NO: 40008 - protein, 55 aa, Zea mays subsp. mays; identical to SEQ ID NO: 31312

SEQ ID NO: 40009 - protein, 48 aa, Zea mays subsp. mays; identical to SEQ ID NO: 31313

SEQ ID NO: 40010 - DNA, 836 bp, Zea mays subsp. mays
atttcaaagcgaaagtaaaagggaaaacgtaaagagcagaggagggcgcccttcttcttcttcttcttcttcgtgaagaagctgccgattttagaaaaaaggaaacgactttatttgaacccaaagaagaggtgttagcgttaaagtctcgagcttgcagatctattggagctcataggtcaatcaatgggagcagtggctgcgtggcttgctacagagaacgcagcagagcaactgagactttgaaggaccctcctccatcttttatagctcaaaataaaccaaacgtctctgaggatttttggtcaacaagcacggttgatatggacaacatcaccttcccttctcaggggagcatctcatcatccaaccagacttttgattctcactctgctgctaggaacttaaatgctcctcctgagtttgtaaaccaaggtcttcttctttggaatcagacgagggagcgttgggtggggaaggaaagagccagtaacccaccggaacgcaagcaaggagccaagataaattggaacgcagcatcgtatgataacttgctggggagcaacaagttatttccccaacccattcctctcaatgagatggtggattttctagtggaggtttgggaacaagatggtctatatgactaatgaacaaagacttgaaagacacacacacacacactagtccgattattttgtattggtttggtttatgatctcccttgttgtaccattttcacttggaattgttggagaaaaccgggaatgttcatcagtaaatgagaaattttcttgttgtaccatctttcagtgtaatgatatgtggatttgacc

SEQ ID NO: 40011 - protein, 108 aa, Zea mays subsp. mays
MDNITFPSQGSISSSNQTFDSHSAARNLNAPPEFVNQGLLLWNQTRERWVGKERASNPPERKQGAKINWNAASYDNLLGSNKLFPQPIPLNEMVDFLVEVWEQDGLYD

SEQ ID NO: 40012 - DNA, 530 bp, Zea mays subsp. mays
atccaaagtccaaaacatttaaagaaaccttggactccccagccagaagaagaaccaacatggcacccacaatctataatttttcgtattctaaaaggttttcagagtcattcaattcttcaacatcaaaaaaggagtcatccagttcgaacatccttgctttccactccatagctcaatggaatgctcattataaagccaccaaagaaactaacaagctgatggtacttgatttcacagccacatggtgtggaccttgcaaactcatggaccctgttatcctagagtttgctggaaattacacagatgttgagttcatcaagattgatgtggaggagttaacggaagtgtctcaagcactccaggtccaccaattgccaacattcgtactcgttcagaaaggcaaagttgctgatagagtggtgggggtgaagaaggaggagctgaaaaggtcgattgagaagcacataaaataaataaatatgattatgcactgtaataaaatcaaaatgctcaacaaccaattcaag

SEQ ID NO: 40013 - protein, 157 aa, Zea mays subsp. mays
PKSKTFKETLDSPARRRTNMAPTIYNFSYSKRFSESFNSSTSKKESSSSNILAFHSIAQWNAHYKATKETNKLMVLDFTATWCGPCKLMDPVILEFAGNYTDVEFIKIDVEELTEVSQALQVHQLPTFVLVQKGKVADRVVGVKKEELKRSIEKHIK

SEQ ID NO: 40014 - protein, 138 aa, Zea mays subsp. mays
MAPTIYNFSYSKRFSESFNSSTSKKESSSSNILAFHSIAQWNAHYKATKETNKLMVLDFTATWCGPCKLMDPVILEFAGNYTDVEFIKIDVEELTEVSQALQVHQLPTFVLVQKGKVADRVVGVKKEELKRSIEKHIK

SEQ ID NO: 40015 - protein, 84 aa, Zea mays subsp. mays
MVLDFTATWCGPCKLMDPVILEFAGNYTDVEFIKIDVEELTEVSQALQVHQLPTFVLVQKGKVADRVVGVKKEELKRSIEKHIK

SEQ ID NO: 40016 - DNA, 883 bp, Zea mays subsp. mays
aacctaaattaagggatttgttctaacaaatctctctagaatccaaaagtaagaatcccgtctctctctcatcttcttctcgggaagatcagaaaacagctttttgtgaaattccatccccaagctttgaagatcgcaggaaaattctcgttttgatctgaccgtttctggtgaagaagacaggattctaaaagacaacaacaatgagctctgagcaaaacaacagcacaagcttcccaccaacagagccaaagctctgcgacaacgggtgcggattcttcgggtcaccctccaacatgaacctctgttccaaatgttaccgaagcctacgtgccgaggaagatcaaaccgcagttgcaaaagctgcggtggagaaatcacttaagcttccatcttgcaatctcatcaccgcaccagagccaaaacagcctctggagaccaaaccagcctcgttggaaaccgttgtgattgctgggacgtcttctgttcctcctgtagctacgggacaggacgagggagagccttcgaaacccacacggccgaacaggtgtttcagctgtaacaagaaggttggagttatggggttcaagtgcaagtgcggtagcacgttttgcgggagccataggtacccggagaagcatgagtgtagcttcgatttcaaagaggttggacgcggtgcaatcgcaaaggcgaatcctgtggtcaaggcggataaagtccagaggatttgatttgatgtgatgtgatctgtctatctttcagtttattccgagaatgttgatgtgatgtggtcatgttccatgttgggtttctatgaatcaaaatgaaaattgctgctattggttttctcatgaatcctttttagtgctttttaagtctattg

SEQ ID NO: 40017 - protein, 175 aa, Zea mays subsp. mays
MSSEQNNSTSFPPTEPKLCDNGCGFFGSPSNMNLCSKCYRSLRAEEDQTAVAKAAVEKSLKLPSCNLITAPEPKQPLETKPASLETVVIAGTSSVPPVATGQDEGEPSKPTRPNRCFSCNKKVGVMGFKCKCGSTFCGSHRYPEKHECSFDFKEVGRGAIAKANPVVKADKVQRI

SEQ ID NO: 40018 - protein, 144 aa, Zea mays subsp. mays
MNLCSKCYRSLRAEEDQTAVAKAAVEKSLKLPSCNLITAPEPKQPLETKPASLETVVIAGTSSVPPVATGQDEGEPSKPTRPNRCFSCNKKVGVMGFKCKCGSTFCGSHRYPEKHECSFDFKEVGRGAIAKANPVVKADKVQRI

SEQ ID NO: 40019 - DNA, 968 bp, Zea mays subsp. mays
atcacctataatattttgagcattcagaaacacaccaagcgaagcacattagcaacaacctaacaacaatggctaccaagatattatccctccttgcgcttcttgcgctttttgcgagcgcaacaaatgcgttcattattccacaatgctcacttgctccaagttccattattacacagttcctcccaccagttacttcaatgggcttcgaacacccagctgtgcaagcctataggctacaacaagcaattgcggcgagcgtcttacaacaaccaatttcccagttgcaacaacaatccttggcacatctaacaatacaaaccatcgcaacgcaacagcaacaacaattcctaccagcactgagccacctagccatggtgaaccctgccgcctacttgcaacagcagttgcttgcatcaaacccacttgctctggcaaacgtagttgcaaaccagccacaacaacagctgcaacagtttctgccagcgctcagtcaactagccatggtgaaccctgtcgcctacctacaacagcaacaactgctttcatctagcccgctcgctgtggccaatgcacctacatacctgcaacaacaattgttgcaacagattgtaccagctctgactcagctagttgtggcaaaccctgctgcctacttgcaacagctgcttccattcaaccaactgactatgtcgaactctgctgcgtacctacaacagcgacaacagttacttaatccactagcagtggctaacccattggtcgctgccttcctacagcagtaacaattgctgccatacaaccagttctctttgataaaccctgtcttgtcgaggcagcaacccatcgttggaggtgccatcttttagattacatatgagatgtactcgataatggtgccctcattccggcatgtgtttcctagaaataatcaatatattgattgagatttatctcaatatatttct

SEQ ID NO: 40020 - protein, 238 aa, Zea mays subsp. mays
MATKILSLLALLALFASATNAFIIPQCSLAPSSIITQFLPPVTSMGFEHPAVQAYRLQQAIAASVLQQPISQLQQQSLAHLTIQTIATQQQQQFLPALSHLAMVNPAAYLQQQLLASNPLALANVVANQPQQQLQQFLPALSQLAMVNPVAYLQQQQLLSSSPLAVANAPTYLQQQLLQQIVPALTQLVVANPAAYLQQLLPFNQLTMSNSAAYLQQRQQLLNPLAVANPLVAAFLQQ

SEQ ID NO: 40021 - protein, 194 aa, Zea mays subsp. mays
MGFEHPAVQAYRLQQAIAASVLQQPISQLQQQSLAHLTIQTIATQQQQQFLPALSHLAMVNPAAYLQQQLLASNPLALANVVANQPQQQLQQFLPALSQLAMVNPVAYLQQQQLLSSSPLAVANAPTYLQQQLLQQIVPALTQLVVANPAAYLQQLLPFNQLTMSNSAAYLQQRQQLLNPLAVANPLVAAFLQQ

SEQ ID NO: 40022 - protein, 136 aa, Zea mays subsp. mays
MVNPAAYLQQQLLASNPLALANVVANQPQQQLQQFLPALSQLAMVNPVAYLQQQQLLSSSPLAVANAPTYLQQQLLQQIVPALTQLVVANPAAYLQQLLPFNQLTMSNSAAYLQQRQQLLNPLAVANPLVAAFLQQ

SEQ ID NO: 40023 - DNA, 1603 bp, Zea mays subsp. mays
ctcttgtttcgccgaaccccaaaccctagcttcgctcgttgcggcggcgagccggcgatggcgaagtctctgcgatccaaacgcgagaagcggcttcggacgttgcgccgggagatagcggagccgttctacgacaagaaggaggccgccaagctcgccgcgcaggccgccgccctagctgctgccccgctcccggtccgcgggcccccgccatcccaggatcccggcagctcccgcgcagctagctcggcctcggctatgggtaagccctctaaaactttcctgattcaccagccgtggactgcctcctgttatttcaggagggaatcgtaattcctctacgctttgtgtgctagttgttcattcacagctcactttgttatctgttaaaacactatggttaattggttatactagtaaggagaagcagatgcctactgggtatttgcagaaattatcaacaaggtgtggtggctcagcaggttttgtataccaagctgcattactggttttgtatatctgaactgagggtgggaactgtggttttgatcccgatgtgacaatgatttatgcttcttgatcaaagcatgcagtaacaaccagaacgctcactcttttttaaaaaagggaacacattagctccgaaacgagtgtgttgttagcttaatcctggaacaagaacttaagatacctctgcgaattgcatgccctcaagcctaggtctttgttgattggagaggctttggaattctgctaccagttgccaccttattgacctgattgtagagatctatggataaggtggcatgtatgaatttgcatttaagccctgattgtacctatttgaaaaaaaatggctactaccaaattgatatttgtttcagtctcgtttagaaatttggtgaccttagcacatgtgcgaaaggaactaatcagttctatggtatttcgcatgaacagtgacagttaccataatcagcactttttcacttgggtatgccattcaatttaaaaacacgcaaactgttatttgactttggctcccaattatgaatgcctgtcaatgtatcctgaggcacctaatcgaggaaacttgtagtacatctaccagttgtggatcctgttttctcttcctgcaacctcagttgcgccttattttgttatccctcaactgatgtgttctgtgttcacatgaatgcagatgtggagatgtctgatgcagggaacaacaggtctaagaccttcttgaggccacttggcagcattagcaagaagaaggtgcagcttcatttgaagatcaagaaagacaagagaaaagctaggaagaagggaaagttttcttttaagaagtagaggagtgtatgataaatcatgcagttttgttcccagtttgtaaaacaaacgcactgcagtcatgtcatgtggtgcacctacctaagtccattcgtgggtgacctactattaaatatgttgaaatgggtacgaaaaaaggatagtgctgacctatcagctgtttctgttctgcgggtataaatgtcaagtactcaaattgctgagatttggtttcattttcacattgtatcgtggtgaaccatgtttggac

SEQ ID NO: 40024 - protein, 110 aa, Zea mays subsp. mays
LLFRRTPNPSFARCGGEPAMAKSLRSKREKRLRTLRREIAEPFYDKKEAAKLAAQAAALAAAPLPVRGPPPSQDPGSSRAASSASAMGKPSKTFLIHQPWTASCYFRRES

SEQ ID NO: 40025 - protein, 91 aa, Zea mays subsp. mays
MAKSLRSKREKRLRTLRREIAEPFYDKKEAAKLAAQAAALAAAPLPVRGPPPSQDPGSSRAASSASAMGKPSKTFLIHQPWTASCYFRRES

SEQ ID NO: 40026 - DNA, 1587 bp, Zea mays subsp. mays
attaaatctttggctattaggacgcttctctcctcccaaaccccacatctcagcaagggccccgtcggctagcgccgcatccgcagaccgcagccgtcgacgcagaccctcttcggcagccgcttgcagcgcgtcccttccccgctcccggcgccatggactgcgcaaaggggagggcggtggcggacctctacgacgaggtgatggtggagatcctctcgcgcgtgcccgtcaaagacctccgccgttgcacgtgcgtgtgcaaatcttggcgcaacctcatcaccgaccccctcaaccgcaagaagctgccccagaccctggaaggcttcttccacggcgtcgtcggagggcctcacagctacggccaattcaccagcctgtcggggagcggagaacgcgtggctccggtcgacccttccttctccttcatcacggcaatgctgcctggcgtggagcgcatggtcctcttggattcttgcaacgggctcctgctcttcgggtgcacccgggaggacaagttcgggtacatcgtgacaaaccctgcgaccgaggaattgatgactgtgcccgccagctccggctcttgtccccttccacctccatttgaaagggacatggttggtggggaaagatatgcgcacacctttctgatgtttaaccctgctgtctcctcgcacttccacttggtccagatctgggagaataaggcggcgaaggaggtggaaacggtgcactcttactcgtctgaaaccaaggcatggagtgacaggtcaagcaagtgggggcgaggtgaagagggcggtgaatgggagctgtggggtgaatccgtgattggattcatgtgtggctggacattggtcgatggtctgctgcattttcttgccttcgatcttcagaaagaagagactgtgataattgcagtggatggggatggggaaactcgtaggatcatcggctggcatggtaaggatgtgagagcaattgtttttattggtgaatcccaagaccatctacactgcatcggtgtgaatgtgcaattagatcaaggctctgaagtgcgcttcacgcggatgtcgatctgggttcttgaggactatgatacacaagcatggatcttaaagcacaatgtgagctctttgcagttctttgaattactgagtcacccaatcaaagacttccatattgtggccattcatccatatcacaattcgttcatccttattcagcactggaaccagaaacttgtatcatataacatggatactcaggaactgcatggtctcggcactcttggaaagggctatgcggttattaccccttacataccctgtttcttggagtcatcggttcttgccaccaaacactgaggttgttgtttctcggggacttctctgcatgttcaacaagagcctgatcatccaagtgtggggcaaggtgatctagtatgatggtgctttaatgtccttttgtaatgctttgagaaagctgtttacagggcaacatggttagttccatgatatatcagtgagaaagctgtttacaggacagcatggttagttctatgatatatcaaattagatcacg

SEQ ID NO: 40027 - protein, 404 aa, Zea mays subsp. mays
MDCAKGRAVADLYDEVMVEILSRVPVKDLRRCTCVCKSWRNLITDPLNRKKLPQTLEGFFHGVVGGPHSYGQFTSLSGSGERVAPVDPSFSFITAMLPGVERMVLLDSCNGLLLFGCTREDKFGYIVTNPATEELMTVPASSGSCPLPPPFERDMVGGERYAHTFLMFNPAVSSHFHLVQIWENKAAKEVETVHSYSSETKAWSDRSSKWGRGEEGGEWELWGESVIGFMCGWTLVDGLLHFLAFDLQKEETVIIAVDGDGETRRIIGWHGKDVRAIVFIGESQDHLHCIGVNVQLDQGSEVRFTRMSIWVLEDYDTQAWILKHNVSSLQFFELLSHPIKDFHIVAIHPYHNSFILIQHWNQKLVSYNMDTQELHGLGTLGKGYAVITPYIPCFLESSVLATKH

SEQ ID NO: 40028 - protein, 388 aa, Zea mays subsp. mays
MVEILSRVPVKDLRRCTCVCKSWRNLITDPLNRKKLPQTLEGFFHGVVGGPHSYGQFTSLSGSGERVAPVDPSFSFITAMLPGVERMVLLDSCNGLLLFGCTREDKFGYIVTNPATEELMTVPASSGSCPLPPPFERDMVGGERYAHTFLMFNPAVSSHFHLVQIWENKAAKEVETVHSYSSETKAWSDRSSKWGRGEEGGEWELWGESVIGFMCGWTLVDGLLHFLAFDLQKEETVIIAVDGDGETRRIIGWHGKDVRAIVFIGESQDHLHCIGVNVQLDQGSEVRFTRMSIWVLEDYDTQAWILKHNVSSLQFFELLSHPIKDFHIVAIHPYHNSFILIQHWNQKLVSYNMDTQELHGLGTLGKGYAVITPYIPCFLESSVLATKH

SEQ ID NO: 40029 - protein, 309 aa, Zea mays subsp. mays
MLPGVERMVLLDSCNGLLLFGCTREDKFGYIVTNPATEELMTVPASSGSCPLPPPFERDMVGGERYAHTFLMFNPAVSSHFHLVQIWENKAAKEVETVHSYSSETKAWSDRSSKWGRGEEGGEWELWGESVIGFMCGWTLVDGLLHFLAFDLQKEETVIIAVDGDGETRRIIGWHGKDVRAIVFIGESQDHLHCIGVNVQLDQGSEVRFTRMSIWVLEDYDTQAWILKHNVSSLQFFELLSHPIKDFHIVAIHPYHNSFILIQHWNQKLVSYNMDTQELHGLGTLGKGYAVITPYIPCFLESSVLATKH

SEQ ID NO: 40030 - DNA, 990 bp, Zea mays subsp. mays
aacgcactctccactccttcgcggcgggggtttaggcgcacggcggcaggccaattaacgccgctgcggcgagcgccgggggggaaatgggcggcgacggcacgagggcgctggaccagacgccgacgtgggccgtggccgccgtctgcgctgtcatcgtcgcggcgtccatactcctcgagggcttcctccaccacctcggtcagttgctcaacaagaagcggaagaaggcgctgtttgacgctctggagaaggttaaatcggagctgatgactctggggttcatatcgcctctgctgaccgtgacgggaaggtacatcgcgcgcatctgcatcccggagggagccgcaaacaccatgctgccctgccgcctgtccggtcactcggtggcggaagagcccaagggccatggccgacggcacctatctgaagatccaaccaaccttttttcctgccgcaaaggcatggtgtcgcttgtttcagccgacggcatgcatcagctgcacattttcgtgttcttcttggccgtcttccatgttaccttcagtttcttcacaatgtccttgggtagagcaaagactcgtatatggaaggtgtgggaaaaggaaacttgctcccctcagtataattatttaaatgacccctcaaagttcaggcttacgcaccaaacatcttttgtgaggcaacatgcaagttgttggagcaaaagcacaatcacgctctattttgtgagcttctttaggcagttcttcagatccgtccgtaagacagaactttgaggggtctgtggcgtgttttgctctggtgcggcatgcctgtgtatcccattgagattctgtacaattgcaaacagagagcggtacctttttagttaattatcagagatgactgtagaaagaaactgattgtggtgaggttgagtggacgaataaatggcgagtctgcctcattggatgcatcatgaaacgggcacttttgaggagggatggt

SEQ ID NO: 40031 - protein, 230 aa, Zea mays subsp. mays
MGGDGTRALDQTPTWAVAAVCAVIVAASILLEGFLHHLGQLLNKKRKKALFDALEKVKSELMTLGFISPLLTVTGRYIARICIPEGAANTMLPCRLSGHSVAEEPKGHGRRHLSEDPTNLFSCRKGMVSLVSADGMHQLHIFVFFLAVFHVTFSFFTMSLGRAKTRIWKVWEKETCSPQYNYLNDPSKFRLTHQTSFVRQHASCWSKSTITLYFVSFFRQFFRSVRKTEL

SEQ ID NO: 40032 - protein, 169 aa, Zea mays subsp. mays
MTLGFISPLLTVTGRYIARICIPEGAANTMLPCRLSGHSVAEEPKGHGRRHLSEDPTNLFSCRKGMVSLVSADGMHQLHIFVFFLAVFHVTFSFFTMSLGRAKTRIWKVWEKETCSPQYNYLNDPSKFRLTHQTSFVRQHASCWSKSTITLYFVSFFRQFFRSVRKTEL

SEQ ID NO: 40033 - protein, 140 aa, Zea mays subsp. mays
MLPCRLSGHSVAEEPKGHGRRHLSEDPTNLFSCRKGMVSLVSADGMHQLHIFVFFLAVFHVTFSFFTMSLGRAKTRIWKVWEKETCSPQYNYLNDPSKFRLTHQTSFVRQHASCWSKSTITLYFVSFFRQFFRSVRKTEL

SEQ ID NO: 40034 - DNA, 1240 bp, Zea mays subsp. mays
gcagcacacaacctaccacactcgcattgcattgcattgcattccttcagttcagtagtgtgctctgacagtgagatggcgagcgtgaaggttttcgggtcacccacctcggcggaggtcgcccgcgtgctcatgtgcctcttcgagaaggaggtggagttccagctgatccgcgtcgacgcctaccgcggcaccaagcgcatgccccagtacctcaagctgcagccgcaaggcgaggcgctcaccttcgaggacgagagcctcaccctctccgactccagggggatcctccgccacatctcccacaagtacgcgaagcagggcaacccgtacctgattggcacgggcgcgctggagcgggcgtccatcgagcagtggctgcagacggaggcgcagagcttcgacgcgcccagcgccgagatggtctacagcctcgccttcctgccgcccaccctgcccaggcagaacgacaacggcaacggcggcgcgttcaacgccagggaagccaccgtgggcagtaacgccgacgcgtccagcagcaagcgcggtgtggccgggtcacagccggcggcaagccagaccaaggtgagcgcgcagaaggaggaggagatgctgaagctgttcgagcagaggaagaaggacctggagaagctgctggacatctacgagcagcgcctggaggaggccacgttcctggccggcgacaacttcaccatcgccgacctgtcgcacctgccctacgcggaccacctcgtctccgacccgcgctcccgccgcatgttcgagtcccgcaagaacgtcagcaggtggtggcacgacgtctccggccgcgacacctggaagtacgtcaagaccctgcagcgcccgccgtccacgtccaccgacgccagcgccaagaacggccagctgggccagcagcagcacctgccgtcgtccaccgacggccacggcgtgaagagccaacggctggtccagaacgagcggcacttctagccgttgccgtcccttcccgccgacgaataaactacctgcgccgccgccaccgccgccgtccatcaacatggttcctgctgctgttcgtgtcgttttcatacgtcatacgtgtcttgctgcttttgaagctccgttcccgggtgcagggacctacgagtccattccgccgtttgctcattctgttcgtcgtgtaataaaatgaaaaccccaccccgttttgaatgaaattcaattctcagtgttgtgc

SEQ ID NO: 40035 - protein, 330 aa, Zea mays subsp. mays
AAHNLPHSHCIALHSFSSVVCSDSEMASVKVFGSPTSAEVARVLMCLFEKEVEFQLIRVDAYRGTKRMPQYLKLQPQGEALTFEDESLTLSDSRGILRHISHKYAKQGNPYLIGTGALERASIEQWLQTEAQSFDAPSAEMVYSLAFLPPTLPRQNDNGNGGAFNAREATVGSNADASSSKRGVAGSQPAASQTKVSAQKEEEMLKLFEQRKKDLEKLLDIYEQRLEEATFLAGDNFTIADLSHLPYADHLVSDPRSRRMFESRKNVSRWWHDVSGRDTWKYVKTLQRPPSTSTDASAKNGQLGQQQHLPSSTDGHGVKSQRLVQNERHF

SEQ ID NO: 40036 - protein, 305 aa, Zea mays subsp. mays
MASVKVFGSPTSAEVARVLMCLFEKEVEFQLIRVDAYRGTKRMPQYLKLQPQGEALTFEDESLTLSDSRGILRHISHKYAKQGNPYLIGTGALERASIEQWLQTEAQSFDAPSAEMVYSLAFLPPTLPRQNDNGNGGAFNAREATVGSNADASSSKRGVAGSQPAASQTKVSAQKEEEMLKLFEQRKKDLEKLLDIYEQRLEEATFLAGDNFTIADLSHLPYADHLVSDPRSRRMFESRKNVSRWWHDVSGRDTWKYVKTLQRPPSTSTDASAKNGQLGQQQHLPSSTDGHGVKSQRLVQNERHF

SEQ ID NO: 40037 - protein, 286 aa, Zea mays subsp. mays
MCLFEKEVEFQLIRVDAYRGTKRMPQYLKLQPQGEALTFEDESLTLSDSRGILRHISHKYAKQGNPYLIGTGALERASIEQWLQTEAQSFDAPSAEMVYSLAFLPPTLPRQNDNGNGGAFNAREATVGSNADASSSKRGVAGSQPAASQTKVSAQKEEEMLKLFEQRKKDLEKLLDIYEQRLEEATFLAGDNFTIADLSHLPYADHLVSDPRSRRMFESRKNVSRWWHDVSGRDTWKYVKTLQRPPSTSTDASAKNGQLGQQQHLPSSTDGHGVKSQRLVQNERHF

SEQ ID NO: 40038 - DNA, 1490 bp, Zea mays subsp. mays
actccccgcgccacgcgcctgactgggtgcactgcactggtggtgtgcacgcccctcgtcagtcgtcactcactcgctaccccatatcccattccccccgacggcgcctctggcagcaaggaacaatatgtccaatagggccacccattggtgttatgcctgtcagcgcccaattcgtcttcgcgggcaggatatcatatgtcccaactgcagtgatggttttatccaagaaatcagtgagatgggtggcgtactgaacacttatgggctaactgaaccggactttgaagagcgccaggccagaagatttggaatgatggatgccatatcttccctcatgcggcaacggctgtcagaaataggaagggatagtttgtttgatattcacggtagacaagggacaggtactgaatatggaaggaggtcaactgctattcctacgctggtatttggtggcatcccttctcctgcagttggtagcagtgatgtcaatgttgtcatcagggaaggccgcagagctggcgctgcccgtccgaatttcagtagcttagttgttggtcccagtctggaagctctatttgagcagctactactccagaacaaccgtcaaggcccaccacctgctccacagtcagctattgactccatgcctgtggtaaagataaatcgcaggcatcttgacgaagatccacagtgtgcagtttgcaaagacaaattcgaggttggagcagaggcgcgggagatgccgtgcaagcacttgtaccatactgactgcatcatcccctggctggttcagcacaactcctgccctgtttgccgtcatccgctgccatcacagcgatcaggcagtagtaccagcagcgcccgtgtgccttcagcatactacaacgaaacagctgatcctcctgcggtcgccagggcagatttggatcctgtgccttcagcatactacaacgaaacagcggatcctcctgcggtcaccagagcatatttcgatcctgctccaggaaactacggcagcgaaagccaggaaagtcacgaccccttctcctttctctggccatttggcccgtcgagttcttaccaatatgaagaaaatgttgatgaacctgcagtatacgatccaaaccatatagcatattctgcatggcactatgaccactgactgaaaccctgagttaaagtcaagatatctgcaattcgtgccttgagctctcagctttggtgaggcaaagggctgcttgccgtataaaaaatggatggttattgtgttcagtgcatacccttgctacgcatgtccgttgtggagatatcagctgtgtatagaactgggcgcaacaaactctgctgtaatgcccgtatatattccttttcggtatatcaagtctaaagctatagtgcataagtgctgtaatcggtgaactgagtgcatccagaatatcatgtcatggtaaacataattataattacatggttgtctttttagactg

SEQ ID NO: 40039 - protein, 345 aa, Zea mays subsp. mays
MSNRATHWCYACQRPIRLRGQDIICPNCSDGFIQEISEMGGVLNTYGLTEPDFEERQARRFGMMDAISSLMRQRLSEIGRDSLFDIHGRQGTGTEYGRRSTAIPTLVFGGIPSPAVGSSDVNVVIREGRRAGAARPNFSSLVVGPSLEALFEQLLLQNNRQGPPPAPQSAIDSMPVVKINRRHLDEDPQCAVCKDKFEVGAEAREMPCKHLYHTDCIIPWLVQHNSCPVCRHPLPSQRSGSSTSSARVPSAYYNETADPPAVARADLDPVPSAYYNETADPPAVTRAYFDPAPGNYGSESQESHDPFSFLWPFGPSSSYQYEENVDEPAVYDPNHIAYSAWHYDH

SEQ ID NO: 40040 - protein, 307 aa, Zea mays subsp. mays
MGGVLNTYGLTEPDFEERQARRFGMMDAISSLMRQRLSEIGRDSLFDIHGRQGTGTEYGRRSTAIPTLVFGGIPSPAVGSSDVNVVIREGRRAGAARPNFSSLVVGPSLEALFEQLLLQNNRQGPPPAPQSAIDSMPVVKINRRHLDEDPQCAVCKDKFEVGAEAREMPCKHLYHTDCIIPWLVQHNSCPVCRHPLPSQRSGSSTSSARVPSAYYNETADPPAVARADLDPVPSAYYNETADPPAVTRAYFDPAPGNYGSESQESHDPFSFLWPFGPSSSYQYEENVDEPAVYDPNHIAYSAWHYDH

SEQ ID NO: 40041 - protein, 283 aa, Zea mays subsp. mays
MMDAISSLMRQRLSEIGRDSLFDIHGRQGTGTEYGRRSTAIPTLVFGGIPSPAVGSSDVNVVIREGRRAGAARPNFSSLVVGPSLEALFEQLLLQNNRQGPPPAPQSAIDSMPVVKINRRHLDEDPQCAVCKDKFEVGAEAREMPCKHLYHTDCIIPWLVQHNSCPVCRHPLPSQRSGSSTSSARVPSAYYNETADPPAVARADLDPVPSAYYNETADPPAVTRAYFDPAPGNYGSESQESHDPFSFLWPFGPSSSYQYEENVDEPAVYDPNHIAYSAWHYDH

SEQ ID NO: 40042 - DNA, 1610 bp, Zea mays subsp. mays
gtgcgctgcggccgggtcggatctgagacgagacgagtcccctccccccacctcgcctcacccaaccggaacgaacaagttaccatctcatcccaaccccgcctcgaccggatctcgtcggactcggatccgcccgaccaccccgcgccgccgcagatcaaagaagatggcagctctcgacaccttcctcttcacctcggagtctgtgaacgagggacaccctgacaagctctgcgaccaggtctcagatgccgttcttgacgcttgccttgctgaggaccctgacagcaaggttgcttgtgagacctgcaccaagaccaacatggtcatggtctttggtgagatcaccaccaaggccaatgtcgactacgagaagattgtcagggagacctgccgcaacattggttttgtgtcaaacgatgtcgggcttgacgctgaccactgcaaggtgctcgtgaacattgagcagcagtcccctgatattgctcagggtgtgcatggccacttcaccaagcgccccgaggagattggagctggtgaccagggacacatgttcgggtatgcgaccgatgagacccctgagttgatgcccctcagccatgtccttgccaccaagctaggtgctcgtctcaccgaggtccgcaagaacggaacctgcccctggctcaggcctgatgggaagacccaggtgacagtcgagtaccgcaatgagggtggtgccatggtccccatccgtgtccacaccgtcctcatctccacccagcacgacgagacagtgaccaatgatgagatcgctgctgacctgaaggagcatgtcatcaagcctatcatccctgagcagtaccttgacgagaagaccatcttccaccttaacccatccggccgctttgtcattggtggacctcacggcgatgctggcctcactggccgcaagatcatcattgacacctacggtggctggggagcccatggcggtggcgctttctccggcaaggacccaaccaaggttgaccgcagcggagcctatgtcgcgaggcaggctgccaagagcatcgtcgccagcggccttgctcgccgcgccatcgtccaggtgtcctacgccatcggcgtgcccgagcctctctccgtgtttgtcgacacgtacggcaccggcgcgatccccgacaaggagatcctcaagattgtcaaggagaacttcgatttcaggcctggcatgatcatcatcaaccttgacctcaagaaaggcggcaacgggcgctacctcaagacggcagcctacggccacttcggaagggacgaccctgacttcacctgggaggtggtgaagccactcaagtcggagaaaccttctgcctaaggcggccttttttttcagtaagaagcttttggtggtctgctgtgcttaatcatgcttttatatggcttctacatgttgtggttctttcttgatctgcaccgcgcttatcgtttgtgttgtactgccctaataagtggtgcttatgaggactgtttctggttttgctgcttatgttgtaatgctttgaaacaatgaaagaagctacaggccacagctattttgagaagtaatggaacctcgtgccgttttgatt

SEQ ID NO: 40043 - protein, 451 aa, Zea mays subsp. mays
CAAAGSDLRRDESPPPTSPHPTGTNKLPSHPNPASTGSRRTRIRPTTPRRRRSKKMAALDTFLFTSESVNEGHPDKLCDQVSDAVLDACLAEDPDSKVACETCTKTNMVMVFGEITTKANVDYEKIVRETCRNIGFVSNDVGLDADHCKVLVNIEQQSPDIAQGVHGHFTKRPEEIGAGDQGHMFGYATDETPELMPLSHVLATKLGARLTEVRKNGTCPWLRPDGKTQVTVEYRNEGGAMVPIRVHTVLISTQHDETVTNDEIAADLKEHVIKPIIPEQYLDEKTIFHLNPSGRFVIGGPHGDAGLTGRKIIIDTYGGWGAHGGGAFSGKDPTKVDRSGAYVARQAAKSIVASGLARRAIVQVSYAIGVPEPLSVFVDTYGTGAIPDKEILKIVKENFDFRPGMIIINLDLKKGGNGRYLKTAAYGHFGRDDPDFTWEVVKPLKSEKPSA

SEQ ID NO: 40044 - protein, 396 aa, Zea mays subsp. mays
MAALDTFLFTSESVNEGHPDKLCDQVSDAVLDACLAEDPDSKVACETCTKTNMVMVFGEITTKANVDYEKIVRETCRNIGFVSNDVGLDADHCKVLVNIEQQSPDIAQGVHGHFTKRPEEIGAGDQGHMFGYATDETPELMPLSHVLATKLGARLTEVRKNGTCPWLRPDGKTQVTVEYRNEGGAMVPIRVHTVLISTQHDETVTNDEIAADLKEHVIKPIIPEQYLDEKTIFHLNPSGRFVIGGPHGDAGLTGRKIIIDTYGGWGAHGGGAFSGKDPTKVDRSGAYVARQAAKSIVASGLARRAIVQVSYAIGVPEPLSVFVDTYGTGAIPDKEILKIVKENFDFRPGMIIINLDLKKGGNGRYLKTAAYGHFGRDDPDFTWEVVKPLKSEKPSA

SEQ ID NO: 40045 - protein, 344 aa, Zea mays subsp. mays
MVMVFGEITTKANVDYEKIVRETCRNIGFVSNDVGLDADHCKVLVNIEQQSPDIAQGVHGHFTKRPEEIGAGDQGHMFGYATDETPELMPLSHVLATKLGARLTEVRKNGTCPWLRPDGKTQVTVEYRNEGGAMVPIRVHTVLISTQHDETVTNDEIAADLKEHVIKPIIPEQYLDEKTIFHLNPSGRFVIGGPHGDAGLTGRKIIIDTYGGWGAHGGGAFSGKDPTKVDRSGAYVARQAAKSIVASGLARRAIVQVSYAIGVPEPLSVFVDTYGTGAIPDKEILKIVKENFDFRPGMIIINLDLKKGGNGRYLKTAAYGHFGRDDPDFTWEVVKPLKSEKPSA

SEQ ID NO: 40046 - DNA, 2201 bp, Zea mays subsp. mays
aaattagtttatggtcgaaagcactttgctgttgaaaaagagaagccaagccagcttttcggaacatatgatttcgatagctcaccttttgactggggtgacaattataagcttcctaatttgcctgagacagatcttgttatatatgaaatgaatgtccgtgccttcactgccgacgagtcaagcaggcttgctccagctattcgtggaagttaccttggtgtcattgataaaattcctcatttgctggaacttggcgttaatgcagtggaactacttcctgtttttgagttcgatgagctggagttgaagaggttccctaacccaagggaccacatggtaaatacatggggatattctacaatcaacctttttgcgcccatgagtcgttatgctagtgctggtggtggacctgtggctgcttccaaagagctcaaacagatggtcaaggcatttcataattctggaattgaggttattttggatgtagtttacaaccatacaaatgaagctgatgatgttaacccttacatgacttcctttcgtggtattgataacaaggtctattacatgttagatctcaacaacagtgcacagctgctgaacttctcgggttgcgggaatacactaaactgcaaccatcctgttgtcaaggagcttgtacttgacagtttaagacattgggttaaggagtatcacatagatggatttcggtttgaccttgcgagtgttctttgtcgtggaccagatggcagtcctcttgatgcacctccacttattaaggaaattgccaaaggctctgtattgtctagatgtaagatcattgctgaaccttgggactgtggtggcctttatctagtagggaggttccctaattgggacaggtgggctgaatggaacgggaagtacagagatgatattcgaagatttattaagggagatcctggtatgaagggggtgtttgcaactcgcgtttctggttctgcagatctctaccaggtgaacaatcggaagccttaccatagtgtgaactttgtaattgctcatgatggatttactttatgtgaccttgtttcatataactccaagcacaatgatgcaaatggagaaggtggtcgtgatgggtgcaatgacaactacagctggaactgtggcattgaaggagaaacaaatgatttgaatgtgctaagtcttcgttcaaggcaaatgaagaacttccatgtggcattaatgatttcccagggtactccaatgatgctgatgggagatgaatatggtcacacacgttatggaaacaacaatagctatggacatgatactcacataaataattttcagtggggccagttggaagaaaggaaggatggccatttcaggtttttctcagagatgatcaagtttcggcataaccatcctatattgagacgagacaggtttctcaacaaaaatgatgtcacttggcatgaaaatcgttgggagaaccaggacagcaaatttttggcatttacgatacatgatcacagttctggtggagacatctatttggcattcaatgctcatgagtattttgtggatgctgtaattcccccaccaccacaccataaatcttggagtcgtgtggtggataccaacctggaatcaccaaaggatattgtcccagaaggggtgccattcacaggttcagggtacaggattgctccctactcttccatcttgcttaaggcaaagccttagaatggcggaggcaagtcattctcaagtaagcacgaataaaggtgttgtgatccctaactttccaagctcttagccaactgtactgcaagtatagcaaactttggtatgtgaagtcggaccaacccttgcggaaatcaacggaagccatggtttgctaaaggtattactcatggagaattggagatatggcaaacacatacgcaagtaacctccacacatctaagcaagaagagcctttcattaggggatgcatggctcgaggaaactatatttgcatttggttgattcatttttatttgttgcacatgtcagtatgtcacctgtgtgtgtcaagctcttatttgcttaaaaattggacattcctttgttacatatttgtgttgtactgtgttggagctagcgttcctggtatattccccgggggtgggaggacgggggaccttttttccccgtgtttttgggctccc

SEQ ID NO: 40047 - protein, 577 aa, Zea mays subsp. mays
KLVYGRKHFAVEKEKPSQLFGTYDFDSSPFDWGDNYKLPNLPETDLVIYEMNVRAFTADESSRLAPAIRGSYLGVIDKIPHLLELGVNAVELLPVFEFDELELKRFPNPRDHMVNTWGYSTINLFAPMSRYASAGGGPVAASKELKQMVKAFHNSGIEVILDVVYNHTNEADDVNPYMTSFRGIDNKVYYMLDLNNSAQLLNFSGCGNTLNCNHPVVKELVLDSLRHWVKEYHIDGFRFDLASVLCRGPDGSPLDAPPLIKEIAKGSVLSRCKIIAEPWDCGGLYLVGRFPNWDRWAEWNGKYRDDIRRFIKGDPGMKGVFATRVSGSADLYQVNNRKPYHSVNFVIAHDGFTLCDLVSYNSKHNDANGEGGRDGCNDNYSWNCGIEGETNDLNVLSLRSRQMKNFHVALMISQGTPMMLMGDEYGHTRYGNNNSYGHDTHINNFQWGQLEERKDGHFRFFSEMIKFRHNHPILRRDRFLNKNDVTWHENRWENQDSKFLAFTIHDHSSGGDIYLAFNAHEYFVDAVIPPPPHHKSWSRVVDTNLESPKDIVPEGVPFTGSGYRIAPYSSILLKAKP

SEQ ID NO: 40048 - protein, 527 aa, Zea mays subsp. mays
MNVRAFTADESSRLAPAIRGSYLGVIDKIPHLLELGVNAVELLPVFEFDELELKRFPNPRDHMVNTWGYSTINLFAPMSRYASAGGGPVAASKELKQMVKAFHNSGIEVILDVVYNHTNEADDVNPYMTSFRGIDNKVYYMLDLNNSAQLLNFSGCGNTLNCNHPVVKELVLDSLRHWVKEYHIDGFRFDLASVLCRGPDGSPLDAPPLIKEIAKGSVLSRCKIIAEPWDCGGLYLVGRFPNWDRWAEWNGKYRDDIRRFIKGDPGMKGVFATRVSGSADLYQVNNRKPYHSVNFVIAHDGFTLCDLVSYNSKHNDANGEGGRDGCNDNYSWNCGIEGETNDLNVLSLRSRQMKNFHVALMISQGTPMMLMGDEYGHTRYGNNNSYGHDTHINNFQWGQLEERKDGHFRFFSEMIKFRHNHPILRRDRFLNKNDVTWHENRWENQDSKFLAFTIHDHSSGGDIYLAFNAHEYFVDAVIPPPPHHKSWSRVVDTNLESPKDIVPEGVPFTGSGYRIAPYSSILLKAKP

SEQ ID NO: 40049 - protein, 465 aa, Zea mays subsp. mays
MVNTWGYSTINLFAPMSRYASAGGGPVAASKELKQMVKAFHNSGIEVILDVVYNHTNEADDVNPYMTSFRGIDNKVYYMLDLNNSAQLLNFSGCGNTLNCNHPVVKELVLDSLRHWVKEYHIDGFRFDLASVLCRGPDGSPLDAPPLIKEIAKGSVLSRCKIIAEPWDCGGLYLVGRFPNWDRWAEWNGKYRDDIRRFIKGDPGMKGVFATRVSGSADLYQVNNRKPYHSVNFVIAHDGFTLCDLVSYNSKHNDANGEGGRDGCNDNYSWNCGIEGETNDLNVLSLRSRQMKNFHVALMISQGTPMMLMGDEYGHTRYGNNNSYGHDTHINNFQWGQLEERKDGHFRFFSEMIKFRHNHPILRRDRFLNKNDVTWHENRWENQDSKFLAFTIHDHSSGGDIYLAFNAHEYFVDAVIPPPPHHKSWSRVVDTNLESPKDIVPEGVPFTGSGYRIAPYSSILLKAKP

SEQ ID NO: 40050 - DNA, 1172 bp, Zea mays subsp. mays
actgccaaatcccccagaaaatcaactcctccccaattccacgctgccaccaactcgccgtcctccgcgccaagcaccaaagctccgatggcccgcacgaagcagacggcgcgcaagtcgacgggctgagccaggaggagatcgaccgcatggtgcgggaggcggaggagttcgcggaggaggacaagaaggtgaaggagcggatcgacgcccgcaaccagctggagacgtacgtgtacaacatgaagaatacggtgggcgacaaggacaagctcgcggacaagctggaggcggaggagaaggagaaggtggaggaggccctcaaggaggcgctggagtggctggacgacaaccagtcggccgagaaggaggactacgaggagaagctcaaggaggtggaggccgtgtgcaaccccatcgtgtcggccgtgtaccagcggtcgggcggcgcccctggcgctagccctcactcaaccagacaaccagtacaccaccgccaccaagcccgggccgaataactctgccgggcaaccgccgcccttcgccggcaaagaacgcccaccagatccaccccggcctgctatggagtccgcggtgaacccgaaggcgtacccgctggctgatgcgcagctgacgatgggtatcctcgatatcatccagcaggccgccaactacaagcagctcaagaagggagcgaacgaagcgacgaaaaccctgaatagggggatatcggagttcgttgtgatggcggcggacacggagcctctcgagatcctgctccacctccccttgttagccgaggataagaacgtcccatatgtatttgttccatcgaaacaagctcttggccgtgcttgtggtgtgacaagacccgtcattgcttgctcagtgaccagcaatgagggtagccagctgaaacaacagatacagggtctcaaggactcgattgagaagcttctcatctgatttacctaagatctttcagtgtgatgggcctcggcgacacatttttcagaggcttggactggtgatggtgtcttgtttacattacgctttccaaactatatttgaacactgctaagtcaatcatatttgaattgtgcttcactttatatttgtgattgtcatgtatcctcaagatgcctctgtatcgtggtggctggtttctgtcc

SEQ ID NO: 40051 - protein, 171 aa, Zea mays subsp. mays
CQIPQKINSSPIPRCHQLAVLRAKHQSSDGPHEADGAQVDGLSQEEIDRMVREAEEFAEEDKKVKERIDARNQLETYVYNMKNTVGDKDKLADKLEAEEKEKVEEALKEALEWLDDNQSAEKEDYEEKLKEVEAVCNPIVSAVYQRSGGAPGASPHSTRQPVHHRHQARAE

SEQ ID NO: 40052 - protein, 153 aa, Zea mays subsp. mays
LPNPPENQLLPNSTLPPTRRPPRQAPKLRWPARSRRRASRRAEPGGDRPHGAGGGGVRGGGQEGEGADRRPQPAGDVRVQHEEYGGRQGQARGQAGGGGEGEGGGGPQGGAGVAGRQPVGREGGLRGEAQGGGGRVQPHRVGRVPAVGRRPWR

SEQ ID NO: 40053 - protein, 127 aa, Zea mays subsp. mays; identical to SEQ ID NO: 38412

SEQ ID NO: 40054 - protein, 122 aa, Zea mays subsp. mays
MVREAEEFAEEDKKVKERIDARNQLETYVYNMKNTVGDKDKLADKLEAEEKEKVEEALKEALEWLDDNQSAEKEDYEEKLKEVEAVCNPIVSAVYQRSGGAPGASPHSTRQPVHHRHQARAE

SEQ ID NO: 40055 - DNA, 1889 bp, Zea mays subsp. mays
gtcccccccccccccccatttagctaaagtctgaaaagacgtttcaacgttcgtttaaacgtttaaacgttgaaaagttggttcataacgttttaacgttttaccgctttaataaccatgctataggccctttcgtatttctgttgacaaatgacagatgtaattttatgttttttaccctatgattgtatacaaattgaatctaaaaaagctaaggcagcatatcaaattctcttttgtgaaatattgaattcatgctcttgctttcttttgcgtaagtctaatgtcataggttttatcttcagctttataccaaaaacctacatctggatgaaaaagtcgatcttcagactgttgctgtgttctgcaatggctatgttggagctgatttagaagcattgtgtcgagaagctgccaagcttgcatatcatagaatgttaaacttatgtgagggtgacaaagtacttaaactacttatggaggactgggaatgtgctagatctatggtgggaccaagcataacaagaggggtaaccaaagaaatttcaattgtttagtgggatgatataggaggcttgaaagatctaaagaaagagcttcagaaagctgttgaatggcccatcaagcatgctgctgcattttctagacttgggataccaccagtccggggggtgctgttgcatggcccaccagggtgctccaagactactcttgccaaggctgcagcgcatgctgcccaagcttctttcttttctttgaggttcatcaggaaacaactttttattttgggaaaataacagctcactttccgttgtgtgaagaacatagaacttttagcccacagtatttaaaacagattaacataatttacttatttctgccagttgagttaatatcttgtacccagaagtcagcgaatgcttgaaaataatcaactaaacatgttcagataaatataccctcatcaacactcactagcttttcacataaattcttataacagtggtgcagatttatattccaagtatgttggagaaggggaagctctgttgcgtagaacatttcagaaagctcgtcttgcttctcccagcattatattttttgatgaggctgatgccattgcccccaagagaactggccctggtgggaattctagtggcaatgccacagtcggagaaagacttttgtcgactttattgaccgaaatggatggtttagaactggctacggtactgttagcctgctgataactttctgtgtgattctactgattatatctacatgtatattcactagaaggcaatcctttttttagggaattatcgtattgggtgctacgaatcgcccaaatgcaattgatgctgctcttttgcgtccagggcgtttcgataaggtccttcagtgcttctgttaatgacacatggacatatagacactggccataatttcccattgatctgcaggtgctgtatgtcccgccaccagatgtggaagggcgacacgagatactacgcatccatacacggaaaatgaagttgggagaggatgtagatctttggaaggttgcagagtgtaccgagctattcaccggtgctgatcttgaaggcctttgcagggaagctggaatggcagcattgagggaagatatctcagcaagtttgatacatgacgctcacttccaagccgcacgaagttcattaagcccctctcttacaaaagcagtagttgatgagtactcaaaggtagatataaatgatccatcgagtaggaaacattgatatgttctttttctatttctttgttgcacactaggcgcaatacacatttgcaaccttgccaccaagacacacagatggagatagagagatctttttaagaatattcttttt

SEQ ID NO: 40056 - protein, 82 aa, Zea mays subsp. mays
MKLGEDVDLWKVAECTELFTGADLEGLCREAGMAALREDISASLIHDAHFQAARSSLSPSLTKAVVDEYSKVDINDPSSRKH

SEQ ID NO: 40057 - protein, 80 aa, Zea mays subsp. mays
MTDVILCFLPYDCIQIESKKAKAAYQILFCEILNSCSCFLLRKSNVIGFIFSFIPKTYIWMKKSIFRLLLCSAMAMLELI

SEQ ID NO: 40058 - protein, 57 aa, Zea mays subsp. mays
MLEKGKLCCVEHFRKLVLLLPALYFLMRLMPLPPRELALVGILVAMPQSEKDFCRLY

SEQ ID NO: 40059 - DNA, 2269 bp, Zea mays subsp. mays
ttcctggagcggaaggacttgtggtcagagttgtttcatcagtggataaaaagctggaggttaaaccacgttttttggaaatttttcaagaagacaactaccctacagagttcccttacaagtccaaggctgttctcttgttccagagaatagaaggtgtggaagtatgtctatttggcatgtatgttcaagaatttggtgcagaatgctcttccccgaaccagcgccgtgtttatttgtcatacttggattctgttaagtactttagacctgagattaaaacagtatccggagaggccttgcgtacatatgtataccatgaaattctgataggatatcttgaatactgtaagctgcgggggttcacaagttgttacatatgggcttgcccacctttgaagggtgaagattacatcttatattgccatcctgagattcaaaagactccgaaatctgacaaactgcgtgagtggtacttatcgatgcttcggaaagcttctaaggaggaaattgttgttgagctgacaaatctatatgaccatttcttcatcactatggggggatgcaaggctaaggtgactgcttctcgcttgccatactttgatggagattattggccaggagctgcagaagatatgatcaatcaactccgacaagaagaagatgaccgtaaacttcagaaaaagagtaagacaaagaagattattacaaaaagagctcttaaagctgctggccacaccgatctcagcgggaatgcttccaaggatgctatgttgatgcaaaagcttggtgaaaccatatatcctatgaaggaagatttcattatggtccatttgcagtattcatgtagtcactgctgtacccttatggtgtctggaagacgttgggtttgtcatcaatgcagaagttttcacatctgtgacaagtgttatgacgcagaacagcaacttgaagacagggagaggcacccgtgtaatagtagagacacgcatatgctccatccggttgatattgttggggtgcccaaagataccaaagatagagatgacatcttagaaagcgagttctttgacaccaggcaggcattccttagcctttgccaaggaaatcattatcagtacgacacgcttcgccgcgcaaagcattcgtcaattatggtgctataccacctgcacaatccaactgcgccagcatttgtcactacgtgcaatgcctgctgccatgatatcgaaactggtcaaagctggcggtgtgagatctgtccagattttgacgtgtgcaacgcttgtttccaaaaaggagcggttactcatcctcacaagttaacgaaccatccatcagctgctgaccgtgacgctcagaacgcagaagctcggcaaatgcgtgttcagcagctaagaaagatgctcgatctcctggtacatgcgtcgatgtgccgctccggcagttgccagtatccccactgccgaaaagtaaagggactattccgtcacgggatgcagtgcaaaacccgtgcttcgggaggatgcgtcctctgcaagaagatgtggtacatgctccaactccacgcccgggcttgcaaagattcagagtgcaaagtgccacggtgcagggatctgaaggagcatctcagaaggttgcagcagcagtctgattcccggaggagggctgctgtgaatgagatgatgaggcagagagcggcggaagtggccgcaaactgagtagctgcctctgtacaggggtatataactttgtggaaagaggataggaagtacgcaggccaacaagaaagcttggggtggttgaatttgaagggggggattggttggtgaagacgaagcgcttcaacgtggatttcttatcctctgccccgtcgtcctccaaagagctcaagaaggcacaccattactgatgttaggcagtgctaaccagccacaccctgctcacgttgtctcctcaacccttgggggtgtggtaaattctttgatttgacgtggtggtgctagctgggctgaagtgagctgatctcctcgtcgccgggtgtctctggacagtgccagccgtgtagttctgctgagacatttggttagccgctgatcttccccctcaccactctcctctcgtctcggtccaggatagataggagggtataggttaataaaagaaaaaaaaagggtaaatagggacgggcgtttatttgtttatttctgcccccttctcccatccattttgtaggactcaaccttgataaaagtgtaaagcacagttc

SEQ ID NO: 40060 - protein, 572 aa, Zea mays subsp. mays
PGAEGLVVRVVSSVDKKLEVKPRFLEIFQEDNYPTEFPYKSKAVLLFQRIEGVEVCLFGMYVQEFGAECSSPNQRRVYLSYLDSVKYFRPEIKTVSGEALRTYVYHEILIGYLEYCKLRGFTSCYIWACPPLKGEDYILYCHPEIQKTPKSDKLREWYLSMLRKASKEEIVVELTNLYDHFFITMGGCKAKVTASRLPYFDGDYWPGAAEDMINQLRQEEDDRKLQKKSKTKKIITKRALKAAGHTDLSGNASKDAMLMQKLGETIYPMKEDFIMVHLQYSCSHCCTLMVSGRRWVCHQCRSFHICDKCYDAEQQLEDRERHPCNSRDTHMLHPVDIVGVPKDTKDRDDILESEFFDTRQAFLSLCQGNHYQYDTLRRAKHSSIMVLYHLHNPTAPAFVTTCNACCHDIETGQSWRCEICPDFDVCNACFQKGAVTHPHKLTNHPSAADRDAQNAEARQMRVQQLRKMLDLLVHASMCRSGSCQYPHCRKVKGLFRHGMQCKTRASGGCVLCKKMWYMLQLHARACKDSECKVPRCRDLKEHLRRLQQQSDSRRRAAVNEMMRQRAAEVAAN

SEQ ID NO: 40061 - protein, 513 aa, Zea mays subsp. mays
MYVQEFGAECSSPNQRRVYLSYLDSVKYFRPEIKTVSGEALRTYVYHEILIGYLEYCKLRGFTSCYIWACPPLKGEDYILYCHPEIQKTPKSDKLREWYLSMLRKASKEEIVVELTNLYDHFFITMGGCKAKVTASRLPYFDGDYWPGAAEDMINQLRQEEDDRKLQKKSKTKKIITKRALKAAGHTDLSGNASKDAMLMQKLGETIYPMKEDFIMVHLQYSCSHCCTLMVSGRRWVCHQCRSFHICDKCYDAEQQLEDRERHPCNSRDTHMLHPVDIVGVPKDTKDRDDILESEFFDTRQAFLSLCQGNHYQYDTLRRAKHSSIMVLYHLHNPTAPAFVTTCNACCHDIETGQSWRCEICPDFDVCNACFQKGAVTHPHKLTNHPSAADRDAQNAEARQMRVQQLRKMLDLLVHASMCRSGSCQYPHCRKVKGLFRHGMQCKTRASGGCVLCKKMWYMLQLHARACKDSECKVPRCRDLKEHLRRLQQQSDSRRRAAVNEMMRQRAAEVAAN

SEQ ID NO: 40062 - protein, 412 aa, Zea mays subsp. mays
MLRKASKEEIVVELTNLYDHFFITMGGCKAKVTASRLPYFDGDYWPGAAEDMINQLRQEEDDRKLQKKSKTKKIITKRALKAAGHTDLSGNASKDAMLMQKLGETIYPMKEDFIMVHLQYSCSHCCTLMVSGRRWVCHQCRSFHICDKCYDAEQQLEDRERHPCNSRDTHMLHPVDIVGVPKDTKDRDDILESEFFDTRQAFLSLCQGNHYQYDTLRRAKHSSIMVLYHLHNPTAPAFVTTCNACCHDIETGQSWRCEICPDFDVCNACFQKGAVTHPHKLTNHPSAADRDAQNAEARQMRVQQLRKMLDLLVHASMCRSGSCQYPHCRKVKGLFRHGMQCKTRASGGCVLCKKMWYMLQLHARACKDSECKVPRCRDLKEHLRRLQQQSDSRRRAAVNEMMRQRAAEVAAN

SEQ ID NO: 40063 - DNA, 2516 bp, Zea mays subsp. mays
gcatgcgtccgcggtgggtgcgcctagagcctgcagccaccgtagcgaaatctccaatcttgatgttgcgcggggcgaagattgcctctgccgtcgttagggtcaagcaccgagtcgccggctgctgccccctctccctatcgtcgcgccatccatttcctcgccgttgacgacgacgagcgagactagggaccggccttcgacgaagtggcggctactgctcgatctagcgagggtggctggcatcgagctggggcggcggccatgagccatctcttcgacaacaggtgagaatgaatcttacagttcaaccatatatcctcttccggacaatgtaaatatcaactccagtagatcgatcagtcggtgtcctagccatggcatcagaatagcaatggacagctgcgacagaaactcaactagcagaatcacagggaaggatattaagcaggcgattatgttcagtgcctctttgaacaagctcacattaaaccaagatgaggccaccgaatacacaaatttgatcctagaagaacttcagacaggtcaaggagtcctccagatgaatgtcatgagcaagggcctgtcaagggatctccaaccaacctgcgggccaataccagtgccaatgaaatgcagccgacagcgacatatacttactgcaaccgtagtcttcttccaagctcactggaggcgtatatttgtggttttcttgtggctcatggcatgtgctgcactcttcacatggaagttcatgcagtacagacagcggttggctttcgaggtaatggggtactgcctgtcgacagccaagggggctgcagagacgctcaagctcaacatggccattgtgctcctacctgtttgccgcaacacggtcacttggctcaggagaagccgtgttatcaactcggtcatcccatttaatgacaatattaacttccacaagcttgttgcagcgggaattgtgatcggtgtaatccttcatggaggcatccacctggcatgcgacttcccaaggatcacaaggacagataaggccttctttggacgcacaattgccgctgactttgggtaccaccagccatcctacctggagatagtggtatcaaccgaggggacaactggtatagcaatggtggtactaatgtttgtcgcattcttgcttgctagtagtccttcgagaagaaatccaggaatgctgccacctctcgtcagacagttagctgggttcaatgccttctggtactcgcaccatgtgttcatcgctgtctatgtgctcctcattgtgcattccatgttcctattcctagcaaaggatgtagcagagaagacgacgtggatgtatgtcgcaattcctgtggtgatctacattggagaacggatgttcaggatggtcagatctatggtgttcgatgtcaagatcctcaatgccacagtttatccagggatggtacttgcactcaaggtgacaaagcctccaggttttcggtatcaaagtggaatgtatgtatttgtccaatgtccagaagtatcaaagtttgaatggcacccattttcccttacatctgctccagaagatgatcacttgagcatccatataagatctcttggtgattggagctaccaaatgtatgatgtcttccaacagatgctactttccagcaactccagcatgcctaaaatattctttgatggtccctacggtgcagcgtcacaggatcactcaaagtacgaaattatattgttaattggacttggaataggagcaacgcctttcataagtgttctcaaagacattgccaatggattagataaggggcatggcaacttaaattatcactctgaccgactgaagaaggcctacttttattgggtgacaagagagcaaggatcctttgagtggttcagggatatcatgaaagaggtttcggttctagacagcaagcagggtgtgatagaaatgtataactacctgacaagtgtctaccaagaaggtgataagcggtcgatgctaataagtgcgattcaagcacttcattttgcacgccatggcattgatatcatctcaaaaactcctgttcatacgcacttttcgaggccaaactggcctagagtgctacatggccttgcaagaaggcatatcggggagaggataggggttttctactgtggtccggacgatttgggaaggcagctggagaagctctgccacaaagtgaacacaaaaacattcacgcgatttgtgttccacaaggagcatttctaataatagagactagcatagatcaactccttaggaacaaacctgtcaagtatgatctcaaagctgccaagcacttcatttttttcgcatcactccttcctatcttttgctttagtatctctgtcttcatttaaccattataaagctgatcttacttgaggagctttgtatctaactagaaaaaaacagcgccctatcgggcgcttagacgatttcttgaatgtgatctttgtgatttttttttcttttc

SEQ ID NO: 40064 - protein, 624 aa, Zea mays subsp. mays
MDSCDRNSTSRITGKDIKQAIMFSASLNKLTLNQDEATEYTNLILEELQTGQGVLQMNVMSKGLSRDLQPTCGPIPVPMKCSRQRHILTATVVFFQAHWRRIFVVFLWLMACAALFTWKFMQYRQRLAFEVMGYCLSTAKGAAETLKLNMAIVLLPVCRNTVTWLRRSRVINSVIPFNDNINFHKLVAAGIVIGVILHGGIHLACDFPRITRTDKAFFGRTIAADFGYHQPSYLEIVVSTEGTTGIAMVVLMFVAFLLASSPSRRNPGMLPPLVRQLAGFNAFWYSHHVFIAVYVLLIVHSMFLFLAKDVAEKTTWMYVAIPVVIYIGERMFRMVRSMVFDVKILNATVYPGMVLALKVTKPPGFRYQSGMYVFVQCPEVSKFEWHPFSLTSAPEDDHLSIHIRSLGDWSYQMYDVFQQMLLSSNSSMPKIFFDGPYGAASQDHSKYEIILLIGLGIGATPFISVLKDIANGLDKGHGNLNYHSDRLKKAYFYWVTREQGSFEWFRDIMKEVSVLDSKQGVIEMYNYLTSVYQEGDKRSMLISAIQALHFARHGIDIISKTPVHTHFSRPNWPRVLHGLARRHIGERIGVFYCGPDDLGRQLEKLCHKVNTKTFTRFVFHKEHF

SEQ ID NO: 40065 - protein, 603 aa, Zea mays subsp. mays
MFSASLNKLTLNQDEATEYTNLILEELQTGQGVLQMNVMSKGLSRDLQPTCGPIPVPMKCSRQRHILTATVVFFQAHWRRIFVVFLWLMACAALFTWKFMQYRQRLAFEVMGYCLSTAKGAAETLKLNMAIVLLPVCRNTVTWLRRSRVINSVIPFNDNINFHKLVAAGIVIGVILHGGIHLACDFPRITRTDKAFFGRTIAADFGYHQPSYLEIVVSTEGTTGIAMVVLMFVAFLLASSPSRRNPGMLPPLVRQLAGFNAFWYSHHVFIAVYVLLIVHSMFLFLAKDVAEKTTWMYVAIPVVIYIGERMFRMVRSMVFDVKILNATVYPGMVLALKVTKPPGFRYQSGMYVFVQCPEVSKFEWHPFSLTSAPEDDHLSIHIRSLGDWSYQMYDVFQQMLLSSNSSMPKIFFDGPYGAASQDHSKYEIILLIGLGIGATPFISVLKDIANGLDKGHGNLNYHSDRLKKAYFYWVTREQGSFEWFRDIMKEVSVLDSKQGVIEMYNYLTSVYQEGDKRSMLISAIQALHFARHGIDIISKTPVHTHFSRPNWPRVLHGLARRHIGERIGVFYCGPDDLGRQLEKLCHKVNTKTFTRFVFHKEHF

SEQ ID NO: 40066 - protein, 568 aa, Zea mays subsp. mays
MNVMSKGLSRDLQPTCGPIPVPMKCSRQRHILTATVVFFQAHWRRIFVVFLWLMACAALFTWKFMQYRQRLAFEVMGYCLSTAKGAAETLKLNMAIVLLPVCRNTVTWLRRSRVINSVIPFNDNINFHKLVAAGIVIGVILHGGIHLACDFPRITRTDKAFFGRTIAADFGYHQPSYLEIVVSTEGTTGIAMVVLMFVAFLLASSPSRRNPGMLPPLVRQLAGFNAFWYSHHVFIAVYVLLIVHSMFLFLAKDVAEKTTWMYVAIPVVIYIGERMFRMVRSMVFDVKILNATVYPGMVLALKVTKPPGFRYQSGMYVFVQCPEVSKFEWHPFSLTSAPEDDHLSIHIRSLGDWSYQMYDVFQQMLLSSNSSMPKIFFDGPYGAASQDHSKYEIILLIGLGIGATPFISVLKDIANGLDKGHGNLNYHSDRLKKAYFYWVTREQGSFEWFRDIMKEVSVLDSKQGVIEMYNYLTSVYQEGDKRSMLISAIQALHFARHGIDIISKTPVHTHFSRPNWPRVLHGLARRHIGERIGVFYCGPDDLGRQLEKLCHKVNTKTFTRFVFHKEHF

SEQ ID NO: 40067 - DNA, 1127 bp, Zea mays subsp. mays
ccccaccagtccgtcccatccctcgcctgccttcgcacgggtgcgccgcccgctcgacagccacgccgcgccgcgccgcgccgctcagctgcccggcacccgcccttcctcgccgagctcgggatcgacgtctcccgcacctcctccgcgcccgttccgggctccgcatccggcctctcccccgtccccaaccccattccgcagcaggcgaccagcacaacatctcgaatcccccgcctcgcattcggctcgccgtcgctcctcctccgcgtcccgccaccctccgcacgcacaagtttactatgtctgggatggcatctgatgattcacctgcccaagtgaatgttgaaggagatgtttcagagaaaaaagtagaagttcaagaccagaatgaagtgggtgggatgccctcacgacaagaggaggaggcagcaattaagaaaaagtatggaggaatattgcccagaaagactccacttatatctaaggatcatgaacgtgcttactttgattctgctgattgggctctaggaaagcaaggtggtgttcccaacaagcctaaaggtcctcttgaggcactccgacccaagcttcagcctacgcaacagaatgcccgcgcccgccgaacttcatatgcgtctgcggacagtgacgacactttgaatctgtcccccgaggatctggtcccgcaaggagaacccagccagcagggagaaccagtcgaggacaagaacaaggaataaacacatgcccagcatagctactgtactgtaccccttttcatacacaagatgccattttccgccgtcgcacaaaaaaaaaacttcttttgccttggtaataagcgtgttgattcggttccggcccaacggtcccggtgaggctgaggttgagacacgtgcagcttgaactgcatgtgagatgtggtatccgctgcactgggctgttgggggtccttgggatgcatgaacaaataaacaatgatgcttgcgatgtttacattgctgtacctggacctgtgttacctctatgcaaacacatgcaaatccgatggtccgagactcgaaactctcccgttgagctgaaggagttgctgtactaataataatgaagattttttttttttc

SEQ ID NO: 40068 - protein, 246 aa, Zea mays subsp. mays
PPVRPIPRLPSHGCAARSTATPRRAAPLSCPAPALPRRARDRRLPHLLRARSGLRIRPLPRPQPHSAAGDQHNISNPPPRIRLAVAPPPRPATLRTHKFTMSGMASDDSPAQVNVEGDVSEKKVEVQDQNEVGGMPSRQEEEAAIKKKYGGILPRKTPLISKDHERAYFDSADWALGKQGGVPNKPKGPLEALRPKLQPTQQNARARRTSYASADSDDTLNLSPEDLVPQGEPSQQGEPVEDKNKE

SEQ ID NO: 40069 - protein, 146 aa, Zea mays subsp. mays
MSGMASDDSPAQVNVEGDVSEKKVEVQDQNEVGGMPSRQEEEAAIKKKYGGILPRKTPLISKDHERAYFDSADWALGKQGGVPNKPKGPLEALRPKLQPTQQNARARRTSYASADSDDTLNLSPEDLVPQGEPSQQGEPVEDKNKE

SEQ ID NO: 40070 - protein, 143 aa, Zea mays subsp. mays
MASDDSPAQVNVEGDVSEKKVEVQDQNEVGGMPSRQEEEAAIKKKYGGILPRKTPLISKDHERAYFDSADWALGKQGGVPNKPKGPLEALRPKLQPTQQNARARRTSYASADSDDTLNLSPEDLVPQGEPSQQGEPVEDKNKE

SEQ ID NO: 40071 - DNA, 1149 bp, Zea mays subsp. mays
ccccgcccccgcccccgcccccgcccccgcccgcactgccactcctacccttctcttcgcctctgtaaccggcacctccaaaaccctcgctgcgcgtctctccgcccgactgaccgccgatgccggtttccccgtccgcgccaccgacgctgccaccttcgaccccgacgaccttccttcagtccatctcctcctgctcgtaatccccacccacgacggcggtgcgccgcccccttctgcggccttcctttcgcgctggcttgaggagtccgccgctgacttccgcgcgggtgcactcctcctttccggtctccgcttcgccgtcttcggggttggttcccgggcctatggggagaccttcaacgctgccgcgaggaacttctcgcggtggttgcgcgcgctcggcgccgttgaagtggttcctctcggggagggcgacatcgatagcggggatctcgaagcggtgttcgaggagtggaataggagggtgctgagggtggtgaagggcgaggaggttggttatggggctaatgaaaaaagcaatggtcttgacgagttggagttggaaggggaggattgggatgacgacgatgaggagatggtggatgcggaggttgacatggaagatattgctgggaaagcaccggcgaggaggaagaacgggaatttggagggtgttctagctaatggagtgcataacggtgtaaaggacatggtcacaccaatcattaggacgagtttggagaagcaaggttacaaaattattggttctcatagcggagtgaagatttgcagatggactaagtcgcagctgcgaggtcgtggagggtgttataagcactcattttacggcatagaaagtcacagatgcatggaagcaactccaagtttggcttgtgcaaataaatgtgtattttgttggagacatcacacaaatcctgttggaaagagctggaaatggaagatggatgaccctcttgacattgtgaatgctgcaattgaccagcatactaagatggttaagcaaatgaagggcgtaccaggagtaaagccagaaaaacttgacgagggtctgtcacctagacattgtgcgttatctctggttggtgaaccaattatgtaccctgagataaatgctcttgtggatga

SEQ ID NO: 40072 - protein, 382 aa, Zea mays subsp. mays
PAPAPAPAPARTATPTLLFASVTGTSKTLAARLSARLTADAGFPVRATDAATFDPDDLPSVHLLLLVIPTHDGGAPPPSAAFLSRWLEESAADFRAGALLLSGLRFAVFGVGSRAYGETFNAAARNFSRWLRALGAVEVVPLGEGDIDSGDLEAVFEEWNRRVLRVVKGEEVGYGANEKSNGLDELELEGEDWDDDDEEMVDAEVDMEDIAGKAPARRKNGNLEGVLANGVHNGVKDMVTPIIRTSLEKQGYKIIGSHSGVKICRWTKSQLRGRGGCYKHSFYGIESHRCMEATPSLACANKCVFCWRHHTNPVGKSWKWKMDDPLDIVNAAIDQHTKMVKQMKGVPGVKPEKLDEGLSPRHCALSLVGEPIMYPEINALVD

SEQ ID NO: 40073 - DNA, 772 bp, Zea mays subsp. mays
atattcatcagggtactctacccggtcccggttggacacttggacagcccagcagccaatggcgttggtataaaacacaggtcgcatcgccgctacgagtcgcgcgcacacgataccattatattccatggaccacgacgcgtcacggcaagaagcggcggcggccgtgtggcgcggcacggtgcgcgcggtggcgtcggggccgacgcccgacgaggcgtgggcgctgctgggcgacttctgctcgctgcaccggtgggtgtccacggtgcgggcgtgccggcgcgtggaggtggagggcgcggcggcggcggagccggagccggaggggcgccccgcccccggctgcgtgcgctactgcgagggccccgtgaacatggccgcgccgggggagctcgtgggctggtccaaggagcggctcctggagatggaccacgcggggcggtggtacagctacgagctgctggagagcaacaagggcttcggcaggtaccgggccaccgtgcgggtggagcatgacccggcgggatgcgctgtcaggtggtcgttcgaggccgacccggtgaagggctggacgctcgacgggttcctggggttcctggagaaactcgcgcgtggcgtcgcccagcggctccaagaggagatcatggtgaagccgtgaagtcgcctaggattggtttgtggccgcgcgttcgtttacacttattttcaatccatatggatatggattgaagtgaattgatacagattgaaagatattttgatttactat

SEQ ID NO: 40074 - protein, 177 aa, Zea mays subsp. mays
MDHDASRQEAAAAVWRGTVRAVASGPTPDEAWALLGDFCSLHRWVSTVRACRRVEVEGAAAAEPEPEGRPAPGCVRYCEGPVNMAAPGELVGWSKERLLEMDHAGRWYSYELLESNKGFGRYRATVRVEHDPAGCAVRWSFEADPVKGWTLDGFLGFLEKLARGVAQRLQEEIMVKP

SEQ ID NO: 40075 - protein, 172 aa, Zea mays subsp. mays
IFIRVLYPVPVGHLDSPAANGVGIKHRSHRRYESRAHDTIIFHGPRRVTARSGGGRVARHGARGGVGADARRGVGAAGRLLLAAPVGVHGAGVPARGGGGRGGGGAGAGGAPRPRLRALLRGPREHGRAGGARGLVQGAAPGDGPRGAVVQLRAAGEQQGLRQVPGHRAGGA

SEQ ID NO: 40076 - protein, 123 aa, Zea mays subsp. mays
IHQGTLPGPGWTLGQPSSQWRWYKTQVASPLRVARTRYHYIPWTTTRHGKKRRRPCGAARCARWRRGRRPTRRGRCWATSARCTGGCPRCGRAGAWRWRARRRRSRSRRGAPPPAACATARAP

SEQ ID NO: 40077 - DNA, 1010 bp, Zea mays subsp. mays
aaactgcaaagcacggtgatgagtcacctttggatgttggtgggaggaggcccttgtcgcagagcgccgggaacgccaagtaggcgacgaggcatgcggcggcgccggtgcgcagcacgagcgtgggcacgccgagctcctcggccaccagctgcattccgcgcaggttggagtccaccaccaggcatgccggcggcgcgccgccctcgccgtcgtcctcggggagggcgagagcctggcgcaggcggtcccggaacggctcccgcaggcgacggttgatccgcagcagcgccccagggatgtcggcgtcgacgccagaagggacgaggtcggccgacggcacgccctcgccgacggggacgaagcggtaccccggagggtggcgcgcggggtcgggtgcgttgaaggtggcgtggaagacggtgatgtccaggccaccacgcgcgtgcagcgccccggccagctgtagcatagggttcaggtggccctggaacggcaacgggaacatcagcacgcgccgccgccgccgcacgacgccgccggagcctgtccgagaggccggcaccgccgccgtcgccatggtgctgctcgatcaagagcaacttttttttttagctctgtcgatcgatgactgagattctgaggcgagtgacgcgaatgttgctgaaatcaagagaggcttcgaatttgctatcaataattgcgcaggaagggaaaggaagggaagggagcaagcaaggtacgcgaggctgatttgatctgtttggaggcattgtcgtcgccgtcttgcactcttgcttctattttatacacatactagagggcaacaatcgcggttggcgcattcacgttccacaaccacctgtgcggctacgctgtagcctgtagcgagctgtacgcctgtattacgcaaatggttttgcatgtagaattgcagtgggagtaaaaatcatttgcttttaattttgctcacatgttattaagatatagcagatcagcgttcacgttca

SEQ ID NO: 40078 - protein, 111 aa, Zea mays subsp. mays
MSASTPEGTRSADGTPSPTGTKRYPGGWRAGSGALKVAWKTVMSRPPRACSAPASCSIGFRWPWNGNGNISTRRRRRTTPPEPVREAGTAAVAMVLLDQEQLFFLALSIDD

SEQ ID NO: 40079 - protein, 92 aa, Zea mays subsp. mays
KLQSTVMSHLWMLVGGGPCRRAPGTPSRRRGMRRRRCAARAWARRAPRPPAAFRAGWSPPPGMPAARRPRRRPRGGREPGAGGPGTAPAGDG

SEQ ID NO: 40080 - protein, 86 aa, Zea mays subsp. mays
MSHLWMLVGGGPCRRAPGTPSRRRGMRRRRCAARAWARRAPRPPAAFRAGWSPPPGMPAARRPRRRPRGGREPGAGGPGTAPAGDG

SEQ ID NO: 40081 - DNA, 726 bp, Zea mays subsp. mays
atgtttgcaaaattctcacagagaaccggaggactgagaccagaggaggagacgtcacgcctgcgcggctgcgcccaccatggacgaggatgagtttcggcgcatgctcgacctcttcccggtcgtccgctcccgagactactgctgctccgatcttggaacatccagcagaggaaccagacagcgatcacgagttcaggaggcaactaagggcgataataaggactcgtccggtggacgagatatgtttatgcagaaattgaagatggctgcggagaataagattggagcgacaaaggcagagttcttctgcaagacattcgaagaagttcatgagaaacttgttcacagagagctgaatttggatgctgctaagaagttcctgagcgcatatgagagctgatgatgaacaataggtagatgctgcttaagggtcggtagttgccaatgatctggaaagttgttgatgctgttgagattttgatcacaggcaaacttttaacaacaggtagatgctgttgagcgcatactgataccgcctgattggttcaccgatcgcccgtagccagctcgtatgcagccaggctgtccagagactgttatttggcccgtagaagtggatgcactcaaaataaatgttgcgtttactcgtgcagcctcacgtcttttacgtgcatgcaattaaacatatgctcaataaaatcaatgcatgtgatggtttagaac

SEQ ID NO: 40082 - protein, 107 aa, Zea mays subsp. mays
MDEDEFRRMLDLFPVVRSRDYCCSDLGTSSRGTRQRSRVQEATKGDNKDSSGGRDMFMQKLKMAAENKIGATKAEFFCKTFEEVHEKLVHRELNLDAAKKFLSAYES

SEQ ID NO: 40083 - protein, 99 aa, Zea mays subsp. mays
MLDLFPVVRSRDYCCSDLGTSSRGTRQRSRVQEATKGDNKDSSGGRDMFMQKLKMAAENKIGATKAEFFCKTFEEVHEKLVHRELNLDAAKKFLSAYES

SEQ ID NO: 40084 - protein, 86 aa, Zea mays subsp. mays
VCKILTENRRTETRGGDVTPARLRPPWTRMSFGACSTSSRSSAPETTAAPILEHPAEEPDSDHEFRRQLRAIIRTRPVDEICLCRN

SEQ ID NO: 40085 - DNA, 1083 bp, Zea mays subsp. mays
gtaggctcccgaaaatctccccgagtccgacgcgtctccggcggccgcccccctctccctctcggatctctccctctccgctcgccgcgcctccatcggtccactcagccatgtatagtaattacgggaatccttcggggatgcagatgcccccgcagaactctcaacctgtccagtttgataatccattatacggtgcaagctcgggtctaatcagatctgggataggagtatatggggagaagtttttgggttctagttcagaattcatgcaaagcaacatcaatagatacttctccaacccgcagtattacttccatgtgaatgatcaatatgtccgtaacaagttgaaagttatactgttcccgttctttcacagggggcactggactcgaataagtgagccggtcggtggccgcttgtcctacaaacctccaatctatgacataaacgcaccagatctgtacatccctttcatggcatttggaagcttcatcatcctttcagggtttacattgggtttcatgggaaagtttactccagcagctataaatctgcagtttacaagggcgctcatcggctggggcttccagctcatggtcctgaaaggtctgctctactcgatgggtggtggcgaggtgccactgctcgacttggtagcgtacggtggttatttattcgccgggctatcgctcgccgtcgtcgcgaggctcatgtgggcgtactcgtactatgtgatgatgccgtggatgagcctgtgcatgggggtgttcctggtgaggacgatgaagagggtgctcttcacggagatgagaagcagcgagaggcactcgtcgcggcagcactacttccttctcttcatggcaatcgcacagttccccctgttcttctggctcggcagcataggtgcatgatgcagttttgtgtacttttcgcagcattaacgttgcaaaaatgatattgaagtgtttagatgtgttgtaaagaaaaaaacaattggacaatggtctcaacagcttagaggttggcagctctgcttgtgaagttgtatgtgatccacaatcatgttatgctattgacttt

SEQ ID NO: 40086 - protein, 303 aa, Zea mays subsp. mays
RLPKISPSPTRLRRPPPSPSRISPSPLAAPPSVHSAMYSNYGNPSGMQMPPQNSQPVQFDNPLYGASSGLIRSGIGVYGEKFLGSSSEFMQSNINRYFSNPQYYFHVNDQYVRNKLKVILFPFFHRGHWTRISEPVGGRLSYKPPIYDINAPDLYIPFMAFGSFIILSGFTLGFMGKFTPAAINLQFTRALIGWGFQLMVLKGLLYSMGGGEVPLLDLVAYGGYLFAGLSLAVVARLMWAYSYYVMMPWMSLCMGVFLVRTMKRVLFTEMRSSERHSSRQHYFLLFMAIAQFPLFFWLGSIGA

SEQ ID NO: 40087 - protein, 267 aa, Zea mays subsp. mays
MYSNYGNPSGMQMPPQNSQPVQFDNPLYGASSGLIRSGIGVYGEKFLGSSSEFMQSNINRYFSNPQYYFHVNDQYVRNKLKVILFPFFHRGHWTRISEPVGGRLSYKPPIYDINAPDLYIPFMAFGSFIILSGFTLGFMGKFTPAAINLQFTRALIGWGFQLMVLKGLLYSMGGGEVPLLDLVAYGGYLFAGLSLAVVARLMWAYSYYVMMPWMSLCMGVFLVRTMKRVLFTEMRSSERHSSRQHYFLLFMAIAQFPLFFWLGSIGA

SEQ ID NO: 40088 - protein, 257 aa, Zea mays subsp. mays
MQMPPQNSQPVQFDNPLYGASSGLIRSGIGVYGEKFLGSSSEFMQSNINRYFSNPQYYFHVNDQYVRNKLKVILFPFFHRGHWTRISEPVGGRLSYKPPIYDINAPDLYIPFMAFGSFIILSGFTLGFMGKFTPAAINLQFTRALIGWGFQLMVLKGLLYSMGGGEVPLLDLVAYGGYLFAGLSLAVVARLMWAYSYYVMMPWMSLCMGVFLVRTMKRVLFTEMRSSERHSSRQHYFLLFMAIAQFPLFFWLGSIGA

SEQ ID NO: 40089 - DNA, 867 bp, Zea mays subsp. mays
aatcccgttcgggccgaagcaatccctctctgcattaacagcaaggagcgctgcaactcgccacttgcagtttcgacttttcgagatctgcgccgctgttgctgtccccactcggcctcccctctctctccccttcttccagacccttcccttcttccgctcacccacgcggacgccggctgcccccttccctgactgaccccctcgaggcccctcgatacgatacttcgggtgtaggggagcatgcggaagaaagggcgggcggtgccggagtggctcaacagcccaatttggtccgctaccccgcccgcgcccgcccagccggacccctacggcgccgacctcgctccgccgccacccccaaagccgccgccgccgccagctactgcctctcccgtaccgccgccgccgtcgtacgagcaggccgtaggggtgggtggtggccggagggaggaggaggacgacgagggcgccggggcggtgatacgggcacacctgctctccgacttcaaggccgcgctatcgaagaaggtggtgaacatgggagagctgcggcgcttagcctgcctcggcgtccccgacggcggtactggtgtccgacccgtcgtctggaaggtccccactcgcattctcttctgattctatagcgaattttggttgagagttcggagttttgcacttcctacttgccctgcaagggtttagtgttgatatttcactgggatagttggtcatttttccattctttctagctgacttatgtctgtcctcatttttttttctggttgtattgactattgagacatggagataaaagttacggagtgtataatttcttatatctgcagcgctggtggtttgtttggt

SEQ ID NO: 40090 - protein, 131 aa, Zea mays subsp. mays
MRKKGRAVPEWLNSPIWSATPPAPAQPDPYGADLAPPPPPKPPPPPATASPVPPPPSYEQAVGVGGGRREEEDDEGAGAVIRAHLLSDFKAALSKKVVNMGELRRLACLGVPDGGTGVRPVVWKVPTRILF

SEQ ID NO: 40091 - protein, 65 aa, Zea mays subsp. mays
IPFGPKQSLSALTARSAATRHLQFRLFEICAAVAVPTRPPLSLPFFQTLPFFRSPTRTPAAPFPD

SEQ ID NO: 40092 - DNA, 985 bp, Zea mays subsp. mays
agcagcataacaagaagacacaccaaaacctagctagcttgccgcacctgcttggggctgccaagtaaaagtagtaagctagagaagcaaagcaaagctccgatccaatccaatccaccgcgaggattatgtctctggtaaggctcctggacacgctggccctggactcgtgggtgcggaacccgttcaccatcttcggcacggcggtggccgccgacgcgtggctggccagcgacacgtcggcgttcgccaacacgcacatcgagagccgggacacggcggccgcctacgtgttcagcgccgcgctcccgccgggcgtcaagaaggaggaggtcacggtggagctggacgagggcaacgtgctggtcatcgccggcgagcgcagcgtgtgccgccaggagcgcagcgacgggtgccaccacatcgagcgcagccgcgccaccttcctcgccaggttccacctgcccgaggacgccgccgtcgacggcgtcagggccgccttggacgccggcaggctcaccgtcaccgtgcccaaggtcggggccgccgccgccgccatcgtgcccgagaagcccgccgccgacgcgccggcgctggcgcccgtgcccgtcgaggccggcccctgctgagcttctgacgatgccgacgccgacgccgaccgagacggccggccggctccctgttcctccacgtacacgcccccttgccggtgaacggatagtagcgtcccacgtcgtcgcgcgactgtgaggttgtcgctcgctcgcccgtgctgtctcaaagtttgtttccgtggtttggtcatggctttgcgtactacgtgatggactcagctgcctgtactgtactgcgtgcatgcatgtaaccatgaaaacaaaagggtggtattcctgcattgcacggctgcaacgtgtaattccgtctttaatcaatgttttttctgtgcttagtaaatgaaaaggcaagctaagctggaatcctatat

SEQ ID NO: 40093 - protein, 166 aa, Zea mays subsp. mays
MSLVRLLDTLALDSWVRNPFTIFGTAVAADAWLASDTSAFANTHIESRDTAAAYVFSAALPPGVKKEEVTVELDEGNVLVIAGERSVCRQERSDGCHHIERSRATFLARFHLPEDAAVDGVRAALDAGRLTVTVPKVGAAAAAIVPEKPAADAPALAPVPVEAGPC

SEQ ID NO: 40094 - DNA, 976 bp, Zea mays subsp. mays
tattctgaatcaaccactggttcaaacattgagcttgctgctgagaaggtggtcttacgccggcctaagcagtctatcttacatgtgatcacagggatgggtaaccatagcaaagggcaggcttcactacctgttgccgttaggggtttccttattgagaacgggtatcgatttgatgagctgaggcctggtgtttttgcggttcgtccaaaattccgccgcaggtgaacctgtggaagtttgtacaattgtaacatggtggtggcttggggtgattatgtgctctaaattttacactaaaatttaaggatcaaatcggattaggatcagactctatttttattatgaagtagatccttcggtacctccacggcatcaccgacttcgtccttctccttcatcgatttgcgaccgttgttctcgttttctacaccgataccgattagggtggttatcccgatacctgtcggttcactttcggttttgccgtctttcttagcgacaacctcgtctcttctggtcttcgaagcgacagcctgtcgtctcccgctccagcgccgagtcgacatggcttcgtcagctgctccagaagctacaatgttcgttgactcgaagcacttttgtctactgtgataacatcagcgtcatatacttctcctccaaccttatccagcatcagcgctcgaagcatgtcgatctcgacctacatttccttcgcgagtgggttgccgtcaaagatgtgtgggttctttatgtcccgactacttagtttgtcgacatcttcaccaagggcttccctgcgtcgatgttcgatgactttcagtccagtctcaacatctcccgtagctagagttttgactgtggttaatgtgtattcagtgtaatgggctatgtattcagtgtaatggggctttgtgtaatgggcttaggtccaacatctatattataaatttagcacacgaccttgataagggtt

SEQ ID NO: 40095 - protein, 75 aa, Zea mays subsp. mays
YSESTTGSNIELAAEKVVLRRPKQSILHVITGMGNHSKGQASLPVAVRGFLIENGYRFDELRPGVFAVRPKFRRR

SEQ ID NO: 40096 - protein, 64 aa, Zea mays subsp. mays
MSISTYISFASGLPSKMCGFFMSRLLSLSTSSPRASLRRCSMTFSPVSTSPVARVLTVVNVYSV

SEQ ID NO: 40097 - protein, 48 aa, Zea mays subsp. mays
MCGFFMSRLLSLSTSSPRASLRRCSMTFSPVSTSPVARVLTVVNVYSV

SEQ ID NO: 40098 - protein, 43 aa, Zea mays subsp. mays
MGNHSKGQASLPVAVRGFLIENGYRFDELRPGVFAVRPKFRRR

SEQ ID NO: 40099 - DNA, 944 bp, Zea mays subsp. mays
atatggctgccgttcccaaagatgccaagctagctagcccttcttgctgctccatctccttctccttcttctcccgctccactccattccccggctcgatcgccgcaatggcgctccggctaacgctcgccgccgtcgcactctccgtcctcgcagcggcggcggcgagtggcgccagcgcccccgcccccgccccggcgctggggatcaactacgggcaggtcgcggacaacctcccgccgccgcaggcggccctggtgctgctccgcgcgctgaacgcgacgcgggtgaagctgtacgacgcggacgcgcgcgtgctccgcgccttcgcggggtccggggtagacttcaccgtgggcgtcccggaccgcctggtcccgcgcctggccgcgggaccggggcgcggcggccgcgtgggtgcgcggcagcctgctgccccacctccccgccacgtccatcaccgccgtcaccgtgggcaacgaggtgctgtcgggcacggacgccgccatgcaccgggcgctgctcccggccatggaggccctccacgcggcggtggccgcgagcaacctcacctcccgcgtggccgtcacaacggcgcactccctcgccgtgctgtcctcctcgttcccgccgtccgccgctgcgttccgccgcgaggtggtcccctacatggcgcctctgctcgggttcctggcccgcacgggcgcgccgttcctggtgaacgcgtacccttacttcgcgtacaaggcggacccggcgcgggtggacctgggctacgcgctgttcgagcccggcgcaggcggcgtggccgacgccgccacggggctgcgctacgacaacatgctccacgcgcaggtggacgccgtgcgcgccgccatctgcgcggccaactacggcagggcgctggagatccgcgtgtcggagaccgggtggccgtcgcaggg

SEQ ID NO: 40100 - protein, 314 aa, Zea mays subsp. mays
MAAVPKDAKLASPSCCSISFSFFSRSTPFPGSIAAMALRLTLAAVALSVLAAAAASGASAPAPAPALGINYGQVADNLPPPQAALVLLRALNATRVKLYDADARVLRAFAGSGVDFTVGVPDRLVPRLAAGPGRGGRVGARQPAAPPPRHVHHRRHRGQRGAVGHGRRHAPGAAPGHGGPPRGGGREQPHLPRGRHNGALPRRAVLLVPAVRRCVPPRGGPLHGASARVPGPHGRAVPGERVPLLRVQGGPGAGGPGLRAVRARRRRRGRRRHGAALRQHAPRAGGRRARRHLRGQLRQGAGDPRVGDRVAVAG

SEQ ID NO: 40101 - protein, 279 aa, Zea mays subsp. mays
MALRLTLAAVALSVLAAAAASGASAPAPAPALGINYGQVADNLPPPQAALVLLRALNATRVKLYDADARVLRAFAGSGVDFTVGVPDRLVPRLAAGPGRGGRVGARQPAAPPPRHVHHRRHRGQRGAVGHGRRHAPGAAPGHGGPPRGGGREQPHLPRGRHNGALPRRAVLLVPAVRRCVPPRGGPLHGASARVPGPHGRAVPGERVPLLRVQGGPGAGGPGLRAVRARRRRRGRRRHGAALRQHAPRAGGRRARRHLRGQLRQGAGDPRVGDRVAVAG

SEQ ID NO: 40102 - DNA, 1042 bp, Zea mays subsp. mays
caactcagttattctacagctttaattttgcagagcgaccaccagtccaggtccagcgcgggacgcatcacatacacgcggtaccttcgttcgttctcaagcttatagcgcccgatcgaccctgcgcggagctagttcgttcgttccggcaggcggcggcagcgaagcagtgcgacgacgacgacgaggtacgtagagagcgagaggatagatgtcgagccgaaggtcgtcgtcgcacggcaacatctccgaggacgagatgaacgagctcgtctccaagctccaggccctgctccccagctcccgccgccgccgcggctccggccaggcgtcgacggcgaagctgctgaaggagacctgcagctacatcaagagcctccagcgggaggtggacgacctcagcgaccggctgtcggacctcttgtccaccatggaccacaacagccccgcggcggagatcatccgaagcatcctccgctcctgatcgcgcgcaagggcgaggtcaacgaacgccggcctccgatcgatcgccgacagcgcgcgctctccggccggctggtcacgtgcgggagctgagctcaattaggtagctagggtatatatacatataatatatatatctacatgtacgtgtatctaccttttcctttaccagtctccctagatctgagatcatgtggctagctccgtataaaaatgtactagccacacgctgacacgcacacgtatgcatgatggtctctgcgctaagcttcactgggtagtagggtatagcactagagcctaagcaagcttatcctcctcactttagtatagctcgcagcagcagcagtctctcgattcctcggcgatcttcggtggcttaattggatcgagctggctagtgcgctctctctctctctctcatctctagcaggcaggaaaagagacaaccgaccgaccactactagcctagcctagagcaaattgactgtcgttatgatgatgatgatgtactgctaaagcttttattaacgacttcaataacatgtacgtcctgcgg

SEQ ID NO: 40103 - protein, 90 aa, Zea mays subsp. mays
MSSRRSSSHGNISEDEMNELVSKLQALLPSSRRRRGSGQASTAKLLKETCSYIKSLQREVDDLSDRLSDLLSTMDHNSPAAEIIRSILRS

SEQ ID NO: 40104 - protein, 86 aa, Zea mays subsp. mays
TQLFYSFNFAERPPVQVQRGTHHIHAVPSFVLKLIAPDRPCAELVRSFRQAAAAKQCDDDDEVRREREDRCRAEGRRRTATSPRTR

SEQ ID NO: 40105 - protein, 74 aa, Zea mays subsp. mays
MNELVSKLQALLPSSRRRRGSGQASTAKLLKETCSYIKSLQREVDDLSDRLSDLLSTMDHNSPAAEIIRSILRS

SEQ ID NO: 40106 - DNA, 421 bp, Zea mays subsp. mays
acctattggacaggcaacgtcctcatcttcatctcccaggttttcccctccaatcacccccaggtcttcctctcgcgagttgcggtctcgcggccccctccgccgaccgcaactcgcgggaggaacaccgggcgtgtaggagtgatcaagaacagggagaagcacaagggcagcttcgagaccatccacgtgctgcttggagctttttgctatgtctagttttttcctatttgttgtacaagaaaacataaaatggaattcaactttggtggccgcaaaagtttagagacttgatttcatataaagttaggctgaacattactgcaaacagttgtattttagtttagatttagagtacacttatgtatgtgttgtttgacaatgcttatttatgatatattgaatggtacttatttatatt

SEQ ID NO: 40107 - protein, 82 aa, Zea mays subsp. mays
LLDRQRPHLHLPGFPLQSPPGLPLASCGLAAPSADRNSREEHRACRSDQEQGEAQGQLRDHPRAAWSFLLCLVFSYLLYKKT

SEQ ID NO: 40108 - protein, 72 aa, Zea mays subsp. mays
TYWTGNVLIFISQVFPSNHPQVFLSRVAVSRPPPPTATRGRNTGRVGVIKNREKHKGSFETIHVLLGAFCYV

SEQ ID NO: 40109 - protein, 45 aa, Zea mays subsp. mays
PIGQATSSSSSPRFSPPITPRSSSRELRSRGPLRRPQLAGGTPGV

SEQ ID NO: 40110 - DNA, 948 bp, Zea mays subsp. mays
actacaccacaccgcaccggcaccaccaccaaccgagcggctccaggctcctgctcaggaaggggagaagaggcgagccttcctgagcaggggcctgtcgcccaaggtggtggtggtgacggagcaggaggcgtcgcacaacgcggcgccgctgacggagcggttcgtggaggcgctcaactactacgcggcgctgttcgactgcctggagtcggcggcgccccgcgggtcggtggagcgcgcgcgcgtcgagcgctggctcctcggggaggaggtgaagaacatcgtggcctgcgacggcgcggaccgccgggagcggcacgagcgcctggaccgctgggcggcgcggatggagggcgccggcttcgcccgcgtcccgctcagctactacgcgctgctgcaggcccggcgggcggcgcaggggctgggctgcgacgggttcaaggtgcgggaggagaagggcgccttcttcctctgctggcaggagcgcgccatcttctccgtctccgcctggcgcggcggtcgcttcgactgatggaggaacgcgtcgacgccttcccgtatttgtgcggaggaggagacgggccgcctgtcgtggctttgcgcgtcaggtggccgtcacgcacgttggggcttcttttggtcgttttgtgtgttcagtttacgccgtatctagttagatttcaatcaggtttgttcatagtgtacccctgccgctctccaatttggatggatggaatctcatgcttgtttggatcagtcagtccttttagatctgttaatgtaacaactagagctgcttaacagctactatctcactcggtcccggtcccggtcttataacaagcgtggtaatgtacttgtggagtttcaatttttctgacaattatggacatttgtaacaaacacttctggagtttaaaatttgatggatggatcaaaaaaatc

SEQ ID NO: 40111 - protein, 267 aa, Zea mays subsp. mays
TTPHRTGTTTNRAAPGSCSGRGEEASLPEQGPVAQGGGGDGAGGVAQRGAADGAVRGGAQLLRGAVRLPGVGGAPRVGGARARRALAPRGGGEEHRGLRRRGPPGAARAPGPLGGADGGRRLRPRPAQLLRAAAGPAGGAGAGLRRVQGAGGEGRLLPLLAGARHLLRLRLARRSLRLMEERVDAFPYLCGGGDGPPVVALRVRWPSRTLGLLLVVLCVQFTPYLVRFQSGLFIVYPCRSPIWMDGISCLFGSVSPFRSVNVTTRAA

SEQ ID NO: 40112 - protein, 177 aa, Zea mays subsp. mays
LHHTAPAPPPTERLQAPAQEGEKRRAFLSRGLSPKVVVVTEQEASHNAAPLTERFVEALNYYAALFDCLESAAPRGSVERARVERWLLGEEVKNIVACDGADRRERHERLDRWAARMEGAGFARVPLSYYALLQARRAAQGLGCDGFKVREEKGAFFLCWQERAIFSVSAWRGGRFD

SEQ ID NO: 40113 - DNA, 1003 bp, Zea mays subsp. mays
gaacataaggataaaattattgagaagtatgggaatgctgcgtcagaagatacaattcctcgggagctgcttcttgggcaaagtgagagagagattgagtatgaccataccggtcgaataattaaaggacaggatgtagctcttcccaagagcaaatacgaagaggatgtattcattaataaccacacgagtgtgtggggttcatggtggaaagatcatcaatggggctacaagtgctgcaagcagactatcaagaatagttactgcacaggcttggctggaatagaagctgccgaggcctcagcagatctaatgaaggccaatatggcccgcaaggaggctgcagaagatgaacctgtacagcatgaagagaagcgactagccacttggggaaccgacgtgcctcaggatcttgttcttaatgagaagaagctggaggaatctctaaagaaggagactgcaaggagaaaagaggagaaggatgaaagaaagaggaagtataacgtgaagtggaacgacgaggtgactgcagaagacatggaggcttaccgaatgaagaggattcaccatgacgatcctatgaaagattttctcaactgaaaagtgtggtagataactagatgttcatgccactgtatcacattggttgcaccgtgccttgcatcaatgttgtgttactgtagggtggctacgcctgtcctaaggatatggcctgcagaccgtgcatgtggcagtgtgtgttacacttaaaatatgatatgggatgggtaaggctggagataacttaaccagagtggtggtggtgctgtgatctagtggcagaatgtaagaaactggctacaccttttacaagctgcgtgttggagatgtatggggacgtttgcgttggattaaagctagctaacagttgcagttgtaatctatggagagaaaaatactgtaaaagtagtataagctgatacaaactaatgccaaacgaacaggctgagccataattttatgc

SEQ ID NO: 40114 - protein, 199 aa, Zea mays subsp. mays
EHKDKIIEKYGNAASEDTIPRELLLGQSEREIEYDHTGRIIKGQDVALPKSKYEEDVFINNHTSVWGSWWKDHQWGYKCCKQTIKNSYCTGLAGIEAAEASADLMKANMARKEAAEDEPVQHEEKRLATWGTDVPQDLVLNEKKLEESLKKETARRKEEKDERKRKYNVKWNDEVTAEDMEAYRMKRIHHDDPMKDFLN

SEQ ID NO: 40115 - DNA, 838 bp, Zea mays subsp. mays
  misc_feature (809)..(809): n is a, c, g, or t
cttccactgcaggttcctaacccccacccacctcgcccaaattgcaaccttccccgagtgctccaggtcccgtggccggcccccagatcctctccaatcccaatccaagtatcgaacggatcccatcggtggcgctcgagcgagcgagtgcggccggaaccgagcgaagatgggcatctcgagcatgccggcgcccgaggacagcctgctggggttcgtgctgtacaacacggcggcgtcggtggcgatcctggcggggctggtgcgcgccgcgctgctgttcctgggcctggcggcggcggaggacgaggagccgcggcagcaggcggaggccgtgacggtcacggccgtggggcccagcctcgcggaccggttccggagcaggttccggccgtcgcgctacgggcggcgccggggcggggactgccgcgtgtgcctggtgcggttcgagacggagtcggtggtgcagcggctcccctgcggccacctcttccaccgcgcctgcctcgagacctggatcgactacgaccacgccacctgcccgctgtgccgccaccgcctcctgccccccgccgctgccgccgacgaggtgccccggattgcctgattagcgccctaggaattgagagtaggcgtagcactctgcacctcgcagcagcagtgtctctgtacaggtttttttttcttttcctttttgttcgggggagagagaggacagaacggagattgaaggaagaaaatggtggcaacaaagctgttccccctttcgtttctccgaagctctctgttgtctttattcattccaaaangtataatctactcgtatgaaccaagtacc

SEQ ID NO: 40116 - protein, 275 aa, Zea mays subsp. mays
  misc_feature (270)..(270): Xaa can be any naturally occurring amino acid
LPLQVPNPHPPRPNCNLPRVLQVPWPAPRSSPIPIQVSNGSHRWRSSERVRPEPSEDGHLEHAGARGQPAGVRAVQHGGVGGDPGGAGARRAAVPGPGGGGGRGAAAAGGGRDGHGRGAQPRGPVPEQVPAVALRAAPGRGLPRVPGAVRDGVGGAAAPLRPPLPPRLPRDLDRLRPRHLPAVPPPPPAPRRCRRRGAPDCLISALGIESRRSTLHLAAAVSLYRFFFLFLFVRGRERTERRLKEENGGNKAVPPFVSPKLSVVFIHSKXYNLLV

SEQ ID NO: 40117 - protein, 201 aa, Zea mays subsp. mays
FHCRFLTPTHLAQIATFPECSRSRGRPPDPLQSQSKYRTDPIGGARASECGRNRAKMGISSMPAPEDSLLGFVLYNTAASVAILAGLVRAALLFLGLAAAEDEEPRQQAEAVTVTAVGPSLADRFRSRFRPSRYGRRRGGDCRVCLVRFETESVVQRLPCGHLFHRACLETWIDYDHATCPLCRHRLLPPAAAADEVPRIA

SEQ ID NO: 40118 - protein, 145 aa, Zea mays subsp. mays
MGISSMPAPEDSLLGFVLYNTAASVAILAGLVRAALLFLGLAAAEDEEPRQQAEAVTVTAVGPSLADRFRSRFRPSRYGRRRGGDCRVCLVRFETESVVQRLPCGHLFHRACLETWIDYDHATCPLCRHRLLPPAAAADEVPRIA

SEQ ID NO: 40119 - DNA, 702 bp, Zea mays subsp. mays
aacgccgctcctgcgcgccatcactccactcgatcgaccgcctccgtgtccgtgccctacagctggtcatgagcgcccgcccaaccatggcggcggcggcgcccgtgcgcgcctgggtggtggcgctggcgctggtgctggcgtgcgcgctgctccagccgcggccgtccgacgccgcggcgcagcccgccccgcagtcgccggcgacggcggtgtcgtcgggcgccgccaagcccaagtgcgtggccggcgccaggaacgaccacgcgtgccgcgtcggcgccgtgcacgacccggacagccaggaggaggagggctccagcgtcaccatcgacgcgcccgccgccgcgcccgacgacgtcggccacgacgacggcagcgactacaacgaccccgacgtgcccaacaacgaccagctcgtcgtcgtcggccactgaaagctgccgcgcgcgcgcgcgcgccgacccgtggaccatgcgtgcatgaagaagaatgcagggggtgggcctgggcctgtaacctgttaatggatcggattctcggtgccaattcgtgatcttgaccggtctaagaagatggggacttgcgtctttgtttcattggttattatttctactagtgtgtatatggtaaagtcgtgtgctgtgaacctgcgatcatttatcctctgttcattgaattgaagcaatcccctctcccgtt

SEQ ID NO: 40120 - protein, 184 aa, Zea mays subsp. mays
TPLLRAITPLDRPPPCPCPTAGHERPPNHGGGGARARLGGGAGAGAGVRAAPAAAVRRRGAARPAVAGDGGVVGRRQAQVRGRRQERPRVPRRRRARPGQPGGGGLQRHHRRARRRARRRRPRRRQRLQRPRRAQQRPARRRRPLKAAARARAPTRGPCVHEEECRGWAWACNLLMDRILGANS

SEQ ID NO: 40121 - protein, 144 aa, Zea mays subsp. mays
RRSCAPSLHSIDRLRVRALQLVMSARPTMAAAAPVRAWVVALALVLACALLQPRPSDAAAQPAPQSPATAVSSGAAKPKCVAGARNDHACRVGAVHDPDSQEEEGSSVTIDAPAAAPDDVGHDDGSDYNDPDVPNNDQLVVVGH

SEQ ID NO: 40122 - protein, 122 aa, Zea mays subsp. mays
MSARPTMAAAAPVRAWVVALALVLACALLQPRPSDAAAQPAPQSPATAVSSGAAKPKCVAGARNDHACRVGAVHDPDSQEEEGSSVTIDAPAAAPDDVGHDDGSDYNDPDVPNNDQLVVVGH

SEQ ID NO: 40123 - DNA, 807 bp, Zea mays subsp. mays
agtctgcaataggggatctctgtaaacaaccgatcctcatcagagctgggggaggaatatacaattacctttatcagctaagatcatcatctgatgaagctggtcaaacaaagtctgagggaagcagtatacttggtaaatttcagataacatggcgtacgaacctgggtgaaccaggccgtttgcagactcagaacattcatagcactccgactgcaagcaaagatgttaatctccgtgctgtgaaagttccacctattatatatgtggaaagagcatttatggtcaatctgtgccttacaaatcaaacggacaaaactgtgggcccttttgaagtatttctggctccaagcatgtcgggtgaagacagagctgttctagtcaatgggccacagaagttgattttacctttggtggaggcttttgagtctatcaaatttgatctgagcatggtgaccacccagctaggagtgcaaaagatttccggaattacaatgtacgccgtgcaggaaaagaagtactatgaacctttgcccgacatagagatttttgttgatgcagaatagcaacaccaaattgggacccatttgacgagctgaagatgcatttgtacttttcattaccatgggaggtctacatagtttacataaagcactggctgatgtatattgatacatgcgattgtcatattgatatcaaattgacttctgtcggatgtcactcaaccttggattaccacattctcactcaaccttgagctgcacattgatcatgctctgctaaagactgcacggattacaattcttc

SEQ ID NO: 40124 - protein, 187 aa, Zea mays subsp. mays
SAIGDLCKQPILIRAGGGIYNYLYQLRSSSDEAGQTKSEGSSILGKFQITWRTNLGEPGRLQTQNIHSTPTASKDVNLRAVKVPPIIYVERAFMVNLCLTNQTDKTVGPFEVFLAPSMSGEDRAVLVNGPQKLILPLVEAFESIKFDLSMVTTQLGVQKISGITMYAVQEKKYYEPLPDIEIFVDAE

SEQ ID NO: 40125 - protein, 94 aa, Zea mays subsp. mays
MVNLCLTNQTDKTVGPFEVFLAPSMSGEDRAVLVNGPQKLILPLVEAFESIKFDLSMVTTQLGVQKISGITMYAVQEKKYYEPLPDIEIFVDAE

SEQ ID NO: 40126 - DNA, 533 bp, Zea mays subsp. mays
gatgctgtaattcccccaccaccacaccataaaatttggagtcgtgtggtggataccaacctggaatcaccaaaggatattgtcccagaaggggtgccattcacaggttcagggtacaggattgctccctactcttccatcttgcttaaggcaaagccttagaatggcggaggcaagtcattctcaagtaagcacgaataatggtgttgtgatccctaactttccaagctcttagccaactgtactgcaagtatagcaaactttggtatgtgaagtcggaccaacccttgcggaaatcaacggaagccatggtttgctaaaggtattactcatggagaattggagatatggcaaacacatacgcaagtaacctccacacatctaagcaagaagagcctttcattaggggatgcatggctcgaggaaactatatttgcatttggttgattcatttttatttgttgcacatgtcagtatgtcacctgtgtgtgtcaagctcttatttgcttaaaaattggacattcctttgttac

SEQ ID NO: 40127 - protein, 62 aa, Zea mays subsp. mays
MANTYASNLHTSKQEEPFIRGCMARGNYICIWLIHFYLLHMSVCHLCVSSSYLLKNWTFLCY

SEQ ID NO: 40128 - protein, 53 aa, Zea mays subsp. mays
DAVIPPPPHHKIWSRVVDTNLESPKDIVPEGVPFTGSGYRIAPYSSILLKAKP

SEQ ID NO: 40129 - protein, 40 aa, Zea mays subsp. mays
MARGNYICIWLIHFYLLHMSVCHLCVSSSYLLKNWTFLCY

SEQ ID NO: 40130 - DNA, 950 bp, Zea mays subsp. mays
aaggcccagatcaaaagaaaagagcagcggagcggagcatgctcttcctccggtgccagcctcgcgtctcgtccccgtccgcatccgcgtccgcgccgccttttcgtccccgcgtcggcgtcgcggctccactgggcgtacgcgtcaccggcggaaggcgagggcaggcggtggtcgcgatggcgtccgccgacgcgcgcttggcggggattgcctcctccatccgcgtcatccccgacttccccaagccagggatcatgttccaggacatcacgacactgctgctcgaccccaaggcgttccgtgacaccatcgacgtcttcgttgagcggtacaaggaccaagggatcaccgtagttgctggtgtggaagctagagggttcatttttggtcctcctatcgctctagccatcagtgcgaaatttgtacctttgaggaagcctaagaagttgccaggcgaggtgatctccgaagaatattctctggaatacggaactgacaagatagagatgcatgttggagctgtacaggccaacgatcgggctcttgtagtcgatgatcttattgccaccggtggaacactctgtgcagctgtcaaacttattgaacgtgttggagcaaaggttgttgagtgtgcttgcgtcattgaattggcagaactgaagggccgagacaaacttggggacaggccagtttttgttcttgtcgaagcagatgcttgagcggaacttgggacttctcttctcagtgagttagagttggtgctgttgatgctacctctctgtcaacaacaaagtttcccatgttggctatattcttgctgacacgtaataaagtttcattccaaattgtgatcccctgaatgatttgtcaatgtagacatgattgctggtccttgtatactgtggcttattattcacatcaattaaggataatcctgattggagctc

SEQ ID NO: 40131 - protein, 239 aa, Zea mays subsp. mays
GPDQKKRAAERSMLFLRCQPRVSSPSASASAPPFRPRVGVAAPLGVRVTGGRRGQAVVAMASADARLAGIASSIRVIPDFPKPGIMFQDITTLLLDPKAFRDTIDVFVERYKDQGITVVAGVEARGFIFGPPIALAISAKFVPLRKPKKLPGEVISEEYSLEYGTDKIEMHVGAVQANDRALVVDDLIATGGTLCAAVKLIERVGAKVVECACVIELAELKGRDKLGDRPVFVLVEADA

SEQ ID NO: 40132 - protein, 227 aa, Zea mays subsp. mays
MLFLRCQPRVSSPSASASAPPFRPRVGVAAPLGVRVTGGRRGQAVVAMASADARLAGIASSIRVIPDFPKPGIMFQDITTLLLDPKAFRDTIDVFVERYKDQGITVVAGVEARGFIFGPPIALAISAKFVPLRKPKKLPGEVISEEYSLEYGTDKIEMHVGAVQANDRALVVDDLIATGGTLCAAVKLIERVGAKVVECACVIELAELKGRDKLGDRPVFVLVEADA

SEQ ID NO: 40133 - protein, 180 aa, Zea mays subsp. mays
MASADARLAGIASSIRVIPDFPKPGIMFQDITTLLLDPKAFRDTIDVFVERYKDQGITVVAGVEARGFIFGPPIALAISAKFVPLRKPKKLPGEVISEEYSLEYGTDKIEMHVGAVQANDRALVVDDLIATGGTLCAAVKLIERVGAKVVECACVIELAELKGRDKLGDRPVFVLVEADA
